United States Patent Application Publication US 2015/0315605 A1 - sequence listing, part 22

SEQ ID NO: 33610 - DNA, 6124 bp, Zea Mays
atggcaaccccaaacatgaagaattacaggcactctagcccctttggcagcaagggtgttgaaagggctaaatctgcttgccgctcaaaatggaataacaggatcttatccaccccattcccaatgctcccaatagtggcagttgtgaacttcacaaacttaagcatatggaaacccagggccctacacccaagaaccacgaatactctttacaaatctccagagctcacgccagaaacaacagcgttcaagcacggcgcccatgccctaggccccagacccctattcgcaggtcgcagcagccgccaacacccagatcctagaccacgccgccaccgcgccaccggagtccggcggccagccaccgcccccgcccacccgcgtgccagcgagcgcgagccggcgagtccctggttccctgcgcgtgcgagaccagagatccaggcagcggacgagccctgtccgtccccagccatcagcgaccagctggtgccggtcatccctgctgcgacgagctggtgccgtgaagctgccctccaggcctacagatccattgttggtcgtgtgtgctgcccgtatccctacaaccatgctgctgcctggtgctgctgccttgagccgaccatgcaacacaaccgtgctggtgctggtgctgctgctggtgacatggtgaaaactccgagatctcctgttaccacaggaacaagaagatgcagagcaaagccacaaaagaaggaagaggaatccacagaaaacaacaagctggagaatggacctctggatgcaacagaagaggtgcatcatggagtcgaaaaaggtgatggacatgttacccgcaagagaccaaggagagcagcggcctgttctgatttcaaagagaaatccatacgcttatccgaaaaaaaatctgttgttatggtcaagaagaatcggatggaggaggaagaagtagatgctgtcaatcttacaaaacttggaccagaagatccaccaccttgccggaagttgatcgattttatcttgcatgatgcagaagggaacccacaaccctttgaaatgtcagaaattgatgacttctttataacagctcttatcatgcccatggatgatgatctagaaaaagagcgtgaaaaaggagtacgctgtgaaggatttgggcgaattgaggactggaatatttctggttatgatgaaggtactcctgtaatctgggtgtcaactgatgttgctgactatgaatgtgtgaaaccatcaaccaattacaaatcttattttgaccacttctatgagaaggctcaggtgtgtgttgaagttttcaaaaagcttgcaaaatcagttggtgggaatcctaaccagggcctggatgaattgcttgctagtgttgttcggtcaaccaatgccatgaaaggatatagtggaaccatgagcaaagatttggtgatatccattggagaatttgtatacaatcaacttgttggtttggatgagacatcaaacaatgatgatgaaaagtttgctaccctgccagttcttctttctctaagagaccagtgcagatctagggtggaactgaccaagttgccctctaacttctcgaacacaagtctgaaaattaaggactcagagtgtgatgagacagcagaagacgatgatgatgcaaaattagctagattacttcaacaagaagaagaatggaaaatgatgaagaaacagaggggtaggcgtggaacaccatcccagaaaaatgtctacataaaaatcagtgaagctgagattgccaatgactatccccttcctgcatactataagccatttagccaggaaatggatgaatacatatttgatagtgatgacagcatattttctgatgatgtgccagttaggatactcaataactggacactgtacaatgcagattccaggcttatatctttggaattgatccctatgaaatcaggggcagaaaatgatgtggttgtctttggatctggtttcatgagagatgatgatggcagttgctgttctacagctgagtctgtgaaatcttcgtcttcctccagcaaagctgaccaactggatgcgggaatccctatttatctgagcccaatcaaagaatggattatagagtttggtggctcaatgatttgtataaccattcggactgatgtggcctggtacaagctacgccaaccaacaaaacaatatgctccatggtgtgagcctgtactgaaaacagcaaggcttgctgttagcatcattaccctgttgaaagagcagagtcgtgcctcaaagctttcttttgcagatgtcataagaaaagtagctgaatttgacaaaggaaaccctgcatttatatcttcaaacatcacacttgttgagagatatattgtggtgcatggacagataatactccagcagtttgcagattttccagatgagactatccgtcggagtgcatttgtcagtggtcttttattgaagatggaacagaggaggcatacaaagttagttatgaagaaaaaaactcaagtgatgaggggagagaatctgaatccaagtgcagcaatgggtccagcatcgaggaaaaaagcaatgcgtgcaacaacaaccaggctcatcaacagaatctggagtgattactatgcacatcatttccctgaagattccaaggagggagatggaaatgaaataaaagaaattgatgatgaacaagaagaaaatgaagatgaggatgctgaagatgaaggacagattgaagagaacatctcaaagactcctccatcaacacggtcccggaagttgctatcacaaacttgtaaggaaatcagatgggaaggtgaaacatctgggaaaacattgtctggagaaactctatataaatgtgcttatgttagggaactcagaatacctgttggtggaacagtagctctagaagatgattcaggagacacagtcatgtgttttgttgagtacatgttccagaaagttgatggttcaaaaatggttcatgggaggattctgcaaaaaggttcacagacaattcttgacaatgcggcaaatgagagggaggttttcttaactaatgactgcttagaattcaaattagatgacatcaaagaattggtaatggttgatatccaatcaaggccttggggtcacaagtacagaaaagagaattctgaagctgataaagttgagcaggtcaaagcagaagagagaaagaaaaagggccagcccatggtatatttctgcaaaagcttgtactggcctgagaagggtgccttctttgccctctcccgagataaaatgggtcttggtagtggtttatgtagttcttgtgataatatagagccagattctgatgaattaaaaatattctcgaagaccagctttgtctacagaaaggttacatataatgtcaatgagtttttatacataagccctgatttttttgctgaagatgaggatcgtgcaaccttcaaggctggccgaaatgtgggtctaaagccctatgcagtttgtcaaatattatccatccctgaaggggctggatctaaaaaactcaatccagcatcagcaaatatcagtgctagaagattttacagaccagatgacatttcatcagccaaagcctatgcttctgacatcagagaggtctactatagtgaggatgtaattgatgtgcctgtggatatgatagagggaaaatgtgaggttagaaagaagaacgatcttgcaagttcagaccttccagtgatgtttgaacatgtatttttctgtgaacttatatatgaccgtgccagtggagctctcaagcagttgcctccaaatgttaggtttatgtctatggtgcaaaggacaagtgcgttgaaaaagaacaaaggaaagcagatctgtgagcctgatcaaatagattcaggtaaatggttggatgtgcctaaagagaaccgtctagctactcttgacatttttgctggctgtggaggtttatcagaagggctgcagcaagctggtatgtattgttaacactgatgctgtataccatgaacatgaccaacaaataaaaaatttcctcattgttcaatgctgtaggtgtatcttttacaaaatgggcgattgaatacgaagagcctgctggtgaagcatttaataaaaatcatccagaggctgtggtctttgtagataactgcaatgtgattctaaaggcgattatggataaatgtggggatactgatgattgtgtttcaacttctgaagctgctgaacaagcagcaaaacttccagaagtgaacattaataatcttccagtccctggcgaagttgaattcataaatggtggtcctccgtgtcagggattctctgggatgaatagattcaaccaaagcccatggagtaaagttcagtgtgagatgattctagcattcctctcattcgctgagtatttccgtcccagattctttctgttagaaaatgttcggaactttgtttccttcaacaaagggcagaccttccgtttggcagttgcatctcttctggagatgggataccaggtccggtttggaattctagaagcaggggcttttggtgttgcccagtccaggaaaagggcgtttatttgggctgctgcacctggagagatgcttcctgattggccagagccgatgcatgtgtttgctagccctgagctgaagataacactgcctgatggccaatactatgcagctgcaagaagcactgctggtggagcgcctttccgagcgattactgttagagatacagttggggatctgcctaaagtgggaaatggtgccagcaaactcacgcttgagtatggaggtgagcctgtgtcttggttccagaagaagataagagggaatatgatggtactgaatgatcacatatctaaggagatgaatgagctgaacctaataaggtgtcaacacattccgaaacggccgggttgtgattggcatgacctaccggacgagaaggttaagctgtcaaatgggcagatggctgacctgataccttggtgcctgcccaacacagccaagaggcacaatcagtggaaaggactgtacgggaggctggactgggaaggcaacttccccacatccgtcactgatccccagccaatgggcaaggtcggcatgtgcttccaccctgatcaagacaggatcatcacagtccgggaatgtgctcggtcacagggctttcctgacagctatgaatttgcgggcaacatccagaacaagcaccggcagattggcaatgccgtgcccccgcctcttgcctatgcacttgggaggaagctgaaggaagccgttgacaagcgtcaggaagccagcgcaggcgtgcctgcaccatgagaagttttccttccatcaaaccatgacccatgaagctaagcgctgaggaacggtggtcgatggacgatggctgtggtgaaggtcatgcgggctcgtcctgatggaccgggagcggtgaagggcgagtgttgggtcttgactgacggatcagagcagccaggtgaccaaccgcggtgactgacacctgggacacgcactttgtgcgaggacgtggtggagtggaccatgttgccggcgtggtcgaggactggcgggatacgcgtctgatcgtggaggacgtgcacgaggtgcggtgttcacggcaggtttggtggtctgggcctcaaaaccacccagcgctacagatgcctggttttgttgagtatgggcctcaaaactcggcggtggcggttctagagggaaccggtggcggcaggcgacgtgatcgtggagggtgcgtcaaggcgaagtgtcggtggggaaatccaccggccgggtggcggaatgcacccgccctaatcctaagatgaggaggggcctaagcggttgcatgtttggtgaattcgagatgaacacaagaggacacgaggaattatagtggttcagatcgtcggagcgtaataccctacctccactgtgtgtaagttgtattggcggtgtgcttgagcgtgtaaattgagtttgtcccttgtaacgttgtgtgccttaccttttatagtttaagggaggcacatacaaggatgctaagccccgacatgcgggcccatgagcataat

SEQ ID NO: 33611 - DNA, 624 bp, Zea Mays
aacaaggggagaggggagcctaacatggagacgaggagcctatctcccttagccaagaatggcttgcctatctccattattttgttcatcgcaggaagcccttccgtgatggatgaaatgtggatgatggcatccattcttggctaagtgagtaattctcttccaccatgctaggctttccctctttttaaattctcagttttccttatgccaaatataaactactactagtagtagatcttttgaagcagtgatgaagctgatcttcgtctggaaaccttcagttaaatggtgtacgcatgaaggcgaagctaggaagcttcaaccctgtggtctaagcgcgcagcaacaaggaaacgagggagaagtcatggaaggcttgatcagcacgtctgcaaaggcaaagacgacggtgtccctacaggatcatgtaatctatgtgtataggatctggggacatgtttgtaattttacacgatgtggtactgttgctcaccactattgggacggagataaagagacttgaatcgctctatctctgaagttgtatcttcatgttattatctcagctcccgaaggtacacttgtagtcatttgtaacttaaaaagaataataaagggaat

SEQ ID NO: 33612 - DNA, 230 bp, Zea Mays
ggtatgcttataactatgacaacattctacccataaacttgagcttaatgtgtcatgcaaacaagaacatgtggatgatgaggcgccttctgattttattctatgatgtcaagtaccatctccctcaataggaggcacatcgatctagaaaagagcaagcataccttctcgaacacttacccagtagttaggatttacactagtgagtattttttgttgataaaaccgac

SEQ ID NO: 33613 - DNA, 4051 bp, Zea Mays
cccggccgcacagactcgatgccgcgcggtgctacggtggccctcttcgccggtccatcgaggaggcctgccgtggtgctctcggcggtctttgattccacgcaggaagagccccgggcggtgcgcgcggcgcggatttggcggcggcctcatggcatgaacggtgagcagagatgagtatccctcaaatcgcttataggtatttggtttgaagaataagctagtctattatattatcacttctcatttgtttggtttgtggaatggaatgagttaattcatcacaacatcactcctcatagttattagttattactaacataagaaataaaattattccaccaaatttaagaaatgtacttatgatgatggagcgactctcttagttctttgcagctctttggttattgagaattggtaacatcttttggacgcgggggatgactttgcagtttgcagcggcactcaaggcccctactttttctcgaatcccaactcatttcttcctcctcttctggattatcatctgggaggcaaaggggtgacttgtcgtagagcattttatgtcaaagatgccctgctttaccgacggagacagaaaattagtgaagacagagatatacaccatacaaccaccttcgatggacgcgggggatgacattgcttgacatggactgcgtggctgaggcaatcggcatacagtacttgcagcctgtactactatacatagacagttctgttttcctccaaagtgctttatccttagaccattctcttctgtcatatccactcccgctccactccatactgagcgtgcgttcttgatccatactgagctctgccgagtgctcgctccaatggctgaacttgcagccagcctggtggttgccccactgctgtccatgttgaaggagaaggtgtccagctctctcctcaaccagtacaacgtgatggagggcatggagaagcaccacaagaccctcatgcgctggctgcctgccatccaagaagttatcgctgacgccgagaggcagacgtctcgccgcggcgtggagaaatggctcgagcagctcaagacgacagcgtacgaggcgaatgaggtctttgacgacttcgagtacgaggcgctccgccgtcgagccaagaaaaatgggcacatcgccaagcttgccattatggcaagggtaaaacttttccctacccacaaccgtgttgcattccatatcaggatgagctacaggcttcgcaggattgttgacaccttcaaggaccttgtggaagaaatgaacacctttggattcaacaagcttgagcccgaggcaacaacgacatggaaggagtggcgtgagacagattctattatcgttgatcctgaaaatattgttgccaggtctagacatgatgagaggaagaaaattgttaacttattggtcaatggtcatgttaccgatggtgatcttatggtcgttcccattgttggaatgggaggactaggcaagaccacactcgctcagctcatctacaacgaccctcaggtcaaggagcacttccatctactaaagtgggattatcagattgatatggacaagcttatccaactatggatggccaatggttttatctcagatcaaaaaaaggtacctgctgaaaccgtaggtaaaaggattgtcaatgagctggtctcgaggtcatttttccagtatgaggagcgaagttggatggggtacaattctacaacttttttgaagattcatgacctcatgcatgatcttgcactgtctgtttcggaaaaggaatgtgtctgtataacaagggaattgattaaaaatagtgagttgcttccaagtgctgcccgccacatacttattcaaaattggataggtaaagagattcatggttatttatatggttctatgaggaaaatgtctcggcctatccaaacatttatgtttgatgggtctagtgaagctgccggtgtgcaacatttatcaagatatagttctttgcgagtactttctgtgccaggaattgggtttcatttaacaataaaaccaaagcatcagtgccaccttaggtttcttgatatcaaggacagtgtcatcaaagaacttccagatgacattagcgtcctttataatcttcagacacttttcgtcatctgtacacagatgggtgcacaagggaggaggagtgcaggagcagccaaccttaagaataagaaggaactgagacaactgtcactagagtggacaagtggtaaggaggagggactacagtgtcatgaggtgctagagggccttgaagctcatgatggactcctggctctaggaatacattactaccaaggcaccagttttccatcttggatgggtatgttgaaaaacatactcgatcgaccttcggttgtccgattgtagtaaagtagaccggcttccaccaatgtgtcagctagcagaactgcaagtccttcatttgaaaagattggaaaatttgcagttcctatgtagcaggtgtacatcctccacgtttggaaaactgaaggatcttaagctacttgatcttgacgtttttgaaggattttgtgaggcagtgcatggatgtgcagtagcatttcctcagcttgagttattggaaattgacagctgtaaaaatctagcagctctaccagaagcatcgatgctgggagaagcatattgtggtggagatcatacagtggcgcgctctgcatttccagaactgaatattctcgtattgcaaggtttgcgtagctttgagagatgggaggctgctgccctttaaactgaagaaagacatgcaatattccctcgggttaagaatggtcctgagcaggcaacatgaggaatgagccagccagttgcttttgccccatctagagtctctagagatatcggggtgtgaaagtctggtagaggaggtattcaactcctcccctgctatgctcttaagagtatggatgtgataggatgtcacgggttgttgtcatctctagaatctctaaggatacaacactgtcacgggttgtcaatcttccctcgtccctcagggtaatagatactacggttcatgtcagggcagctggatgcactcaatacctgtcatcactggaaatcctccgtctgtctcgttgcaaaaacctgtcgtgcttgcccagtgcgcgggcaggaggacgacaggaatactcatctcttcgtgagcttacaattacggtagcagggagacagagccgaacatcaaagcagaaagaaaaatgatccttattaattggttgtacaatacaatatgttatgtgatttggaatacctgctgccgacgacagttgcctccaattcctgcagcttctggcacctagagatgtctagctttccacagcttttcaaggttggtaactatttgcagtttctgtttcgggcgacccattgctttaggttttggagacatttttcggagggttcaagaccaggaaacggatcgacgccgcgtctatgcaaatttttttttcttcttattttcattggagttttatgaacaggattgcgttttgaggtttatagcctgtctattgggtgtcgtgtttatttttatgcactctatgttgtgagtgctagtccatgcagttatgtggagcgagcccaacaacgataccagcctagcaagttggtctcgttgtacccccggaacaacgacaacgtgatggtggtggcgatgcgcaacgccgcggagccggcgtggcgacagcggcatcgtttcatggggaccccgatgccagtgacagaaggaggtggatacagggtcagggagaaaatgtcacttgctcctctctatctttttgagggattgattgataggagctttcgagggattaagaaaaaatgtaggacaaatggttgagaaaaaaaaagtatatgtttggtttgtaaccatagattgtggcaaaatctttcgcttgctgtgctagggtctactgcccaacaagtctgtcacatgcttatacaatcaacaccatagctaagagaaaataaaagatgagcca

SEQ ID NO: 33614 - DNA, 2003 bp, Zea Mays
ctccctggcccgctcctattatatcctcctcgtcgagcctcctcaccccccgcaccaactctcgccattgccagtcaagctcgctataagcagccagagattcaggacaagagaccacgatcctaacacacagcgtctctgtcatcttcgatcgcggcggcaccaaaggtcgcgacgtggacggcgatggacgctccggccatgttcacgcgcaagcacgtccccgaggacatcggcctccggaacatcggcgtcggcgaagcggaggacgatggagccgggggccaggcccagctgcaccgcgacgagaagcagcacaagccggtgctgaagaaggttaaggagaaggtgaagaagatcaagagcaccctcgctggccacggccacggccacgacggtgagcacggcggagacgagcgcatgggagaggaagacgcatatgccggcagcgacagcagcgaggagggggaggaggacgcggtggagagggaggccgcgctggagaaggatggctacatggaggacatcgaggataagcccgtcgtcatggagtccgaccccgaccccgaccccgatgtgcacggcgcgccaatgtacgagtcggcgagggctccggccgtgcaggacctcgtcgccgagtacgatcagccggcgtggacgccggccgtgcgagaggtggagggcgacggcgtctcacctagggtgcggctcggtgacgtcggcggccccgtcgtcgaggatccggccgcgccgcgctccaagacgcccgccgcacgagagggtgaggacataggcacgacgcccgtggtgcagcagtttgagaccatgagcttgtccgacggtccggcgcacgtgggcgcggccaaggagggcgccaaagcagaggagtgggaaggcaatgccgcggatatggtgggcggtgtggccggtggcgctagctacacggacaggctcaagaacgcggctgccggcaccacggagtacggcaggaagctagcgagcacggtgtatgagaaggtcgccggcgccggcaccggcaccggcaccgctgtgggcgtggggaagcgcgacgacgaacgcacagaggcggtgccggcgtcgaacacccgcacggacgcggcgagaggcgcggggtacacggacaacatcaagtcggcggacgccccagccactgtggaggaggccaacaccgagtcgaggccgggctatacggacaagatcaggtccgcggctgccggcacaacggagtacggcaagcagctggcgagcaccgtgtacgagaaggtcgccagcgtcggcacagccgtggcgggcaaggttcagcaggccacgcagtcggccggcacggcgacgcccggggtcggcgcgcagcgggacacgggtgccgccgccacggccacccccggcgccggcgagcaggacaagggggtgaccgtcacggggtacatcgccgagaagctccggccgggcgacgaggaccgcgcgctgagcgaggcgatctccggcgccgtgcagcggcgcaaggacgacgccggggacacggtagtgcagcgcgtgccggcgcccggccaggccgtcgcgtcgctcaccggcgggaaccgggtctccgagaccgtacagccaaccacagccacaggggaagacgtgaaggaagggtatgcggcggaggcgcccgtgatccgcggggaggagatcggcggcgcgaagctgaacacgaatgccatctgaagtgatacgcaagaggagagcacggctgctctctgattactgtgtcaggtttgtgtacacgtggatgatgtgggttgtgctgtggagtagcagctggaataaacgtgctggttgtgttcgacgtggtacgttttgggttttacgtggtggtgtgatcgtgtatccacatgcttttttactcgtgtatgtattccgtttatatatgttgagaattgttctgtttttgttgcgttcgtacagtcgcattctaaatcatatactcaatctatttcgcg

SEQ ID NO: 33615 - DNA, 2755 bp, Zea Mays
ccgacattcaccccgagtgcgcgcgcgctctcttccctcgctcgcccgctcgttcgcgacggcaactaggcgatcaacctcgccgcccgccgccctaatttacgtgcccaggtcttcgtccgtcccctctctaggacttcgccgatcctttctcaggcgacgggagccaaccagctgccccaatggaagttgagctgccaaacatccataaagctacttcgagtgaccattggagtttaaccagcagccaatacccgtctggtaaatttcctaaggtctcagtgggtatcatgattccgaaggcaggtagtataccaagagccagaggtggagatgctaccccaactcctacatttgacaggaacttgtctcaaggaactgatggtttatctagaccaaaaggaaccttttcctttggaacaagaagagaacaaggcatcagcgttgaaaaattggagacacctgagtttttaagttcccaaagaaaacggaacacggagtctgcagataaagccaaacccaatagtgagatgctcaggatgaagttgtgggagatccttggtggcacttcacaaaacaagcaggccgctgcttcaccaaaccctgatgacatggagacacctgatcagcctaaaggtcaaactgtcaaaggaccatcttcagggaacaaggaggttttcacttcaccttttcttgataacatcaagacaccagatccactgaagcgtcaaacggtgaacttcacaaagtgtaaactgtcccttgatccaattgaatcagattctgatagtccaaaagttgatgaaagaagacctgttactcgctccttgggacgtaagaaagcactggcatcctccaagaagcagagccgaagttcaaagaaaccattatctacttttcagtctacacccaagaagaaaatgctggacaatgtgtttatctttaatgagaaatgcacacctaaaacagtggatcagggtgaaacaaataaagcgactgagtcacgtggtagcaggtctcctgattctgccaaaaaaagagtaaacaggaaacagccatacctttctccaactgaggatgaagggattaaaagttctgaaacaagttttgcaaaaggatataaatctcacaaatggccttcagatattgatgttcctgataaatctcctgttgagcatatgggtaggaaatcaaatctaaaagaggacagaatgagcaaaagacgcttatcttcagctgctccttttcccactgctgcaacacaagaaaatactgattctgataaagaacaagaacaatgcccggaaaacttcctaaccagggcttttgatcaagcctccaaggagctgagcaaaagcgcaaagaaaccattttctacttttcactctacacctaagaagaaaatgcagggtaatgtgtttaccttcaatgagaaacgcgcacctaaaacggtggatcaggacaaaatgaatcaaactactgagtcgcctggtagtgagtctcctggttctgcagaagaaagagaaaacagtaaacaaccatctcattcacccctttctccaactgaagatgaagggactcaagggagtaaaagttccgaacaaagctttgcaaaaggatataaatctcaaaaatggattccagatatcaagggcacagataaatctccccttgagtatgttggcaggaaaacaaaactaaaagaggatagaatgaacaaaagatacttatcttcacctactccttttgccacttctggaacacaagaaactatagtttctgacaaagatcaagaacaatgcccagaaaactacctaactagggcttttgatcaattgatagtggttctgggaaggtttcaaactaagatcaagtctgaaacaagcaagaaaagttctgagattcttgcagctactagagagactatatgtcagcaccttgagggggttgaggcgcagatgcaggctgacgtggacaaattggtcaatgcaggcaggtctaaaaggaaacgcctagaatctacatttgaagatcaacaagaaaagttaagaattcttcatgagaagttcaaggaggaggtcaacaagcagcttctgaattgcaggagttctcttgaggattttgaatcctaccatgcagaacttaagggagtagctgacaagcaaaaatcatcccacaagaagctcttagcaaatgccgagaaaacagtaggcgctcagctcaacgatgcagaaaccaaaatcgcagaggtccagaagagagcacgcaagaggatgaatggcctgaaatacgtgctcaaggagcttatcacagagactgttgattgactgatcgaagttgcttcactttgtccaagtacatatcaccggtgcgaagattaggatacgcaggatgcacatgcgaacacgtctagggttccatttgaaaggggtacaggagaatcatgatgcacataggttttgtcagaaatcgagatttgcaaaggctattttacttctagacgtccttagtattattttctgggtcgtaccttccgttagggtttttgctacctggtcgatgtgcacagtgcactgctgcactgcaacacccagacgtctttcagcgatatgcgacctgtaggatgtgtgtactgttcctcttcgttctagccaaaccctgttgctagctggaatactaatgaagaggtgtcttgatatttacgtgatttgacgcttgcttgatgctgtgcactggagtctaatggtgactggtt

SEQ ID NO: 33616 - DNA, 3369 bp, Zea Mays
aaatcggtctagccctcccaccttcccgcgaaatctaatagtcggcggcgcgaagcaggagttctggggaaatttcgccggccgggtgcgagcagagccgccgccgccttcttgcgtgggagatggtgaaggagcgggaggagcaagtggccattgtgcgcatggtgcttggcgagggtacaccggagatggacatcatccgtgctctccacatggccggcgacgaccccaccaaggccattaacatcctcctcgacctcaacaaggctgcgccacctctcccgccgtcgccgtctccctttccctgtccatcgccctccccttcgccggggaaacccgccaaagccctcgtcgactcaaccccaccatgcaaagcccctacccggcccatgcccacggcagagaaacctaagtccactacaagcaacggtggcagcgaggagcactggtggctggtggggagcgccgagatggtggggctgtccacctgcaagggaaggcgaattacctcaggggacgtggtcaccttcagcttccccaatgccacaaccgccgtgggcaagagccgtccgagccgtcccgccctagcttcctgctcctccgagatcatgcgcttctccaccccgagccacggggaggtgggtcgcatccccaatgagtgggcaaggtgcctccttccccttctcaaagagaacaagttaaaagtcaagggctcgtgcaaatcagctcccgaggtgcttaccattatggacactgtcctcttgtcagtgagtatatatatcaacagctcaatgtttcatgatcaaaagcaatcgtcacccaaagcagctcgatttgctccatatgactccacatttcaccccctacctgcacttttcaaattgataggacttgctccttttattaaggccgcttttactccagaagatctttattccaggaagcggccaactgaaacaaagagcagtatagggtctcctgctgcaaagctgacatccggcagattgaggttgtcttctgatggaaacgaagatgatcatggtgaagaaactgtttcagattcagatttggatgatataattgggatctcagacagctgtgcactagaggaaagggctccccctgattctctgatgtgtgatctacgctcttatcaaaagcaggcacttcattggatgctgcagcttgagaaaggtagttcttcccaggatgccgctacaacccttcacccttgttgggaagcatacaaacttgaggataagagggaactcgttttgtacttgaacgtgttttcaggcgatgctacaactgaatttcctagtacattacaactttctagaggaggaattctggcagatgcaatgggactggggaagactattatgacgatagctcttcttctttctgattctagcaaaggatgcatcacaactcagaatgctgctcagacccctagagaagctagtgggttgggtgaatcgcatgatgctgtgaagaagcttgctaaccctttctcttttagcaaacacaagaaacctaaggccccacttattggaggaagcaatctaattatctgtccaatgacactaattagtcagtggaaggcagagattgaagctcatactaagccaggcactgcgaatatatatgttcactatggacaaaacaggccaaaagatgcaagcatcattggtcagagtgatattgtcctgactacatatggtgttgtgtcatcagagttttcaatcgatggttcaacagaaaatggggctttgtactctgtacattggttcagagttgtgcttgacgaagcacacatgataaaatcttctaaaagtttgatatccctagctgcggctgctctgactgcagatcggcgctggtgtctcactggtacaccaattcagaacaatttggaggatttatacagccttttccggtttctgaaagttgaaccatggaggaactgggctttgtggaataaacttgtacagaaaccatatgaagaaggtgatgaaaggggcttaaagctactgcagtccattttgaagccaataatgctgagaaggactaaaaattgcacagacaaggagggcaggccaatccttaatttaccccctgcaaacattgaagtaaaatactgtgttttatctgaggctgagaaggatttctatgaagctctatttcgaagatctaaggtaaaatttgatcaatttgttgagcaaggaagggttctgcacaactatgcttcaattttggagttacttttgcgcctaaggcaatgctgtgatcatccattccttattatgagtcgtggggatacaaaagagtatgcagacctaaacaagcttgcaaagcgttttctgcgtggtggtaatggtgctgttaatggtgattcttgcatcccctctagagcttatatcaaacaggttgtccaagaattgcaaaaggatgaaggggagtgccctatttgtcttgaagcctttgaggatgcagtattaactccctgtgctcatcgtttatgccgagagtgtctcttatctagttggcggagtgcgacagcaggcctttgtcctgtctaatgtcaatgagcaagcaggaccttataactgctcctactgataaccgctttcaaatcgatgtcgaaaaaaattgggttgaatcttccaagatatctgctctcctgcaggagttggaagctcttcgcagttcaggcgccaagagtatcgtgtttagccagtggactgcttttttagatctgttgcaaattccactttctaggaataatttctcatttgctaggctggatgggacgttgaatcttcagcaaagggagaaagttataaaggagttctcagaggacaaaggcattttggttctgcttatgtctctgaaggctggaggtgttggaatcaatcttactgccgcttctaatgcatttgtcatggacccttggtggaatcctgctgtggaagaacaagctgtcatgcgcatccatcgaattggtcaaacgaagactgtttctatcagaagattcatcgtgaagggcactgtcgaagaacgaatggaggctgtgcaggctcgaaagcagcgaatgatttctggagctttgactgaccaagaagtccgcactgcacgtatagaagaactgaagatgcttttctcctgagactacaaaagggctgttgtgcatcggatggtcggcaattcggcatggctaaaacaagatggctggtagccagaatgttggaaggatagagaatgaaataggagatacaggctataagctccatgagcttttcccctccaagcctggttgattacagaacagccatgtctgtggagagaataagtgcaggtgcatgacga

SEQ ID NO: 33617 - DNA, 3231 bp, Zea Mays
gccacgtgggcccgcacgacccaactattgaatacaatgaacaaacgcgtcggcccattgcgaagcctcacgtctccagcaccgggccaccggcggcgaggtcgcgcgagcgcaggcaggggtggtactgggaggggaggaggggaagaaggaggtgactgcgatgtcgagccggttctggaggtggtacgcggaccggcagttccacaagtgggagaagacggtgctgtgggacatggtggagccctaccgcccgccgcgctccttcgcgccactcgtcggcacctacgtcgccgccttctacaccggcgtcgtcggggccgccgtcaccgagcagctctacaaggagaagtactgggaggatcaccccggcgaggcggtgccgatcatgccgcccaagttctactgggggccttggagggtgatgaacggagaagttccgcgcttcattcagccgcccgacgaggccaagacggcgtaggagcttcgagcttgcttcaaaacttttcagaagaagcatgtatctggtctcgatcgaaaaaaagaaattggagccctgcttttgtgcctctcccactctcctggttgtacgcctgtacctgtctgtctggaatacacgagtaagataagatcaggagaactgaagacctcaaataaagaaaaaaatcagaaaacgttggcatggatacctactaccctaccctagctagattctagctcccattctgttctattgcttgagtattgttgcacgtctccacaatattctgtcgttctaacttccaggcaaacatgctgccgattgatgatcatatctgaatagaatataaagatagctcaaatatgatcgtgtttttcatgtgtgttattttccaaataaacaatacaatctccattcacctttaagcacacaaccgcggactcgaactaggctcaccggagttgaagaaaccctgtaagcacacaaccgcgtggtggatctcgcggccgactgcactgggaggtggccggcgcggcgcagcgctggcggcatgctctgggcgagttgaagcttttgggctgggctaatttcggttctttttgacgttcgggtaccgggctggtactgggagtcagtacccaaatggagggcatcagacaaacaaacagaacctttaaagtgccagaccgccgcatccgccgccactagcggagactgccccgccgcgctttctccaagttcagctgacggccgccgtgcctactccaggccccgccgacgccctgtgaagaagaccctggttgcgctggcgcccatcgcgagcaagaagctctgaaactcgacggcggagcctcaagctcgtgcgccgaagttcattctttcgccctgtagaaacaaagggcagaaattggctaggactatcctggccccccactggccatggcgtgtgctgcttacagcatcagaagccctctcaagctcgctgtaaggcacggctcggatgtgttgagtagcaacaacttgtgcaatggctttaagtcttcggtgtcttacctcaattctcaacgttggagcagcaactgctcagccgtcacaatgcggcatgtcgcatcccattgtcactcgattgttaagactccagcaatgtggccctcaaaagcttcagcaactgatgcagccacagcttccgatgagaggataactgtactggtcattggtggtggaggcagggagcatgctctttgttatgccttgaaccattccccatcatgtgctgcagttctatgtgcccctggtaatgctggtattgctcagtcccgggatgcaacatgtatcccagatttggacatctcgagtagtgatgatgttatctcattctgccgcaagaggggagtgggaatggttgtagtgggccctgaagcccctcttgtcgcgggtcttgcaaatgaccttgtcaaagttgggataccaacctttggcccttcatcagaggctgcagctttagaaggatcaaaggacttcatgaagaagctgtgtgataagtataatatccctacagctaaggagcacctattgttgttaaagctgatggactggctgctggaaagggtgtggttgttgcaatgactttggatgaggcgttggaagccatagattctatgttggttgaaggctcattcggttctgctggttcacgggttatcatcgaagaatttctagagggtgaagaagcgtctttctttgcattggtagacggcgaaaatgctttgcctcttgaatcggcacaggatcacaaaagagttggtgatggtgatgttggcccaaataccggtggtatgggtgcatactcccctgctccaatagtgacagatgagctcaaacgcattgtaatggaaagtataattatccctactgttaaaggcatggcagccgaaggttgcaaatttgttggtgtattatacgcagggcttatgatagagaagaaatctgggctgcccaagcttattgagtacaatgtaagatttggtgacccagaatgccaggttctgatgatgcgattagaatctgatctggcacaagttctgttatctgcttgcaaaggagagttgagcaatgtttcactgacctggtctcctgaaatggctatggtggttgtgatggcaagccagggataccctggctcttataagaaggggaccgtaataaaaaacgtggacaaggctgagcgagtgtctccagctgtcaagatattccatgctgggacagcagtagatggtgatggcaatcttgttgccgttggagggagagtccttggcttcactgccaagggcaaggacatcgaggaagcaagggcaagagcgtacggtgcggtagacgctatcgagtgggtagaagggttctgcaggcgtgacattggttggagagcactgaggcagaagcaagtggctaaccagtagctattccatgaccatgagatttccccagagaaccgcaactacggtgagcctgtactgtttacaagtaataaaaagggaaacggtgcgacccccattgtttttggttgtggaaagacaagtattgctgatcaaacagtagttaacacctgttgatttcagcatgattcggtatatgtttgcaccgatattgtgttcagagtccagacaagcgctagagtgaaaacagcgcgcgccatctgaattctgaccaattgtcttcagttatcggataagtggacctttccaaataattgt

SEQ ID NO: 33618 - DNA, 2318 bp, Zea Mays
cgcgggcagccaaagcggcgcgggcccagccgggtcaggccacgtggcggaagcggtgcgggcgatcttcttgtccgcgtccatccacgtcgaccccgtcaaggccggattcttttatcctcctcctccccgcccctgatcgatccctccccgacatcaaccggcgcagcgcgaccatccccagccactattattattaccatcatcatcacctacccgctgcctccatcctcctcctcgcccctgttcctcgcgtcttcccgtcgtctccgactcgcttccagttcccgatttgccgaacgccagcgacgccgtcgcatggagatctccttcgaggcgtgggagggcgtgcagcggcacggccaggacctcgcggaccgcctcgcgcagggcttcacgggcctgctccaggcgccgccgcagttcccgtggccgccggcgccgcacaagcggatgcccttcgacatcgacctccccgtcgtccccttcggcgccggcgccaggccggcgccgagcttggggcgtccgtaggcggggccgtgcagcacgccgtgcgccatctgcccgtgccgttccgcaacgcccagatccggcgccgcacgctaccgccggcgccgcctcaggcgcccctgccgcccgcgacttcggtgggcgagggcgcggcagggcgctccgtcgaaagggctgctgtagataggtgccccctcgaggcggcggccgccgccgccgctgcggccactgggagcgcggctgcgtcgagcgtcagcggccatgttagcggggacgatttggacgaggacgacgaaggcttcggctgcggtattgggactcttggaaactttaagaaggccaacggtactgtaaatatgtcggcaacatacaattccaggagtcaagacatcgagagttctgttgttgcacatggagacctctggaggctagaggcatcgcgtggtggatcaacttctggaaatggcacttcgcctctgtaccttgttcagttggggcctctactttttgttcgagactctacacttctgttgcctgttcatctatcaaagcaacacctgctttggtacggttatgatcgcaagaatggtgtccattcactctgtccagctatatggtcaaaacataggagatggttgatgatgtcaatgatgtgtctcaatccaatagcttgttcgtttatggatttgcaattccctaatgggcaactaacatatgttgctggtgaggggatatcagccagtggttttcttccgttatttggtgggttgcttcaagctcaaggaaaatatcctggagaaacaagagtgagcttttcttgcaagaataagcgtggcacaaggtttactcctatgtttcaatggcctgacaagtctgtttcgttaggagttactcaagccttggcatggaaaagatctggtcttatggtgagacccagtatacaagtcagtgtgtgccctacgtttggaggaagtgatcctggggtacgggcagaagttgtccattcattgaaagaggaattgaatctgatgtgtggcctctcttgctcgcggcatccatcagcttatactgctctatctattggacgatcaaagtggaacggtcaagtgggcagttctggagtggtaatcaccttggaaacacctcttaataacattggaaggccgtcgttatctgttcaactgaatggtggttttgagttgtgattcttcagactccagcgctgaagctgtacataccagtgtgtatatattgccatcaccaatgttcgtgctccatagtttgtggaagtgggctgcagcctgccggcttgcaggtcgtttttgttactgtagtctataggtagtctcaactcagcaaatcagctgccatggtacccaacccatgcgggcacagaagtcaactactttgttgttcaatcattatgacaatccttaggtcttatttggatactctcgtattcacattaatctcacatttattgaagtgaaatttaaattaatttacactccaatcaacttcaatacatatggattgaagtcaatacgagagtatcgaaatacggccttaagggattgtgacgcttgcagcaggtgagctcatattagaagttcgtgaaagtggaggaccacgtaatcatgcaagttgttcatccagaatcacattcttttggtgcaggactggcaggttgggatgtaaacggacggatgatcttgttttaacattataactcggacacgcaaaatgataaaaacgaactaatatgaaaaaatacgtgggtaacggtaaaaaggataacaaagctacaa

SEQ ID NO: 33619 - DNA, 1837 bp, Zea Mays
gaccgttgtgcctaaagcccacaatgaccatatcgcgcagcatatccgaacctagccaaccagccccagcgcccaacgcacgaactgtaagaaaccctagcggagcaactgacacactcgcctacatcctcggccgccagctcgccaccatcgcctcccggtcggccgcgccacctcccggaagattggataacaatatcatgccattaggtggataacatttgacgtgctcctggtttgttcatttccgggcatcatcaaaatgtcaggaccgctgaattcaaacattagtgggggcccctcgaaccttagagattccacaggaaggccatttacatcatcgttttctggtcaatctggatcacttccaggttttcatcactcaggttcacacaacattcatggaaatcttaatcttgcaaatatctctggatcattagcaccacgaaataattcaatggcaggcattccgtctgcaggggttcaacaacccagtggtggcatttccagtggccgtttccctccaaataatcttcaagcttccttgtctcagattcctcatgggcattctgggattagcaacagaggaggtatgaatgttgggggaaatcctggatttggtagtagcatgaatgctattggtggttcaatacaaggtttatcctcaaacttggctaatgtgggtaaccgcaattctgctcctgggttggcagcttctccagtcttaggaaatttaggcccaagaatagcaagttctgggaatattttgggtgggagcaatattgggagaagtataagctctggaggactgtctatgcctggtattgcatctcgcatgaatttaagtggcaactctggtagtggggctatcaacattcaaggatccaaccgtattggtatgcttcaacaagcatccccacaatttatgaacttgcttggaagttcttacccaacacctggagggtcactatctcagaatcaagtacagtcaggaagtggttctttaggatcttctggaatgctatatgaaggaagctcaggtgacaatgctccatttgatattaatgactttcctcagttaactggacgacctaattctgctggaggtggtcaaggacaatatggatcactgagaaagcatggagtaagcgtcaatgccattgtacaacaaaaccaggaattcagcattcagaatgaagattttccagctttaccaggaaataaaggtagttcctcagattatcctatggatattcatcacaaggaccaccttcaagagaatataaatattatgcaagcacaacattatcctatggctagaccatctggctttagcttgggaagcagttatccaccccgtcaacatcagcagagtgctaattcagttcaaaatgctgggctggaaactattggactaagaccggcaaattctccaagtctgtcaactaattcaggggtttatgagcaattcatgcagaagtaccatcaaccacagactcaaaattcacttaggttgcaggcagcttcaggtcctcaacagtacaaggatcagagccaaaaatccgttcagggaacacaggctgtgccggatccatatagcttacttggactgttgagtttaataagaatgaaagagcctggaccaacaactcttgctttagggattgatttgacctcgttggggttgaatttgaactcccaagataatctttacaagacatttggctctccgtggtcaagcgagccagctgtaggagaacctgattatcagatcccagcttgtttctctgcagagccaccaccagcactgcaattagcgttctttctggcattacat

SEQ ID NO: 33620 - DNA, 1223 bp, Zea Mays
ctgttccgcagaatccgagtccaatagctctcctccccagggctttcaacttctccaaaccccatctcgccgccgaggccgagcgagcagagcagaacaccacgtcggcggcttttccctgtctctccgctggatactacacccgccgccgcagcgccgatcctgtccgagtcaagcggagcgggggatcggattggttgcttccttccctccatctcatgttggtgcatcaacaaaatcttgaggagcaggagccattgtcttcaatttttgatggatcatctccagcctctgcaattgttgcagtagacacaaatctggatacttccacacctgacacatatcgagcgccgcctgcacccttgccttatgatgttattttggcagtcccaaataaccctggtttggagaagccagacactaagagcaaaactgatgaccaacaagagtccataaatgatcaggagtctttaaaggtggatgagtcatgtaagaaaagtgtcactgaagataaggctgatgaggaggatgtttgccctatctgccttgaagaatatgatgaagaaaatccccgttctataactaaatgcgagcatcatttccatctttgctgcattctcgaatggatggagcgaaaagatacttgcccagtttgtgaccagattactttggtggatgagatgttcgaataggtttggtaaccttggtggatcatcactcgaagctgttcgttactgagaaagtgcagcaactaatttacttttgatattgatccattccgggtggctcgcatggtaatgaattgagggggcaaaaattgaaaggatgaatgtcatgaaatgtatttacaacgcctcctttgtcatgcgttgtgtcatgctatatatatgccggcttgcgggttcattcagttcaaagtccaggactatccttttgcttttctgaattcagagtttcagacatctgctggttcttccaggttccggtcagctgtgtatatcatatattaggtggttgcaggtaaaaatggtctagagggtgggggttgctttgtacaatccacatggtatttaagcttcatgtatataatcttttctgtttctcttcgttttgttctgctgaatacttgcagatccttactgttctgataaaacttactgactcccaaatctgtgccagacaaaacgtgtttcaggaacataatacatctgatagcacttgtt

SEQ ID NO: 33621 - DNA, 466 bp, Zea Mays
atgagcctacgcctggaaattactatttcgaggagaggtacgatttagtcaggttcataaagacggtccagaaggctggcctgtttgtacatatctgcatcggtcctacatttgtggcgagtggaacttcgggtatgggtatttctccatttcctgaaatcacctccgttaaaaatggagcattaccgtgtctccagtttggtttaagtatgtaccgggcatcagcttcaggacagacaactaacctttcaagacggccatgcagggagaaaattgtgggaatgatgaagagcgaaaacctctttgcatcccaaggtggcccaattatcctctctcaggcaagtataatctttttccttaggtttggtacaaaggaaatagctcccagcagcatgagcgtactattagaaaaaataaacaattcactaagagtaatatcgataactgcacttagcgtttaatgggt

SEQ ID NO: 33622 - DNA, 4587 bp, Zea Mays
gtgcggccggggcaggctcgtgccggccggaagcggctcaaaacagcagcactgcactgcagcaggccggcgtccgaatccatcgtcatcaattcggcatttcttcccccgtacagcctaccaaccaactactacagcacagcacggagagagtcttgacctcggagcgagcgagagcgagagagagagctccacctcctgctcgtagctcctgctacgcggctgtatttatagcgagcgtcctggcctctcttctccctgctcgctcctagctggggtggggagggaagaagaggacaagcagcacgccaacgcgggagcataccgacagctccagggaacgattgaaggagtaggagaaagagaaagaacaagcgtgggatacagacaacgagaagaccgacgagccgcgacaccgccactgccaccccgctccgaagtcctagctcgtgctacaaaggaataaaccaaggccggcccatgtcttcatctagcggctgtaaccgcgggcgagcagtcctcccagtcactgcctccctcgttcccttcctgctcctcctcgtcgtcgtctcgtgccaggccgccctggtggtctccgcgacgcacacgcacgggcacggcggcgggaagcatgccggcgccgcgcgggcggccttccgtgccggggacgagcaggaggcgtacgcgaggatcatggcgcgcatggccaggatggacaaggactccaacatgacgatacaggttccttcccttcccatctcgtactcgtacatccattccctgcctgctgttccttggcccagctgtgcgcgcgcgctgccggttccggcttccggccaagcaagcctgcaaatccaccacctcgctgtcgtttacgtactctagctcgttcgtcgtgtctcgtgcgtgtgcgtgcgcgtgtgcagagccccgacggcgacgtcatccactgcgtgccggcgcacctgcagccggcgttcgaccaccccaggctgagagggcaggagcccgaggacgagcccgtggagaggcccatgtccaagggcggcgccgccgaggaggaggccggcgtgttcccgcaggcgtggagcgacggcggcagcaagcggtgcccggcggggacggtgccgatacggcggacggcggcgcgcgacgtgctgcgggccagctccgcgcgccggttcgggatgaaggcccgcggcggcggcagcagcagcagcaacgcccgccgcgactccaccagcagcggccatgaggtcagtgagtcactctgtctcatcagtcatcgccttcgccttcgcctcgccgcgacgtgcccgcccgccattagcgtcgcgactcgcgagacccacacccaccacgccctgaaaagacacgcacggccagtaatcaagtcctggtggtgctgtaacattaaagctggattagttgggggggaaaacactggtgttagtgggagtaactgccgcgattcattacgcaaccaaatggcgcagccgtgcatgcctgcctgcctcaggttttgtcgaccgcgctcctgctctgctccagcagccacaccacacccacaggccacagtgcagttaggctggcgcacagtacattactggcgcatgcagtgtgcggtgcggccatggccgtaggcccgtagctatagcagcgtggagcaacgtcctactctctctctatatatatacacctcgatctatcgatcggctctgaaactctgatggcttgcatttgcatggtgggcgcggcataacggcggcggcggcggcgcttgcagcacgcggtggggtacgtgacgggggaccagttctacggcgccaaggccagcctgaacgtgtggccggccaaggtggcgtcggcggcggagttcagcctgtcccagatctgggtcatctccggctccttcggcaacgacctcaacaccatcgaggccggatggcaggtgcgtacgttacgttacgtgcttgctgcaatcaaaaccgccctgcttattgctgccgtacgtacgtgcatgtgtactcgccctcacttaaacaacctccttccttccttccaagtacatacagagatgcgccctagctagctacctaccaggaaatccttgcatatgtataattgcacacataaatgacgcaccgtatgtgccgccgtgtttcgttagtctatctacagcagcttgctcatctccatgcttatatatttaaatttcactacgcaaacagtacacactatgatacaaaataatactccccccgtttcgttttagttgtcgctggatagtgtaaaattgaactatccagcgacaactaaaaaggaacggagggagtagtattttggatgatcagctgctacagaaactagacgggcgccattgcccattgctgcgtccggattgtcttctagcttccagcgcgggagagatcgagctagtagctataagtaaaggccttgcttgcttgttcggatcctgcagcagtggcagtggtctcgcgccagtcctcgaacagaaaaaaggccctccatcctgcgcctgtgtctttgcgagtaatgggaacctgactcgcagtatagctcttcagttcaggctgcccggccggttggtgacgccagtaaatgtgggtgcctctgcctcctagctgctggccaggcagatgtgcgcgtgaatgaactctggaggtcctcctcctctttgcttgcgtgcttggcttgctttccaccgacacttctggtgttcctatagcatattgtatctatatatcgctgagccagagcatttgaaagaactgaactgaactgaaggacacaccatatatacatcagtggttttcgtagttaactgctggtaagtggtaaccgctttcttctacctctatatgatggagaccttgcttctagttaccaccaatagcagtatagtgtatgcgtttattgaactgaaaggttattacctcgatctatatgatggaatggtagctggatcccgcttcctctgcagcatgcatatgcatgtatgtggctctatgtttgacttgggcagtacattaaggtggtgcagaactggcgctcattaattagattccgtgtcgtcactgtgtgtgatctcgatcggagatagatgtgtgcccattgacctgcgacgatgctgctggcggttccagttccagtcgaggagtcaatcacagattctgctggagactgcactgcagtgctaacttccctgccttgctgcattgttttactcaggtgagccctgagctgtatggcgacagcagcccgaggttcttcacgtattggacgaccgatgcgtaccaggagactgggtgctacaacctgcactgctccggcttcgtccagacgaacagccggatcgccattggagccgccatctcgcctacctcggtctacaacggccggcagttcgacatcagcctgctcatatggaaggacccgcaccgggggaactggtggctgcagctggggtcgggcccgctggtggggtactggccgtcgctcctgttcacgcacctgggcgcccacgccgacatggtgcagttcggcggcgaggtggtgaactcgcgcccggcgggggcgcacacgcccacgcagatggggagcggccacttcccccgcgagggatccaaccgcgcagcctacttccgcaacctgcaggtcgtcgacgccgacaacagcctcgtcgccgccgccgcgctccgcctcgtcgccgaccgcccgggctgctacgacatccagggcggctacaacaccgcctgggggaactacttctactacggagggcccggcaggaacgtgcactgcccgtgatctgtctctgtctctgttggtagccgacgcccgacgacgtacgaccatgaatatacgtgcacagatagacatacagagagtgaagaagaacgtacggatcaccgaccctgccggagttgcatcgtcgtcgctcatcaaccggccggacatggatcgtataatagcaacactgctagtcatatataagctacatctagtccctcgtttagttactgcatgcatgctaatgagtttttaagcagcccgactgcgtatacgcggccgggacggtagcagagaggcaaaaggtttcgaactttcgatatttgatgtatgtgggcttctttcgtttgcattggtctgattgttttttttgtcttgggttatgtatatacatgaagaaatccacatatagtattttcttcatcaccatgtgttgtatagtactccccatcagcgtttactttctcgccgcaagatatcagcgagtttcgcctctctttttttttccgttttccccactgactgaaaacggatatggcccagttttaactagatttcgattcaaaatataaaaaaatacaaaagtcaaattttggtcaacaaaacgaaattcggatcacccaaaacgaaattgtgaaccctgctccccatgcatccattgtgttttttccttctaatttctaactactactacaacaacaaaaaacagtaaacctcctgatgttgagcttgtgatctaaattctgaataaggcggttaaattggctagcaaag

SEQ ID NO: 33623 - DNA, 1473 bp, Zea Mays
gaccagaacactcccctttcccctcctctcctagggtttcacagtgacgcttcctcaccaccgccgtcgcagagatgcagtccctcgtgcccttcagtacggcttcgtccgcaaggcctatggcgtccggaccggcgagacgctgtgcccggggatctcgtgcgaggagagcgccatccacaagcctacgaagcagcctcgctccacctgccgccgttgactggtccaccccttctgtaatccttactgtttcacgctcgctccgcaggctcgctccacccaccaccggtggtcgggggtgatttattcattggagtttactgcatttaggttgctcaagattcagttttgcttagaccatcagataaactctactagcacatactctgacttcagattggacatgagagagagactgcaaatttgtctgatgcaaaaaaatcatcgataagtcaaaccttcagataaagtcagtcatggcattggatcatctaaaaattatatttatgttcaagctaagaaggaggctcatgtcaaagaggtacgtacattctattccttttcgacaaaagttgttgtaggtatgttcttctatttattaaaaagaaaattatatttttcatttgctatattagtcttagcctaacctctagcaacttgttcatttgctaatacaggagggacaatctaaaagtattgtgcaagatatagagcatgcactcatcatatctaagtgatcggagtgatattgattagcttattagatggatattggcccagtttatctttcatttttttctatagctgttagaattttactttgctcagttcatactataaataatatgagactcttgttttgtggtccaagtgtttagcgcttagggtgccttggaagtacgctagcttgttgtcatgaagaagtcattcaagttccttccagcacttcctatatttcttgacataatgtttcatcatgttcttggtgtaatattgtcattgtcatttgttcttgtctttggagagggatcatgtctgggctcacactggggctcatgtcgctcggcctcgtcgagctggtgatcctccaatgtagcgacataggcatctcaagagaccattaatattatgaagaggtcgatggaagaaaataacaacctccaactattaaacttcaatcgagaacaagtgcctccagcttatgtctgcttgaccactatatgatctacaaccttatggctactatagaagatagttatagtagctctgaatgtgaagttatacgatcattttcaattatccttaatatttatcactttgagtttaagttataagattggctttggattttaagttaaaggatttgaagatatatgtattgaagttatatgcttctttaatgaatgaaatatttgtgttcaacagattcatacaatattattgttggtgtaacattccatgatgatatgaatt

SEQ ID NO: 33624 - DNA, 1116 bp, Zea Mays
caaatataaacaaaccatggggggcaagaagatccccagcaccacatcgtgttcaccactaccctccactgattctgatcaccggggcatcagtgacgggcacgtcttgctcctgccatacccgggagcgcaagggcacaccaacccgctgctccagtttggccgccgcctcgcctaccacggcctccaccccacgctcgtcactacgcgcaattcgaggggctggaggacgccgacgacgtgctcgtcaactcattccacgatattgaacccaaggaggcagattatatggcactaacatggcgtgcaaagacaataggcccaaccttgccatcattttatcttgatgatgaccgttttccgttgaacaagacctatggtttcaacctcttcaacagcagcgagccatgtctggcttggcttgacaaacagcttccgcgttctgttattcttgtatcctacggtactgtctctaattacgatgaagcacagttagaagagcttggcaatggattgtacaattctggcaaaccattcatttgggttgtgaggtcaaatgaagaacacaagttgtccgatgaacttcgtgacaagtgcaaggaacgtggccttattgtttcttggtgcccccagcttgaagttctagcacataaagctacaggttgtttcttcacacattgcggatggaactcgacattggaagcaattgttaatggtgtgccaatggtggcaataccacactgggcagaccagccgaccatatcaaaatatatggagagcatgtggggcttgggtgtccgggtgcgcaaggatgagaaaggcttggtgacgagggacgaggtggaaaggtgcatcaaggatgtcatggatggtgatagtaaggataagtataggaagagtgccactatgtggatgcaaaaggccaaggcagctatgcagaatggagggagctcggacaagaatattacagaattcgccgcgaagtactcatcaggtcaaaaaaatatagtggcatagaattagtaggtgagcaatttgtagtcaatatttgttggaggtatcttctgaaatgtggagcgagccaaaagaaaatttatgacggaaccgtccaattta

SEQ ID NO: 33625 - DNA, 2522 bp, Zea Mays
ccatcagatcacaaccgatctgttggggattactctgctaaacagataaggtgtctttcgctgcctaaactaatgaataagctcatcagaaattctaagcgctgccagtataggaaactatttctgaagcattgtcctgtcaattccaagtgtgcagctgatgttgccaagaaccataataacaaggcacactttttaattggaggaaaatcggcatactatgatcagtcttatgttcaattggaggcttacagtacacatcaacaagtagtttcattcatctgggcagtgttgacacgaattatacctgagccgttgcttggaaactctagcagcaagagatctttaaggataaacatttggaaatttataaagttgcgtaggtttgaatcattttgcttgagcgattgtattggtgagctgaaagtatcacattattcttggttatcaaatattggattttctgattgcttttgctctgctctaatggagaaagaaatttggtcatcaaatggttccgaggaggagaaacttcaaaatcttctgcgttgttggattagttggatgttttctgatatagtgataccattagtccagtcatatttttatgttacagaaagggaatctaggcgatatgatgttttatattatccaaagacagtttggagaaacttgactagtacagctattgcttccctaaacagacaaaacttcaggattttgcgtggtacatccaggaaagaagcaatccagtcatgctatttttcaacagtgaggttcattccaaaagcaaaagatatgagaccattagtaaatctcagagctcaatcaaaaaatgccctcctcaataattgtcacctgattataaacaaagtaaaggatgagaatccagacaagtttggttcttctgtttttgattacaataatgtgcatcaaaatatctggcattttatttcttcagtaagaagtcacctgaaggaaaaaataaagatatatatagttgttgccgatgtatcgaaggcattcgattgcattactcatgatatgttactgaaagttgtggatgatgcattgaaatgtgatgactatgttctgaggaaatgcaaaaaagtagtttgcaactggtctaagaatgccatctaccgtttcgattcaaatgtttctatcagcaacggtgataatgtatgtgattttttgattcagttatcatcaaggggtggcattttagtcgaccagggaaaaagttgcaagatacggaagaaagagattcaatgtttcctttccaagcaagtgaagtgcaacattttgaagattgggcaaaacttctactcacaacgagtaggcatcattcaaggaaacaagttatctcccaacctttgttccctgtactttggtcaccttgaaaattctgagctattgaaatctcttcatgataacaagattgattcagaaaaggatgttttaacacctagaagtttattaatgaggttcattgacgatttcatattcatatctttctccaaggagcaagctctaaatttcttcaataggatgagaagagggtttgtcaactacaactgctacatgaatgacagcaaatatggtttcaacttcgaggttgcaaacagtgaacattgtagtaataggatctacaagggtgatgatggattctctttcataccatggagtggcttgcttataaattgtgaaactttggaaattcaagctgattatacaaggtatctggacatccatatttcctccaccatcactgctaagatgcattcttcagcgaagtaccttgagagcaagctgtgtcattacatgcgtccgaagtgtcatcccattttctttgattctgtgatcaactcaccaggcacagtaagactgaacatatatcaaaatttcctcttatgcgcaatgaagtttcactgttatttccggagcatgcctgatcccggtatcatgaaaccggagctactgcatataattaagagaacgttcagatatatgcatagcctcgtcgccaaacggatgcacgaagcggaactgcaatacgacgtgcgcccagttctgaagcttaggcgaaaggaaaccatgtggcttggcctgtcagcgtaccttcgagtgcttcagaaaaagcaatcacgttacagtgaattgttggcgtcgctgagagaagaaattgggagatgtggtcatctggaccgtcacaacgatgctttgcgctacgctgtagatgactctcactcgtcagtgttctggaagtttaagttctagaaggaaactgggagagtagaagattgctggagctagtgtcttttgtgaacaggaacctttggtgtccaagtgacagacgagtggggtcaaacatggtcgagacttttgttttgatatatactcccgccatttcgtaatgggcattcatggccttggatctatccgtttcacaatgctagcttctacatacagatgggcacactaatatgcgtcctgctgtacctcacacgatatagcttcta

SEQ ID NO: 33626 - DNA, 477 bp, Zea Mays
caccgctccaacgcagtcatcgttgttttctcgaatctggccatcctcatctacctcgcagcgtcggtgccctatcttctgttccttctctttcccgtgctcggcgcgcaggcggcggccccatctttcgcttcctcccttcctccaccaccactcaccccttgatccgttccggcctcctaaatccggcgatgccaagcaaccccactcatgtcgttctcaaaaccctacctgactaatccatctaattacaaggttgtcggctttgcgttgggagcaccgggtcaggggacgggcaaaggatcagatcgacagccgcacgagcattgagcaatatggctgctatgtaggatgcaactggacatcaccgtccgcccgtctagctgttgctgcggaagtcccgatgcttcatgccaccgtgatggtggctggttgatctctgtcagtttctactactactttaatgatgggtaagag

SEQ ID NO: 33627 - DNA, 345 bp, Zea Mays
cggcaccggcaccgggctggttcgtccttgtccggtaaccagacggcgctgctgatgtggtcccgcggaaggcggaagaatattatctcgtgcgatgcgatgtggtggcgcggaggcggagcggagatctgcacgcgagccgcggggcggcaatgccatgttggcatggcgcgccgcgcgagaaaataatgcggccggacagcctggtgcggacagccgggccggaagggcgggcggatccgcaggccgcagcgcaggtgcgtgcgtgccagcccacgcagctcagatgccagcacacacgaggaagcgggagcttttttttaacgctatactattatatgtcca

SEQ ID NO: 33628 - DNA, 4512 bp, Zea Mays
aaatcccggccagtttctagcagcagtgttttccctccctcccaaattcccactctctctcctcctctctccctccatttttcgagacaatccaatcacccagcgccagcgatcccaaacaaaccctagccaccaatctccgctccggcctgcgccctcgccatgcccccgcacggccccgaagaagacgccgccgacgcgcacctcttcgctggcgtccgcttcgcgctccacggcttcgaccagatctccgcgtcccagtttcggttggagatagagcggtgcggcggcgtccacgcgggaggttgggacgcagactgcacccacgttatagtttccaacaccttatatgatgatccagtgtgtgtggcggcgaggaaggccgggaagaaggtcgtcgttgatcagtgggtggaagacagctttgatctcggagaattggcagatgcagatcgggtgctatatgctccagtcagagattttaaaggcattccaggttgcgataaacttcacatttgtttgacagggtaccagaagaattggcgcgacgacataatgaaaatggtttctttgatgggagcaaacttctccaagtctctggcagcaaacataattacccatctcatttgctacaaatttgaagcttaaaggcttgggaaatccttccggtcgaccattatacgaaaagtggttgggaagtagagataatgggagctcaagctaaggactctgaagatgaaacagaatatgctggtacatgctcattaagtagcagacgtattgacagaaggacccctattagagagatcagcacaaaatctcatgttgactctgctctacatgcacccagtggaggtcctactgtctctgctagcaatgtagtgggtgctactggaaaacacttgagcactccagagcagtttatgaaagcacacgatgcgagcacaaaatcatctgacattagaactgactcaggaactgcccctgacacaaagtgtgctgcaatgtctgttgataatgatactcttaaacctacccgctctcacatttaccacaatgagaatgatgaggttcctgcagataaggccagtagggatgaagctaaagatgatcacagaagggaacttgacaccagggatagtacccttcgtactcccagtgtacataaaagcattgcacccactattccaggagacaatatagagaacactaacaggaattgtttccatggtttcagtcagatcaatgtcaacagtgatcttcagttaaactcttctgaagaaaatttctccaagaaaatattacactcaacaaacttgagcagaaaggtagaccagaaggatgacgggcatgtacctgatcccaaacccaacatttctcagtcatcagttgaagaaaacctaaacatgtgtgagtttaatccaagatcagaaggcaattcagcatcaagaaatgatcaacccttaggctattcaagaaggcgatcttcaaagtcaggatcacttaatgttcataggaagaaaagcattctttcttcagtcagttcaaaggcaccaaatgaagccccagactcgggaagtggaatatcaagcgcaactgcttctgatgtgggtagaagccccaccgaacctaccaaagttgatggtcatgtaaacagtggtccaactatgaattcaacagagaaccagatgtccggttgtaaaagcaacctgttaagttataggagaacatctttgaagcttgtaagctctgctgaagtagaaaagcttcctgaaaattctgttaatgataagaacatggtggagccagatgtagtaaagacaccagcactgcacgaggcaacaactgaggagccttccccttccgtctgttctgaagttagaaaagaaagtttaggtgttcatcagaatagggacgctgaaatgactgatgctcagctgctaagcaaaactgaagatgcagctccttgctcaaaacctgataaagtggtttcttgtcagaactcgggactagaaggttgtaaagatgtcccagttaacaagatcactgatgaacatggaatatttccctcgaaaatatcaacttctagagtgaagaaggttggtgccaagcggtctcgcaatgccggcagtaaagctgctagtgaatttacaaatagtagaagtgaggttgcagctttgaagcctaagcatgataaagttgcttctcatgaaaacgtggaggcacaacagggagaaggatgttgtagtccaaatgctgctgaatgtacaccaccatctcctgcagaagccctgaacaacaaatcaacgaatgaagttctaaccagctcccagggccccaatcataagacaaacgaatcactagtggcttccaaggcggagtctgttaatatgactctgcaaagaaacaagaaggggaaccgcagaaagcttccaaacacttcaaatgcagatgaaaatcaaagaagttcatctcggacagtaccaaattccaaatcaggtaatttggttgcaaaggggtctcggactgctgatttcaatatatctgactcaccaactgtcgatgaaactgagacagtgccatcaaattcgagttttaatgaggcagttcctccaggaaatggtgaagaaaaacataaaaggctttcaagcagtgcaaacgcagatgaccctgaagcatgtacagcaaataaagtaccaaacaatagagtccgtaaggtcgtagccaagaggaagctatctgatgtccaaagccacaaatctggtagtgagccttgcaagactgcgaaggtattggtatctgaagttaaagttgtgtcaccagccagagttgcgcagagttctagaaatgctaacaaggtaacagtggttcaagacctgcagaacaccaatactggtaggacgaacgatacagttggatcattttgcaaagatgtcacggaagactgctcaaaagacatgcagagctctaaaactagaagcagcaggagacaaaagattgcagatctagtggatggttcaacggaccatgacaaggagaacatactagtcgatagtaattttacttccaatacaaaacgtggaaataacagcatgagttccaaatccaacacaaagacattacaaagtagcaaagctgtgcttgatgagagtagtgtgatcaaaaggaatggttatggaaccttggatgtgccagaaccaacatggtttattctaagtggacatcgcctgctgagaaaagagtatagggctatacttagacgtttgagaggtagagtttgcagggattcacatcactggtctttccaagcaacacaccttgtcaccactgagatgcgcagaactgaaaaattcttcgcagctgctgcggctggcaggtggatactgaagcctgattacttgactgctagcaatgaggctggcaagttcttagaggaagagccatttgagtggcacggtgaaggccttaatatcggtgatacgatcagcttggatgctccaaggaagtggcgccagctgcggcagcgtactggctatggcgctttctatgggatgcaggtcatcatatatggggaatgcattgctccaacactggacacgttaaaacgcgcgatcaggtgtggtgatggcaccatcttagcaacctccccaccttacacccggttctttaagtccagtgttgacttcgctgttgtatccgcgggcatgccaagcgcggacgcgtgggtgcaggaattcatgcggcatagcatcccctgcatcagcgcagattacctggtggagtacgtgtgcaagcccgggcaccccttgggcaagcacgtcctcttcaacatgcacgatctggccgagaggtccctgcagaagctcatgaagaaccaagaagatgctcccgggagctgttccgcttgtgggtcagacaaccgggaagtgccgatgctggtgtgcggcggcgacgggaggagccagtcttccggctgtggggtccggacgcatgccgattgctgcaaccctcccgtggaaggctgcgatggtggcgagtggctgtgcggtaggtgcgaccagcagaaatctgcaaagaaggctaagaagaccgctgcgaaaccgagggtgctgaaacagagatgattctggtttggcccgtacaagcgatgcaaaaggtcgtctcccaaggtaacgacgaatgatggcagcgggggtgctcttgctctctacaagttgatgacaactagctcgttgcctttggaaagcacccgtgcatgtgatctgatgaatgaaaacaaagtgatgggtgtaaacgtataaggactttagactggtgccaataaatattacgtatttatgtaaatgcacggatctgatggaatgctgtgatcaacttgaacatatatggtgcccatcaatctgggcattgggcgctgtcgaatgtccggtaaagcgcgctatttccggatcgtccttcatggttgtgtgcgtccgagtaaaggcaatggccgtgcaaaagtttcttcgacgg

SEQ ID NO: 33629 - DNA, 2067 bp, Zea Mays
cccagcctcgccccctctccgcagagcgcatccatctccctacctcgagcccaaatcgatgtccagacgccaacccgtccccgccgccgctgcgaagctggaggaaggggagcatgagctgagcatcgtcgacgcgctcctcgaggtgttgtcgggccgctgcgagctgcgacggacctccttcggctctcggcgcctgtaccggcgctttagcttcacctccatgggggcgccgccacagggaagacgcgttgtgaatatggtggaatttcttgattaatgtcttggcgtggggattcagttgcctgggtaccagatatagcgatgagcgaaatttaaggtgtgaatcccaggtagcagattcacaggaaacttttggggccttgatattgattccctaatgtttgttgggattgctttcatcggttttttctttgttggatcggtcactaccttggcgtatttaggccccagagaattgatttttcaggttatatctgatttgactcaaggtagggtatgtgtccacttctttttcccctgaactaaaattcatgtttacatttaggttttagttacaaataatgatggatatttgttgctcggaatttctataaaagaattagaaacagtgcatgtttttttatctagatcacatacatgcttacagcttatatacccattgtttgcattgtaaaacaagaatatgtaagccatatagactcgtgatgagattcactcgctattgtctgttcttcagatttcttcatggcttttcagtcctagacacagcaacccctatacttttcttgaactaagtttggaaggtattctacaaaagtagtaagaggattaggttccttaataccttcagattcatgcaccgcactcatatttcatgttcgaaagtggaaactgctcctttggctggtcttgtaacatattctgacaaagaaatgttcctacattgtatgaggttatatatgctaggctgctagcaacctttatgttaaccctttcatacttctgttatagtattcattaggacaacagtcactcaaaatcattacttcattttcatttatcatttgttactctgatctcatatgggctaccttttttggaaataatgctggtgagtttcaaacctcattggaatctattcagaattcactagcagatgggttgctaaaactgacagaacaagtaacttctgacaatcggagtattgcatctttatctatatgtatgcacatttggttgaaattctatgcagtgtcaacagaagtatcgccttgcaaagtatataccagactctcatgctaaaggttttaaggacgacaagaaagtttgagtgattccctctcgaacatggattatgtaccatattctgaaatgtgtttagaggattgcaaatcaatgaggcactaaagatgcaactggaagttcagaagcggctacacgagcaactggaggtatttgaaggtgtttgagataaataatgatgctaaaatgaaaaggacaatgcgacgtcccctaccatctggtcgtgttagttctacacatgctgccatgtgggctacaagtgcaggaattgcaggaacaactttgctggcctctcgaaggttagcgctatgtcgtggtgctccactttaaagatgtgcatgccacgtctacacttcccgtctctgattatagattaggtctttactccctgatgtttagccagtgcgtgctgttacccactaggtctagccgtagtcagtgactgcacaaccacaacccgctcttgtgtattttgcgtttgcggatcgcatcgcatgttattttggtccttctatattcatgctacaaggctgcaaactgtggtgctcatacatttatgtaaccagtaacctataacgactttgatgtatattatattttgtaacagtgaacttgactatcgtagatatgtagcttgctggaacgattttttagtgtacgactgtgctacaatgactgtagcgcccggtagggcgctgccctattctagtagaaataaaggaggaagtcccttgatatata

SEQ ID NO: 33630 - DNA, 421 bp, Zea Mays
gctgtgtagtttagccttaactgaaaggattcgtctgctattatgtttgcatcgagctagacatggtttggcactgcgcatcatataacatgcctacaatgcgagcagaggtacctgctcccacaatggggagaatctgtcatgagctcatggcgcatggatttgtcatgaggcgagcacgcggcacggctgctgccccggctccaactcactactcacaagcgcgaggagaaaaacgagtgtatctgtccttttctattcttttcatattatttgaaattggcttcccacagcggttgatgttctatgctaccaaacaccaacaattgtccttccgtaccagttgaactcgctgttgatgtccgaaggcagtaatttgttgcatcgacatatatacaccttacttctctcttaggtccgg

SEQ ID NO: 33631 - DNA, 1966 bp, Zea Mays
ttccacgacttccatccattccaaaggaccaaaacagcggctcggccgttggcaaggtagccaaaccacggtaggcgcctaggcggccacggcgcggcgcacgcgaccacagggcacgagcccaagcgccgtgcggcgtgtccaaagaccaaaggctaggaaacacaaacacccacgccacgcggacccgggcacccgtccggcgggcccctcgctccgccctcatcctggggaccggacgacgccgtcgtcgtcgcccgtcgacccttttcccgcacaacagccgcgccgctctcccgttccacacgaccacatacggtagctagcctagcttcttcgtcacagctcaccacggcgcagcaaccgcagcccacgaaggcgacgaaaagctgccgaaccaccagcagaggagagcgagggaccgcgcaaccgagccactccctagtccctccttctccctctctctctctctcttcgcctccggatctcgcatgcgcggtggccaccgccgcgcccgacggtggagggtgaggagttagcgaggggccctgaccctgagtgctggacggcggcgtgatggggggagcgcagctggtggggagatgggtggagtcgtacacggggatgtcgacggacaacatcaagggcctgctgctcgcgctctcctccagcctcttcatcggtgccagcttcatcgtgaagaagaaggggctcaagaaggccggcgcgtccggcgtccgagcaggcgttggtggctactcatacttgcttgagccactgtggtgggcaggaatggtaacaatgattgttggcgaaatcgctaactttgcagcttatgcatttgctcctgctatcttagtcactccacttggtgcacttagcataattatcagagcgtcaaattgagtctgtggcagaagtgtgggatcttgcgaccgaaccagcattcctgtgctatgcagctgttgtgcttgcagcagcttttgtgctcatattccattttgtccctgagtatggtcagacacatatcatggtatatgttggcatatgttctcttgtgggatctttatcggtcatgagtgtcaaagctcttgggatagccttgaagctgacattttctgggatgaaccagctagtctatccacaaacatgggtgttctcatccgttgtaaccttatgcattgtaacacagatgaactatctgaacaaggccctcgacacattcaacactgcagttgtttcacccatatattacacaatgtttacatccttgaccatcttggctagtgtaataatgttcaaggattgggatcgtcaaaatccaacacaaattgtaacggagatgtgcggcttcgtcacaatcctttctggaacttttcttcttcacaagacaaaggatatggtggatggtctcccaccaaatttaccgattcggcttcctaaacatgcggatgaggacggctacgctgctgaaggaattcctctcagatccgctgctgacggtattccgctcaggtcaccaagggctacagattcatttcgctcgtcatgatgccccgctgagatttgcatgcgcactcaaatcgtgtcacttgaaggctcatacccagcaggcgtcagtcctatatatacatgggaagggaatgataatcctccattcactcggttcgatacacaacgtaggttttagctgtaggattcaaaaggtaacagctcggctgcccccttgtaaattctgaggcattggtacagaattttgaggattatatcagttatactcgtccgggtaagatcaccaggatgaccaagagcccaagtttttgggttgtatacttgtatgtatattgcggtgagccatataggtcactatcttgaattgctgtattttttcaacacaactctcagagtacaggatgttgaacaagcacatcatgccactaaaccatttaccagttttgtctgagca

SEQ ID NO: 33632 - DNA, 1414 bp, Zea Mays
agtttttagtttttttctacacttggtatcttggtgttggaagggcgggcctggtgcagcggtagagcctaccgtctgtaaccggaaggtcccgggttcgagctctagcttctgcatattatgcggggatactgcaagacatgtagaacagctagtagtttttggaggatttacagacacccaatttttggaaaagagtttggtaaatcaattcaatgaattggaagatagcttgaaggaggctttcttgatgccatttactgctatctcttcgcagatacaatgtcaaggattgcttcctttatatcctgttacatcatcagctaccttgtcatcatcctgctcgccaacatcaatatcattttataaggatgaagattcatcgcatgaggaatcctcctatagcttgactgactatgtatgcttgaagatacctgatggatcattaaataaagtaaattgcatcggtgtgataaagggctctggtaactgttgtactaccctcagcatgatgtcactttcaggttttctgttgcatatacctgacggatatgagtgtgttgacctgtcactttataaggacaaccaggtagttttactactgagtgaaacgtcttgttctgatagccctggaaaatcttggatggtgatgctgcaaatagagaacttttcctttatgccactctcaggaacattccctgcaaatatttacagtttgcaaaaactggtggcactcgatctgcaattggacacagattatgggaaagttcgtagcatacctcacaccgtatctactccatttgcagttagtgcatcgagaggagtagcctgtgtcttttcatcccggaggcatgccttggtttatatccttgatgaggatgaggaagcggagggggatgaaacttccgatatggagtgattattatccgattccttcaccttcggctcagccatttcagcttcaggcttcagcattgtcttatgtcttgttgcaatggaggcagaggcccggagatatcaatatgtacggaaacgtcgtctcattttcacggcaatgcatgcccgggttcagaagctacgtcgcgtggttggacttcatcgtggttatttggaaagcgagcaaaattgtacacccatttctgatcgtgttgtgttatacgagtgcttgctagttgtgtaaaaaatctagaggtaacgtcaacgtgcaaaaaaaaagggtctgtcgcaaatcttgacggtcactagagctatcgcatttctaatcgtgtttgtgttatgtggattcattattttattgttcgagctgctaatgtacttggtaaaatacattgttgactgaactcgtgttgcgccttcaactcatgtttcctttcatcaaaccataggcatatctaagaacaagaaaacatgcctc

SEQ ID NO: 33633 - DNA, 2973 bp, Zea Mays
ctccgctccgcctccccccccccaaaaggcagcagcaaaacccccattaaatccctctcctccccgatcgcaggccgatcgacggcggcgatggggcagagaatcgatatcaattggactgaggtgtttggcaagtcatcctcccccgaccgcgaggccgacgtctgcttcgcctccccctcgtcggcgtcggcagcaccgcggacgcgggcgcgggcgttgggcgccgcgaaggtgttaccgggcgacgagcggcggcgggggtccccagacagacaccaacggaagaggctcgggaagctgcgcatcgacgatgactggtccgtcggcgggcagcgccacaccgccgtgcatggggatgacggggcgcgccgaccacggacccgcggggccgccaaggtccagaagatgagcaggcggaacgtgtgggcaacagattctgttcgaggttaactcccattcaggaaaataaatactgccagttacctttgaataatctcaaaaggcaagggtgtgcggaaaaaaggaaacctatatcggtggacaagatgtactcagagtctgaccgaccaagttccacatcttcatctgcgaagaggactcatgccattgatccagaggtgtcagatcatgaaaaatgtcacaagactgaaagttcccatcccagtagattctctaagaggaggaaggaacaacttcagaattcatcttctgtgtaccctcgaaaggttcaagatgtggttctattggatgacgaagatatgcagcctgaggaagaagtaaactgtgacatgtctgacggacagaatggaccaaagatctactacccatcgagagataatcgggaatctgttgagctcagcagatctgatattaaatgtcttgatcctggagtatatttgtcatcaccagtgataaacttctacatccagtacattaaaaggaacagactgtctagtgaagattttagagacaaattttacatatttaacacatatttttatggaaagcttgaagaagcattgtgtcggcaggatgagttctcaaagttgagaagatggtggaaaggtgtcaatatattaaataaagcatacataatcttgccgatccatgggatggcgcactggagcttggtaatcatttgcattcctgcaaaagagagtatttcaggaccaatcatacttcatctggactccctagcgatgcatcccagtactaagatcttgaacacagttgagagataccttgaaaaagaatggtgccaattatcatcatgggaggattttaaaaataatatacataagcaaagcgttgaggttccacgacagaataatgagtatgactgtggcatcttcatgctttattatattgaacggtttataaaagaggctccagaaagattcacaattgataaacttgatatgtttaatcggagttggttcaaacctgaagaagcatctggtctaaggcggagaataagagagcttctgctggaagaatttgaaagtgccaagctggatgatgctttaccaggagcggatgcatctgagcgtgatgacagcataaatgatggagaattgaaaccagatgcatcttctgacagttcagaaatggtcgtagaggtggtaggagggttgggaggcactgacaagagcaatgaaggcatcaaggttgtagcatcagaagaggcaagtggagagtcaggagatgctggtaagagtaccgaaggtactgttgcagcatcagaagaaaagagtattgaaggcatcaatgttgcagaaccagaagatgcttgtgagagtataggaggcatctatgttgcagaatcagatgaagcaagtggggagtttggagagattggtaagaccaacaaaggcaccaaagttgcagtgtcagaaggagcaagtgtgtctggatacactgataagaatatggaagacatctctgactctgaggttgcagtattagacaaagctcccactagcagctacagacgtggagagaagaccacagcctgtgttctatcagaagcagcttcactttccgatagcgtcaaagatgaacaaggtatggtgaaaccagattctggcagctcaaaagctgagagagaaggagatttgattgtaattgcatcgccggaaagatcggaagggaatgatgagatcattggtagcatgccaattacagatgtagtttgtgacagctgcgacagcgacaccgagaccaaggtgaggatcgtaaaaattcacagaagaaaatttgtcccatcgtgtggttgcagcaattgacacaaggggccatgcaccgtgcaaaccttctggttgcgttctcacgaagatgcgaaattgtgacagattttggtaatgatattttgaggttcctgtggccgtataccaagcacatagatgaccaggccaggcggtgatctcagtaaaccgaataggtagcgggtcgatgcatggcctgcttccccctgatctcgggcactaggctcctggaaagcagttttgggtaggcagttcattggcttgggcccgggacttgtaaagtgtacaggcgattggacgttattacgtatgttatggtgtttacattagaagatctgtgactgtgaacacctgccacaatttgagataatatgcgcgtaaggtcttgcgttttcctttttgttctgccccagagctgccaaacatgcatccttgttcttctccagccttgatatgatggcatttcttttgaccttggagtagagttatcgtgtgaatgaaggaagctattacagtacagtgcaaatttgcaacggcatgatacatgtctagctctctagccttggtgttcgtggaagtgacatggatgacactggcatggcagcagcattcattcgtgtgagttcgcatgaacaacacattcttgttaggccccgtttggttaggggtaactaaagtttagtgactaaattttagtcacttttag

SEQ ID NO: 33634 - DNA, 2789 bp, Zea Mays
gtcgtctccccgttcgaggggatcaggggaattggacgggcttgcttcgactccacctcgcctccgtcggcgtctcatctcatgctgggactctggtggggtggggattgacttcgctatagcccaatccagtcagcagcagcttcccgccgccccatgcctcgtcgcggccggtggcgatgggcgacgtcccagtcccttctccagctccccctgtttccggcatcgatatgaccccacgccgccgccgtgagccctccgagccccgcagcgacagcgactgggacgctggatccagtcgcgagggctccccggacctcctccgccgcgcgcccgccgtccagatctcgcgcgcctcctcttcctcgtcctcctggctccgcgagatcgagcgcgaccgtgtgcgcctcgtcagggagtgggtccacatggctgcccgcgaccgtgacgacgacaccggacccccaccgtcccccgtccatgaacacgctcgcagggacgcccccaggatccgcggccgccaagcgcgcctcgagctcgtcatgcgcatggccgccgaccgccaagccgagctccaccgcctctcgcagcaccgcgccgtctctgactttccgcatcgcaacagaatccatgcgctgctccggggtcggtttctgcgcaacagcggtttaccagaggagaggaggcccccatctgtggccgcaagggagcttggccagctgcggcaaaggcatcctgtctctggtttgagagttccgcttcagattggagaatcttgtccgtggtcaagcagatagccaagtggatgcttcttcagttcacgatgttgagttatctacaaatgatcgttctgaattaaggcctcctgaaactactcaggagagacatgagcggacaagtgagattgtcagtcttcaacaaatcgacagtacggcaatgacatcaggatttgaaagtggcagccctaacattgctgaagtcttctgcgggtctcatagccaagcagaaagtcaggatgatttggaacatgagagaagagactggcaacgattttcccatgctgtgattggagaggaatctgaaagaacttggcgtgaaaatgcagacaacatgtcatctcatgaggggacagcagttgaagatgataataacgatcatcttccagaagcaaatgaagagtcaaccagtgttgatcaccttcctgaaggacttgaagggtctatcactgatggtagtcttcctgaagcgcaagaagatcagcatgacagtgatcatcttcctgcagtgcttgaagagctgcatggaaataatcactttcaggaatcacatggggaatggagaagagatgatcgtcctgttgaagtctatgatgagtggcagagtgatgatcatctccctgaagtaaatgaagagtggcataatgatgatgagtctaatgatactgcagacaattggcatgataataattctgaccaaccaattgatcatgatgctgctcttattagaagagctaatactttcatccctggagatgatgataatgtgtacagcacagaattgagggaacttctaagcagaaggagcgtttctaatcttcttcacagtgcttttcgtgaaaacttggatcgacttatccggtcatatgtggaacggcaaggtcgtggtcctctcccttgggatctggaaggaacaacccctgcccctccatcaccagttcaaattcaggaggagcaaagagatgatgaggaccaggaactgcagcgcactgtcaacaggcctcctttagtgataccacccccacctatgcctcctcgtcagccactttggcattcagagttgcatcgtactaattggatcagacaaaacattcatcgttcatcttctgatattgaatgggaggctatcaatgatttaagagctgatatggctagacttcagcaaggcatgagccatatgcaaaggatgttggaagcttgcatggatatgcagctagagttgcagcgttctgtaaggcaagaagtatcagcagccttgaatcgtttcattggggagcaaggtggtgaaagtaaagaaataatcgatgatggatcgaaatggataaatgtgagaaaagggacctgctgcatatgctgtgagactccgattgactcccttctgtacagatgtgggcacatgtgcacttgctcgaaatgcgcaaacgaattggttcgaggtggagggaaatgcccgttgtgccgcgcacccataatcgaggtcatccgagcatacttcatcatgtagatacaaaaggaagacagcaagaagatagaagaggcccaaattgtttttggtctgtgtggagtcgttagcgggttgtgtattcaattttgttcattctctctaatgcgtttggttaagtttttttccggcttcatttcgttttggtctgcttgccctattgtaagtaatgtacggttttgggtgtggcggcaggacgggaaggtggtcttctctcattaggacttgggtcactgctaattatgttccacaacgactaatggggttggaggttgtcgaaacacgagatgaggaaacttttggtatctttttgttcgtgtagcaccagcaaagtgcggcttggtcgcttcagtgtttcgtgtgattttgttgttggtcttggctatgtggtcatgatattttaggcttctagtttgcagatggatgtaaaagtggtactttgttgtcatgggcgatgctatttcctggatgtttgctttttctttccacaatagtaaaacagatcattttta

SEQ ID NO: 33635 - DNA, 2809 bp, Zea Mays
ccaacatgtgcgaaattaaaggaaatgatcgaaatcaattgcacacggcgccacaacgcaaaactttaatccgatcacaaaccaatctcgaactagactagaacgtgaaaccctaaaactaatgggtttactgctaattagggtgttatcatgtcgacgaacaatatcagacgtacacgtacacgtgtggtgcagagcgccgggcgcgtatggttcatgacgccgccgccgtgtccatcatggccttgaactcgtcgaagcagaccaccccgtcgccgtctatgtccaccaccgcgatcatctctgcgcaccgctcggccgtcatctcctccccgacgatccccagcctccacagagcgcggcgcagctcctccgcggtgatcacgccgtcgccgttctcgtcgtactcggcgaacgcagcgcgcaacgtgtctgaccggtcgccgtcctcaaacagcgcctcgagctcctcgaggctgatgaacccatctccatcgcggtccgcgacagctaccatctcgtctgcctccacggctgtgcacccgcacaactcgcgcatctcgtccgccgagatgcggccgtcgccgtccgcgtcgaagtggcggaacacgcggacgagggccggctccggtattgtgtacgtgggcgggggagtgctagccgcggctgggggaggcggacttgaggagcggcgtcggctgaagaagatatcgctgcaggacgcggtggcggagacgacgagacccattgccggccgggtgcgacagctttgaatttgattgacggccttgacagggttttgaccctgtttttatataggagtaggacccgccagatagatgaaactcctacgcggttagtttcggtcccatctggtcttatcgtatactggtgcggacctagttgccctctccgcatccaaccagctagcgcgtccgtccccatggcggccgccgccgcggggtttacgccggcgactgcaaggaaggccctcttcactactacagtcactctcctctcatcgtcactctcacgtagggccagcagcatccgcagccgcaacctctcctgctctgccgcgttcaccgccgccacgcgcctcgcgccgcagccgccggacctggtccggtgggtgcagcgcgagggcggattcgtccaccgtgccctccgcgtagcgaatcatccggaacacgggctcgggatctcagcctcttccgccgcggcctacggcgacatcccaattggggacgtcctcatcgcgctcccgagccagcttccattacgactacgccggcccaccagtgccgcggacgacgtgcttgtgcagctcgcccaacaagtcccggaagcttgcagcttcgactttcttccttgccgtccatatgtgctagacgaagcttctctccgcatttcttcggctattctgggcagcttcagctgaaggctagcttcgttcgccgttatctgtatacctgaaacacatttgttcacaccgaagtaaaagctttatgaggacctttggcagaatgaactatgggctatgaagctgggcttgaggttgcttcaagaaagggccaaatctgattcattttggtggccatatattgccaatttgccagagacatttactgttccaatcttctttcctggggaagacataaaaaatttgcagtatgcccctatcctccaccaggtcaataaaagatgtcgttttctcctcgagtttgagaaagaggtacagcagaagcttcatactgtgcccttggtagatcatcctttttatggacaagatgtaaattcatcttcccttggatgggctatgtcagctgcctcttctcgtgcattccgtttgcatggtgaagtcccaatgttgttgcctcttattgatatgtgcaatcatagtttcaacccaaatgctaggattgtccaggaaagaagtgtaaacagcttagacatgtcagtaaaggttcttgctgagaagaagattaagcaaaatgaagcaataacactgaactatggctgctacccaaatgatttctttcttcttgattatggatttgtgataacacagaatccttacgatcaagtggaactaagttacgatggagcccttcttgatgctgcaagcatggcagctggagtctcttctcccaatttttcagcgccagccaagtggcaacaagatatattgtcacagctaaacctacatggagagggtgccgttttaaaggtgagcttaggaggccctgacgttgttgatggacgcctgttagctgctctaagggtgcttcttgccgatgatccagaggctgtgcacaagcatgacctgaatacattgatgtctcttgacgtgcaagttcctttaggtcccactgttgaagcatcagcactccggacagttcttgcgctttgcgcgattgctctccaacactttcacacaaaaataatggacgaccaggccattctaggcggtgggccgcctcttatcacgcaactggccgtccagtttagattgcagaagaagttcacgatcgttgacgtgatgcagaatatcagcaggagaatcaagatgttatcgccgcagaaatccactgggtagttctttaatctgtcgtcagacagtcagttaccattctgtactggctactgcagatagcacaaatcccagttgtgattctgtaccatgttcttgttatgatacttccagtgcctgtcattgaaaagttacatctgcgtcgaacagttaattacttccctgtactgattattgcgtataataataagtcccgattttgagtcttgtaccatt

SEQ ID NO: 33636 - DNA, 3237 bp, Zea Mays
ccttatcccaaatcagggctatacatttggccagcaggctgggacgctcagctcccgctcccggacgacgacgatggccttggcgctgcaatggcccctccaattcccactccagctccaggcgcggcctcccgccgttaccgcgggccatcaccgtcgccgccaccgagtcctcgccgtctgccgctccccgccgctcccagctcgctgttgtgccagcgccgccgctgcggccgacacggggaaggcgcagacagcggcgaggagggcttacccattcgatgagatcgagccgaggtggcagcggcactgggaggagcaccgcacgttccgcaccctggacatcggcgaggggctcgacacctccaagcccaagtgctacatcctcgacatgttcccctaccccagtggggctgggttgcatgttgggcacccccttggatacacggcaactgacattctgtcaagattcaagcgcatgaaaggcttcaacgttttgcatccaatgggatgggatgcatttggtcttcctgctgagcagtatgctattcagacgggaacccaccctaagattaccactgaaagaaacattgagcgctttcgcacacagcttaaatcgttgggtttttcatatgattgggatcgtgaaatctccacgacagagccgggttattataaatggacacaatggattttccttcaactgttaaagagaggacttgcttatcaggctgaggtacctgtcaattggtgccctgctcttggaactgtcctggcgaatgaagaagtagtagatggtgtgagcgaacgtggtggctatcctgttatacgaaagccaatgcgccagtggatgctaaggataacatcttatgctgatcgtcttcttgaagatttgaatgatcttgattggcccgagagtatcaaggaaatgcaaagaaactggatagggagatcaaaaggtgctgagcttattttttctgcagttgaccaggaaggacatgacctgggtgccactttattggtttacacaacgaggcctgacacgatttttggtgcaacatatcttgttgtggcacctgagcatgttttactgtcatctctaacatctgaggaacaacgagcacatgtagaggaatacagagaactttcagcaagaaagagtgaactagaaaggactgaacttcagaaggaaaaaactggggttttcagtggttcttatgctaagaacccagcaaccggggaaatcattccaatatgggtggcagattatgttctaggaagctatggcactggggctatcatggcagtgcctgcacatgattctcgcgaccatgaatttgctgtgaaatatgaacttccaatcattaaggttgtaagtccaccgaatggtaattgtgatccagtggaggcatatgaagatgatggcatcatgattaattcatctagttcttcatctggactgaatattaacggaatgctttcccaagatgctgctaagaaagttactgagtggatagagaataatggttttggaaagaaaaaggtaaactacaagcttcgagattggctttttgccagacagcgctattggggtgaacctttccctgtgagctaccttgatgataccaatgaaatggttcctcttacagaagatgacttgcccttgacccttcctgaattggatgatttcactccaactggtactggggagccacctttgaccaaagcaacaaattgggttagaaccattgacccttcatctgggaagcctgcgagaagagaaacaagcaccatgccacaatgggctggatcttgctggtactatttgaggttcatggatcccaaaaactgcagtatattggttgataaggctaaagaaaggtattggggtccagttgacatctacgttggtggtgctgaacattctgtcttgcacttgctttatgcaagattttggcacaaggttctttatgacatgggtgtagtctccactaaagagcccttcaagtgcctgataaatcaaggattgatactaggagaaagacaatgaaggcagatgggtttctgcagactcagactcaagtttgattgattgctaccaagaaaaagtagctccagacaaggttacaaaagttggagatcattatgttctgaaggataatccaaacattcgtctgaatgctcgtgcctacaagatgagtaaaagtcgagggaatgtcatcaaccctgatgatgttgtttcagaatatggcgctgattctcttcgcttgtacgaaatgttcatggggccattgagagattcaaagacatggagcactgggggaatcgaaggtgtgcaccgcttccttggacgaacgtggagactcatagttggtccacaattatctgatggatcatataatgatggaaccatgactaccgaagatgaaccaaccttggatcagcttcgagttcttcacagatgtattgcaagggtcacggaggaaattcaggaaacaagatttaacactgcaatatctgcaatgatggagtttgtgaatgctgcatacaagtgggaaacccagccaaaatctgttattgaatcctttgttctgctgctttcacccttcgcgccacacttggctgaggagctttggtttcgcctcggacatccacaatcattggcctatgaacagtttccagaggcaaaaagtgagtacctggaggaatcaaagcttgtactccctgtccaaatcaatggaaagaccaggggtacaatccttgttgacaaagcgtgctctgaggatgatgtttttcaaattgcagcctcggatgagaaactctccaaatatcttgatgggaaaggcatcaggaagaaaatttatgtgcctggaaggatcttgaatgttatcttagatcaacaaaagtcaaggacctgataattgctcttgtttgtccatttatctcgttatgagtcaggaatagagatcaataagacatgacagatctgtaaatttgttttttagcacttgcagtttactgtcaatttgccaacaacaacaacgtcgaacactcgttaggttaatgttaaaatccaacagaaaccgtcagtcaaggttaagcatatggatagttatttttatgcactctttggggtatttgaaactgctctaggttccagcttcagtgtggagctgtagtttacaatacagatttaaatagttttaacaaatatttttaatcaaaataataaacaaa

SEQ ID NO: 33637 - DNA, 1663 bp, Zea Mays
tacagggctgtagttcctactatccagggctatgaggacgcaggagacttcactgttaaagaaaggctgaaaactagcattcatatgaacctacttttttattcaattgtgggagccattggccttattggtctcatactactcttaatcatgcataaagcttgggatggtggtattgtgggatttgcaatggcatgctcaaatacctttggattggtgactggtgcttttcttcttggttttgggttaagcgaaattccaagaaacatttggaaaaatgcagactggtctcaccgccaaaaagtactttctcatagagttgccaagatggctgtaaagcttgataatgcccatcaagagtattcaaatgcaattgttgttgctcaagctacatcaaatcaaatgtcaaaacgtgacattttgaggccttacatggatattattgataacatgttgtctcaaatgctgcgggaggatccagcctttaaaccttctggtggtagattaggtgaaaatgatatggactatgataccgatgataaatcgatggccacacttcgtcgccaactcaggagggctcatgaggagtactataggtgcaaaagtgagtatatgacttgtgtcatggaagccctcaaactagaggacacaataaaaaattatgaacgccgtgatgctaatggatggaaatatgtatcaagttttagtgaaagtcgctcgggcacacttggatcaattttggacactatcggtattcttcttacctccactgcagatctcttggctttcataattccttacaacaagcatctcagttcaactagattcatactttcttgttaaattcgttaattcttacatgtggttaaaatttgatggagctgactcgaggatacattgttacattcccagagttcatttggtgctgtatactgagaaagcagcttcaaaaagcatttgctgttatccttggctgcatgtcagctgctatactgctggctgaagctactttacttccaagtggtgttgatctatctctcttttctattcttataaaagctgtaggaaaacaagaggttttagttcagagaatggggaacattgatgatgcagttcctttctttggcagaggcttcaacaagatctatccactgattatggttgtttatacactattggttgctagtaatttctttgttcgtgtgattgactttttgggaagatggaaaaggttcaagttccaacgtgaagaagagaatatagatggtttagatccatctggaatgattattctacaaaaagagagatcttggatcgaacaagggtgcaaagtgggcgagcaggttattccattggcaaggaatttcaatggtgtgaacgctgatattgaatcacaaaatgtgccattggtgcgtagaatggttccttcatttacatgggagattaaacttcggttgttctctttcagtctttttgaaaccctctcttctccctccttttgtgagttcaaaaattgctataggatcaattttaacccgttggttatggaaatcagtccaaatgacaacccttgctcccaaaaccagttgggtgacgtaacatttaatgaggttacattacatcctgttcagactgatctgacatttggggacaaaggagggag

SEQ ID NO: 33638 - DNA, 1001 bp, Zea Mays
aggcatacaccgtcctgactggctagatacgataattttgagcgtatgggtggatgcagtttagtaacatcaaaatggcttattttgcatccacctatgcaggccgtgactcacacatacaaacaaccaaacataatcttaagtaaaatcaacaaatgcggtgatataagatgagatggtgcgggtaatcgatcatacggatagtgtattaaaagccatgcatgcatgccatacgagaggagtatttaggactaggagatgcatatgtgacagtgtgacaccaataatcaaagcgtgggccgccggccttgtatcttcttgtacatgtagagatcctagatcccttaaaccctagctagtagctagatatatagaacagaactgaatcagcagtagtagtagtgctttgattcttgagagagagagagagagaagtagtatcagcggcaggcagaagacaaagaagaatccaagctagctaaatagagtagagagacggagacgacggagtaagtagtcgtgggaaatggtaggcaaaacgaatataaagcgcagagtgttgagccttgacacgcgcgcaaatccatggtacgtacgtacgggtccgcacgtgcccggaggcctaaactaataaaccagcaagcccagaggattaaagaactactaagctagctttcaaggtaacggtctcatgaatcgccccactgctgctagtgctagctagcgctagcgtttcagtttctctcgcggccggccggatcgagcgagaaccaccaaccagagctagcgcaactggtaatttcaatttcgttatcctcaattcgtcatcctttgtttgtgcagtctgcacgtacgcatgcgattgcattttcagtacagagagagaaagggaagcgcatctgactcagcagcaaggaacatatagagaacgtatcttgtgcgcaaggagcgttggtgctcccatgagcaaaattaatccagaccacaacctccacatccaa

SEQ ID NO: 33639 - DNA, 1505 bp, Zea Mays
tatccttaaactcatttatgtacctatacaattttcttccttggagactgttttgaccgtggctggactctattattggtttgctgcaatagagtcttccaaggcaacctcaatcgtttcaaagcagcacgcggcctgtgaacaaagtatcccatcaagaaaagtggctcttctgatagcagccttgtcatgtgccattcggccaacaagtgctgtaacatggctatatgttggccttttggattttattcagatgaaatcaaaatgtcgctttatccttcttgatgtcattccagtgggggccattgtccttgcagtaacaacactccttgattggtggatgtatggttcctgggtcatagtgccgcttaattttttgaaattcaacttattgtcttccggaggagactactatggaacacatgtcttccattggtactttacacagggttttccatccatgatttggacattcttaccatttgcattgtgcggtattgtaaagtctcaggaatggaggctttcaggtctaattgcttgggtgttaggggtttacagcattcttggacataaagaattcaggtattcaccttttcctgtaagtgtatagtgcccttgtagtcaagtaacctcttctctctattcacatgatatgatacaaaaagattgaatactgcaggtttgttcttccagtgctacctttagcattgatgttctcaggttactgcttagcttccatgtcacagtccaagggcaaaaatcagcataggaaaggaagtctttcaaggctgcagctttctgttattcttctcgtcataaccaatgttcccatggctttatatatgtccttattccatcaaaggggaacagaagacgttatgtattatttgtcaaaagaagcctatgatggaagagtgaggagtgttctctttctcatgccttgtcattcaacaccttactactcaaccttacattacaatctacctatgcgttttttggactgcactcctagtgatagcaaagggaccttggatgagtcagatcgtttccttacaagtccatctgagtttgtcggcgatgtttttggaaatttatctgcattcagtcacattgtattattcgagtcagaagaaagacatgttctccagttgcttctgcacaattcctttcttgagatgaggaggtttttccactcacatttcaagattgacagagaccttcagtcggctgttgtggtttattcatggagggatgtgctatgatttagtactgatgtggcagaaaatgcctgttagctcgtgtaacaatccccacatgtttaatgttgtttcagcttttcatttgagaaatgagttgtggcattgctggatacttctgatatcttaatcctcttggaatgagatgttatgttacttttacccaagtgctttacgacggcataacaattcacagttcgctttcttgcatcgagtctctatgtccatgatatctgcttctaagataaa

SEQ ID NO: 33640 - DNA, 1125 bp, Zea Mays
cctcacccgccgtcggtcgctcctcacccgccccacgcctgaccagcgccattactcctcatcccgcaggcagtctcgggtccctgttcccgctgtcgctcgtggcccgctccaccagcacgcaggcatcaccctcggccacggcctccgaccaccagccacgcttcgccgctaaccccctcgcggcggcttccattcggtccctgccctccacgccattctcttcctgacctcgccttcaagttcatgtccccgtcgtcgcccatgggcctgctccatcggcccgcctcaccctcggccacggcctccaaccgtcggccctgtttcaccgccgactgcacgccctgccctgtgccggctcttgccctcccctgactcgtcggccccgtttcgccgccgaccgcacacgctaccgtgcgccggctcctgccctctcctaacttgaggctgtcaaaccacggaagtggcttaatccaacggattgggggaggagagcctggtgccgttcgagattggggcctcatgaggtaaattcagaagcaaggatggcgacgacgatgaccccgacgacatcgtccccatggacacccaagctgaagatcatgcttgctgtggagcctttgataccatcagagggaccaaagattggagagcacatttcggttacacggaatggaaaatgtgcatatatggtgctgattgcagtgagattagcctcgtccaagttaggggatctggtatgttaaaggattctgcctgccatgaactagacaagattagaagtttaaagaggccttacatcaagagagtacaagatcgccataaggaagtacaagtctttgaggaaagtgaccttatgagaagcttgagaaaaatcaacttgaaagtgaccttcatgatgatacaataaattgtctcaaacgcaacactattgaaatggagggatacattcgccctcttgacgtagtcataattgtgttgcagtatataccttgctctgatgaccagcattctgatggtgttgcagatgatcatcccagcgattccttattctctccaacataccatcatcacaaggttcgttatttgaataaataacctaacgaaaggtataaagataataaa

SEQ ID NO: 33641 - DNA, 1761 bp, Zea Mays
aaaaaataaaaaaaagaaaaaaaagaaaaaaagagagaggaaaaggggacaaaccaccaacaacaaccagaatatcgcatcgccgtcgcgtcgtcgtcgatctccccgccccgcccgcgccgcggaatctgacacatctctctaatctctcctaggaccgggtgcccttacatccacccgcaacgcaaatcgccgtccgagccatcgcggtgtctcgtctccccgtgcgagaggacgccggcagcagcggcgtgccagtgcggtggcttggtgggggaagaccggaggcgtcggcagagctcgcgtccagaggtgcacggcaggcctgttctcggcgtcggctgggggaaggcgagtagccgcggacgagtgaataatcatgagctcgatctgccctttcgcgggagccaccactggtggtggtgtatgccctgtgaaatctgataagagcaacactggggtgtgccctgcaaaatctgacaagagcatcagtggtgtatgccctgtcactggcaaggatcatggtagcaagctcaaggaaagtggtgatcatggtgaagaaaagggcaccgatcctcgtgtcgtaccagcaaaatgcccattcggctatgactccaacactttcaagctgggtccgcttagctgcattgtctgccaggcactactccatgaaagtagcaaatgcaagccgtgtgcccataaattttgcaaggcatgtatatcacgctttaaagactgcccactatgtggtgctgatatagagggtattgagcctgatgcggaacttcaagctcttgttgaccgcttcattgatggtcatgccagaatcaagcgatcacatgctgcaggggatgtggaagcagcagatggcaagaacaaagtcatatatgaggatgtttccatggagagaggggcttttctggtgcagcaagctatgagggcttttcgtgcccgaaacattgaaagtgcaaagtcaaggctcactatgtgtgcagacgacatcagggaggagttaaaatcttcagaagataacttagacctatgttcacagcttggagctgtgttaggaatgcttggggactgctgtcggaccttgggagatgttcctgcagcaatcacctactatgaagaaagtgctgagttcctctcaaagccccctgcaaaagatcttgagctggttcatactctctctgtttcactaaataaaatcggtgaccttcgctactatgatggcgacctccaatctgcaagaaactattatgcccgttcattggatgttcgcagaaatgcagtaaaagaacactctgctgtggcttcccaggtcattgatctggcaacttctcttgcaaaagttgcggatgtggatagaaatcttggtaacgaaagtaccgcagttgagggttttgaggaagcaattcgatgccttgagaagttgaagctggattctgaacaaactaccctcgaacagcggcgcctctcggttctcgacttcctgcacaaccagttggccgataagtaagacatagtcttctcctaagaaggcaccaccagcagatatctcctcatggtgcgcctctggtgaatctgggccttggatcccaaaaagtcgggaaggattcgtgtccatgtatttcttgtgagagacggttgtttgactggaagccagttctccggtggcggtcacagatctatctctggtgctgctgcaaattggagtcacttgtgaaggctatagtgacacacgtccgaacagtccgtgac

SEQ ID NO: 33642 - DNA, 3567 bp, Zea Mays
tcttaaatcccctgcgaggctgcgtctctcgaagtccaaaacgccccgccctggaaccctaaccctacctttcctctcccgccaccgcccgccccaatggcgaagccgatgaagtacgacgatgaggaggagatctcgtcctccgccgaggaggaggaccagtccgacgccgccggctccgtatctggcgaggaaggggatgacgacgacgaggatgctgcggcgccgcccgcggaggaagctgagggcgaggggcagcaggaggaggaggtcgacgaggaagagatcgaagccgtcactaccggcgctggagctgaggacgaggaggacgccggtgccgttaccgccgctgaaggcgacgacgagtcccagtccaccgaggacgacgagcccgtcgcgagggacaaggacgatgacgacgagactgatgcagtggttgggaagcgagagaaagcaaggctaaaagaactccagaagatgaagaaacataaaatccaagaaatattagatactcaaaatgccgccattgatgctgacatgaacaataaagggaagggacggttgaagtaccttcttcagcagacagaaatatttgctcactttgcaaaaggaagtcagtccaacgagaaaaagccacgcgggaggggacgccatgcatcaaagatgactgaagaagaggaagatgaagaatacctcaaagaggaagaagatgcccttgctggtgcagggggaacacgtttagtttcacagccttcatgcatcaagggaaagatgcgtgattatcaattagctggacttaattggcttatacgattgtatgagaatggtatcaatgggatattagctgatgagatgggacttgggaaaacacttcaaactatttcattgctgggctatctgcatgagttcagaggtataactggtcctcacatggtggttgcgccgaagtccacccttggcaactggatgaaggaaatccaacgtttttgccctatcctacgtgctgtgaagttcttgggcaatccagaagagcggaaccatataagggacgatttgctacagcctggaaaatttgatgtgtgcgtgactagttttgaaatggcaatcaaagaaaaatctgcgttgaggcgcttcagttggcgctacataattattgatgaagctcaccggataaaaaatgagaattctcttctatcgaagactatgaggatttacaacactaattatcgtctcctcatcacaggcactccactccagaataatctccatgagctctgggctctcctcaatttcttgctccctgaaatatttagctctgcggaaacctttgatgaatggtttcaaatttctggggaaaatgatcaacaggaggtggtccagcagcttcataaggttcttcgcccatttcttcttaggaggctcaagtctgatgtagaaaagggtctacctccgaagaaggaaaccatacttaaagttggaatgtctcagatgcaaaagcagtactatcgcgctctgcttcagaaggatttggaggttattaatgccggtggtgaacgcaagcgattgcttaacattgccatgcagctgcgcaagtgctgcaaccatccatatttgttccaaggagctgaacctggcccaccctacacaactggtgaacatctagttgagaatgcaggaaaaatggttctactagataaattgctgcccaagctaaaggagcgtgattccagagtcctaattttttcacagatgaccaggcttttggatatcttggaagattatcttatgtatagaggttatcagtattgtcgaattgacggaaatacaggtggagaagatcgtgatgcatccattgaagccttcaataagccaggaagtgaaaagaatccacaagctgatctgcaagctcaggaccgtgcacataggataggtcaaaagaaagaagttcaagtgttccgcttttgcactgagataatgcaaacgaaattacagtacactatcgaggaaaaggtgattgagagagcatataagaagctagcattggatgctttagttattcagcaaggacgattggcagagcagaaaactgtcaataaggatgaccttctgcaaatggtgcggtttggtgctgaaatggttttcagttctaaggacagcacaataactgatgaggacattgaccgtattatagctaaaggagaggagacaacagctgaacttgatgcaaaaatgaaaaagttcacagaggacgccattaaatttaagatggatgataatgccgaactgtatgattttgatgatgagaaggatgaaaacaaggttgatttcaagaaacttgttagtgataactggatcgagccacctagaagagaaaggaagagaaactactctgagtctgattactttaagcaagcgcttcgccaaggtgcaccagcgaagcctagggagccaaggattccaagaatgccgcacttgcatgatttccagtttttcaataaccaaaggctaaatgaattgtacgaaaaggaagtgcggtacctcatgcaagcaaaccagaagaaagataccattgatggtgaagacgaagatcaattggagcctttaacagcagaggagcaggaagagaaggagcagttattagaagagggttttgcatcatggacaaggagagacttcaacacatttattcgtgcatgtgagaaatatggtcgcaatgatattaaaagtatatcctctgaaatggagggtaagacagaagaggaagttcaacgctatgctaaagttttcaaggagagatacaaggagctgactgattatgatagaattataaaaaatattgaaaggggggaagcaagaatatcccgcaaggatgagattatgaaggctattgggaagaagttagaccgctacaagaacccatggttagagttgaaaattcaatatggccaaaataaagggaagttctataatgaggaatgtgaccgctttatgctttgcatggtgcacaaacttggatatgggaactgggatgaactgaaagctgccttccgtatgtctcccttattccgatttgattggtttgtgaagtccagaactacccaagagttggctaggcggtgtgatactcttatcagactggttgaaaaggaaaatcaagaatatgatgagcaagagaggcaggcaaggaaggagaaaaggcttgctaagaatacgactccaacaaagagagcagcactaaggaattcagagggtgagagtgctccgttgagctcattcaagaggcgacggcagtctcttatggacgattatgtgggctcgctctcagcgagatgcagtctctgcaatgctttaagcccgtacgtgctgtgcttagtttcttgtgcacgtgagttgaatgcctcaagggctggtgactttgtagttgctgtagattcggacttcgcaattgcaactgttgctacacttttgattcactttttcatcgtggccctaacactcattccaaattataagattagagattttaacttaacactagagttcgatcaaatttatgcaataaaataa

SEQ ID NO: 33643 - DNA, 8863 bp, Zea Mays
gtgacttcttctcctcactccccagtccccgacgcccgacttcctgtaatccttgtttatcggccgacctgcaggctgcgagtggcctgctccctgcgagtgacctgcaggctgcgagtgttgtgctcatgtgctgtgttggttgttgctcactcgctcgtgtgctcatgtgctgtagtgctcctttctgttcgtggttgctcatgctatttgaggagatgccgtcattgtcatccttactctctggctccaatactgcgagtgctgagcttcctctaatcccttgcaagctctgcaatggggtggtgattgagcgggtctccaaacaaccagaaaccacgtcgaggaagttctaccggtgcagagccaagaaaacggatgggtcttaatgtgattttttccactggcaagcgagctatgttgttttgttaatcgaggatgggtttgtcagtggtgatcgacgccttgagttgttaatgatcgcacttaatgatcatggcaaagccgttgaatctctaaccaattccatcagagagatgaagaaaaagctgtccaacctggagttagtgatggaagagctggataacgtgaaaaatttgatgaaggcagccatggttgaaattgaggaaaacaagaaatcgacagctgctgcattgaaactgatggagaatgagctgcaaaagctgaaagggtcaactaaagtgaaacctaggaatatggcacagtgttttctgcttttggcattgattgggtggtttgtggtgggacagatgaattggggggaggaagcatccagccgatttctgctgagaggctaatgaacataggatggacttttcaatagctagatgtaatcagaactggtttatattttctctgctaacatggcgtagtagccaggacactttgcttgtcgattattatttttagcaagatgttggtgtgaagttggaaaggcttcccacggtccgaagcccgtgtcactttccagagtctacagtgttgcgttctgaatgctagtgttatgttccatgtcccgtgtcactttctggagtctaccgtggtgctcctgctaagtgttgagtcggatgttgattttgggaggacccacgggcgaagggcgtgtcactttcatgaggtatagtgttgggttccttctcagtgtagcgttccttcaaggtgttgagttttagggtcccatgttgatttttgggaggacccacggtccgaagcccgtgtcactttccggagtccacagtgttgcgctctgaatgctagtgttaggttccatgtcccgtgtcactttctggagtctactgtggggctactgctaagtgttgagtcagattggcggatgttgattttgggaggacccactggcgaaccccgtgtcactttcataagttcatagtgttgagttctggaaggtagtgttacgttccatgtcccgtgtcacttctaggagtctacagtgttgcgttcctgatcagtgttgagctctaaacgatggtgttgcgttgctgatcagtattgagttgggcgcatgttgattttgggaggacccacgggccaacgacgtgtcactttcatgagttataagtgtcgggttccaggtcagtgttgggttctgaacgatggtgttgcgttcctccaaggtgttgagtttcaggggcccatgttgatttttgaaggacccacgggccgaaccccgtgtcactttcatgaggtatagtgttgggttccttatcagagttgcgttcggatatatagagttgtgttcctccaatctgtgctgggtttcagggttccatgttgatttttgggaggacccgcggtcggaagcccgtgtcactttccggagtctacagcgttgcgttctgaatgctagtgttatgttccatgtcccgtgtcactttctggagtctaccgtggcgctcctgctaagtgttgagtcggatgggcggatgttgattttgggaggacccacgggtgaagggtgtgtccctttcatgcggtatagtgttgggttccttatcagtgttgcgttccttcaaggcgttgagtttcagggtcccatgttgatttttgggaggacccacggtccgaagcccgtgtcactttccggtgtctacagtgttgcgctctgaatgcttgtgttaggttccatgtcccatgtcactttctggagtctaccgtggggctcctgctaagtgttgattcggatgggcggatgttgattttgggataggactgggcgttcgggttacccgattagttcgggtcgggtagttcgggttttgataaattcgggtaatagaaactaatacccgatcacagctttaaaaacccgcgacccgtaatttcgggtacccgtaatttcgggttcgggtttgggtatacccaatttacccgaaatatataaagcacatgcgagggcgcgtttggctggtggcgcggcggcttgacagcgaggctgcgtacgcgtgtggccgcctggccgctaggtagtgcagcggcttgccggcgagggcgctgtccgctgtctgcgcttggtcgcctggccggtggcgcgacggcttgccggtgaggcagcctgttcgctgtacgcctgtccgctgtctgcgcgtggccgcctgtccgcctggccggtggccgcctgtccgctgtacggctgtacgcgcttcggcgcttggctgcctggcgcctggtgtgtggttgctagttaccgttgtgccttgttgtgagttgctgttgccgccatgccttgctgttgccggagaacaaagatctgaagtgctccttgctctggagtactagccttgaagttgcaggtggcgatagccgatggggattgggggacgtcgtagccaacgctggacaaggcagcggctgtggggctagcgttgtgcctggacgatgttggttatttcgggtcgaatgggtacttcgggtaccgcgggttaatacccgattaggcccgaacttagttcgggtatttagtttcgttacccgctagagctgttcgggtaacgggcttcgggctaaacgggtacgggttcgggtatttcgggtatagggcttcgggctcgggttttatgcccagatctattttgggatgacccacgggcgaacccccgtgtcactttcatgagttcacagtgttgagttctgaaggtagtgttacgttccatgtcccgtgtcactttcaggagtctacagcgttgcgttcctgatcagtgttgagctctaaacgatggtgttgcattgctgatcagtattgagttgggcgcatgttgattttgggaggacccacgggcgaacgatgtgtcactttcatgagttagtgtcgggttccaggttgagtttcggggggccatgttgattttttgaaggactcacgggccgaacctcgtgtcactttcattaggtatagtgttgggttccttctcaatgtggcgttcggaactatggtgttgcgttcctccaatctgttgggtttcagggtcccatgttgatttttgggaggacccgcggtccgaagcccgtgtaactttccggagtctacagtgttgcattctgaaaagcagtgttaggttccatgtacagtgttggagtctaccatggggctcctgctaagtgttgagtcagatgggcagatgttggttttgggaggacccacgggcgaagggcgtgtcactttcatgcggtatagtgttgcgttcctccaatctgttgggtttcagggtcccatgttgatttttgggaggacccgcgggttccatgttgattttttggaggacccgtggtccgtagtccgtgtcactttccggagtctacagtgttgcgttctgaatgctagtgttatgttccataacccgtgtcactttctggagtctaccgtggggctccttctaagtgttgagtcggatgggcggatgttggttttgggaggacccacgggcgaacgacggtcccatgttgatttttggcaggacccgcagtctgaagcccgtgtcactttccggagtctacagtgttgcgttctgaatactagtgttatgttccatgtcccgtgtcactttctggagtctaccgtggcgctcctgctaagtgttgagtcagatttgcggatgttgattttgggaggacccacggcaaacgcaggcttcccaaagcggcatggtcagttcgagctcgccctggggatgccgccgctctgcccatcgcagacgccgtggagcatcgacggcgacgtcgcaggacatgaggtcgcctaccagctggtgacccgaaacacccaggcggcccgccgccacgtcgagataacggccctgacggtgccgacattttggggcagcgggcattgcccggagccgctcgtcatcctaagaaagggcagcacggtggcctgctacggctacccccggagccactcgtcgtccatgaaaagggcgacgaactggcctggcaagatctggcggcgcggggatcgaatggacggacgacaagagcgagcgaagaagtcctggcggcttggtgagaaaatggtggcgctgggggcgatgggaacggaggtgcggatggtggcagcagtggagtgagcgagcgtggcctggtttcttcttgaggaaatggcattgcagaggcgatgggaatggagatgcgaatggggggaggagttgccgtgccgacggccgaccgcgatttttttgggaagaatcgtgagaagggataacacacagagagaaaaatgagtgttaccttcgcgttacaggaatgaagcgacggcgacgtcgagactgattgtcgtcgtccgcggccatggggcggagcaccttccggagaagtcgagacttatacgattaaaaaaggtaggcgaagagtcggcgcagcatttcacacgcagtagtgactgacacctggatggttggattagtggcacggacaaacgatcttacggctacggaaatttggacgatgtgtccaccttcgtttgcgagcagcggaccctggtttgatatattaaaaaaaggcagccgaagagtcggcgcagcatttcacacgcagtagtgagtgacacctggatggttggattagtggcacggacaaacgatcttacggctacggaaatttggacgacgtgtccaccctcgtttgcgagtagcggaccctggtttaatatatagaaatagtgttgagttctcaacactgtatactcctgaaagtgacacgggcccatggaatgtgacactatcgttcagaactcatgaaagtgacacgttgttcggtgtgaaagtgttgatttagggtttagtgtaaccgcccgttcggtgtggaagtgttcaaatttctctacgcgcgttcggtagcctcaccgacggcgacggcgacctcacctcaccgacggcgacggcctcggcgacggcgacaacgatccccaattctcttcgcgacctgaccgtctccacttcggggtgaagaagaaagccaacatgccacaggggaagagtaagaagaacgtggtgaaggagaaagccaaaaagattaagaagaacgcggaatcgagagccaaagttcatgaaaatacagatcaaattgagatcaacattagagaaggtgtttcaatttggataacaaaggctgcagtgcaaaaatgttttgagtttccccctggtacagataagaagctgccaatagatccaactacaaaaacatttgattcactctacagagtattgagtgtttcagaaaaaaaaatcaatgtaaagaagaagaagatgaaggagaatatgaaggagaagcaggttgaggaggagaagattgagatgaacatggaggagaagaagcagaatctggttgaggatgaaggtagtcaacaggaggaaagtgaagaggaggacggtgaagatggggaaattggagaggaggaaggtgaagatggggcaattggagatgctaaagtggggggagatggagacaaggaaagtgctaaaaggggggggataaaggttgctgtcagaagaaatgttttgactcctttgaacatcaatttgatgttacagaacatcaacaacgatgagattctcaaacttcttgttaaaagaaatgaagacactgatggtacagaaccgaatcttgacattgacctgattgtcagatgtttctttgcggtgagcagtgttgctgagtttggcaaggataagaagaaactgatatcagggtgtacaactgtgctaatggttgttttcttggaccatctcgtggaaaaccctttggatcctttgaccatccctaggatcaacttgtatacttcagattttatcgcagacctgataatggtacccaaggatagccctggccctgaaaaaaagcgtcgtaagtttaagaattcggaggatacatgctatcatgaagattcagaaatggtgccaagtccagggagagcatcgccggttgttgcttctgtacaatctcataagaactttgttgatcatgcagatttagaaattgtgccatctcatgagaactctgttgatctacatagtgtttacatggcacatgtattggaaagaagcagacaaagcatagtagtggacatattggactacaatatacctgaatctacttttgcagattgtttgctacctacaggtcatatgcacacagatgtattttatttacaatgccaactgttgtcaaaggattggaaggataaagtaattcttagctggaaagctactcaagaactgattcatcaagatattggagttaaggagctggacaaggaacttactgcagaggttatgaacaaagtggatctgatatttattcctatcattcatgccggtcactggtcccttgttattctttccactgccaaacaagagacatatatccttgactcctacccaaggcacagtggggtggccaaggatgttttaactcaactgcagaagtatttggataataaacacaactttgacatgtctaactacactgaccatgtgccacctgttcagcatcaaaaaaacaattacgattgtggctttcatgttttattgtatattgaagaattcatgaaggagaagatgtataaaatcaacaaaaaaatggtgttgaaattcagaaagcagctttgcatgaatctcttgtaccatcctttgaacagaataaatcttgtggaattcagaaagaagctgggtattacattgaaaagaaaacttcctggtatacttgatcttactattgaaggtgagaggagtgaatctgaggctgcagtgataattgaaatagagaacagagatgataagactctagaggatgaacatatttcagttgagaaagagaagttgcgaaaacacaagtttacgtctgataagatcaacgatgagatctgcaaacatatcttgaactacaatgaacgggagttgttaagtgtggggcagactaccatgactgggggtcagctggaaaagtacgtaaatgaaggtgacaatggtgataaaatactcagagcattcatcacatgcttcacttgtgatgaaaagttcaatcaagggaacatcacaaccgtcatcccgccacatgaagtatccgaagagggtgaactctccaaagttgatgctgcacaacttgtagaagaaatcaaagctgtactcaaaggcaccaatgttgcacgtgtacgcaaagacaccgaatccaccaaagatcccaaagtgaaagtctttcgaaacatgaggaggacatttatattttttcctttctacaagaatgaagaattgtttgtatttcatgtcgatacgaaaagactacccatcattgatgctctgttttgcaagatgtcatcattgtcgtttgaagatagatcctgactaggaaagtctatcatgggctgtctactcaaagccatgaaggattccggcttcatggtgaaaaaatatggtgattgtaggttcacagttactgtaactgaactcgaattcaaagatagtgcctcagcgctcataagttttattgagaacttcacttctaagttggacgacaatgccaagaaactgaaaaagggtgacaaggactggctggaaccttacaagaagtcgacagtggcataccttgtttgtcacactgaaaataaggtggtgttgcctgacgatattgtgaagtacaagcaaaacaagtgaggtggttgagtcgttaatgggtccagtggctgtgttttaagacttgtatcacactacttgtatggctttattctctgaagctgttccattgttgccgttagtaacaggtgttgcttttgtctctgctcagtgggtgattcatttcatccagagttgctgcaactttaatcagtctatagtgttgggttcctagctcagtgttgagttctaaatgatcgtgttgtgttcctaccaagtgttgagctgcacgacggcgtgcgcagccgcagccgcaccggcgaggagcgtttagaactctgttgatctacatagtgtttacaccggctcaacagagttctcatgttgatttttgaaggacccacgtgttgggttcctgctcagtgttgagttctgaacgatagtgttatgttccatgggcccttgttgatttcgagaggacccacgggccgaacggcgtgtcactttcatgcgtctatagtgttgggttcctgtctagtgttgagttctcaactatggtgttgtgttcctccaagaagttgagtttcaggggcctattatattgtctcagttaatgggtaactcagttaatcctatatattgtgtcagttaatgggaactcagttaatggtatatgttgtctcagttaatgggtaactcagttaatccagcatatcattgatgag

SEQ ID NO: 33644 - DNA, 1506 bp, Zea Mays
ccgatacacaacccaactcccgcacgcatctacccccaccaccagacgacctcccccctcccccgcattctctcacgccgcctgcgctctccccctcgcgagatagacaaccctagctcccgtctccttgcttaccctcctctccaacccctctccgatctctataaaagacccgaatttcgaattccccctcgaacccgcgatccgcgctttccttcccgcccatttcggtctctgattcggcgcggattcgctgcgcgggagcccccgaggttgcgtgcgtgattcggatggcggagccggggctcgagggcagccagccggtggatctgtccaagcacccctctggcatcgtccccacgctccagaatatcgtatcaacagttaatttggattgtaaacttgacctcaaagcaatagctttgcaagcacgaaatgcggagtataacccaaagcgttttgctgcagtcatcatgagaataagagaacccaaaaccacagcactgatatttgcatcgggtaaaatggtatgtactggagcgaagagtgaacagcaatccaagcttgcagcaaggaagtatgcccgcattattcagaaacttggttttccagctaagtttaagaatattgttggctcttgtgatgtcaagtttccaattaggcttgagggccttgcatattctcatggtgccttctcaagttacgaaccagaactctttcctggccttatctatcggatgaaacaaccaaagattgttcttttaatttttgtttcaggcaagattgttttgactggagcaaaggtgagagaggagacctacactgccttcgaaaacatctatcctgtactgtcagagtttagaaaaattcagcaatgatgacatgtgatgtgaaggtcacgttcttcaaattacaagcttcctcgaggattctcgtgtgaccatgaattctaaatgtacataaaagtctggcggaacttatagcatcctgtaatctctgtgagccgcggtctgtcagtattgggtgggcttgctgtggtaactggtggacatgtcgagttcatccatttgggtaggccttggtgaacacggacgccccacatcatgtctcagtttgagtagtttgtgtgaactgaagggtacgtgcttctcccatgtggttgcagcgttaacttgagtcaagtgctaacaagagtagataaaattttgccccagttcgtctttgtgacagtcttttaaagtcttttttctgagtatctttcaaagtgttttcagagtatcttccagtgtgctactgctgtgcgatgatgagaaggctggcactgtatgtaacgggggcaacgtgaccggttgtaagttatgtattgtagttgagatgctgtagcgcctagggcactgggattgaacttgtggaggaaccagtcagtcgaccgttctatttgtgtggccctctgctactgactaatgtggcctgttccaaatgtcgctgcgattttcgtttctttta

SEQ ID NO: 33645 - DNA, 1294 bp, Zea Mays
gttatcctgaggaaggatgacttctacctgcaagaatattttcattgggagcatggtgggatcttactgcaaagttccctataatgctcttttcatcctaaggaacacaaacaatcctaaggatggaagtacttaaatcgggacttgggctatgaacaggtgatgttctacccaggttaattaaggattggatgcgtatgtaggcctgtatgatcaaggactatcttaactggccacatgccctggatatgggacaggataagcttgaacccggctattccatacatgaaaagacaatcgcgcactgggagtggagagatggcgagagtggcacgtaccctcctggcaaaggaccgcctaaaaagggtggtgtgctctcgggtggcgcggacctgttcatgcagtggaggatccgtgggaatggttgacatatgtaagggttaagtgctacatatgtcgtgtggttagagatcctcagctgagtaaatcgattcggatcgccgttatatccccggagagttgagacttgatcgctgccctgcaacctaagtcaggatgtaaacattatgaataaaaatgaggttgtattgatgagatggtgaaattagactagatgcaactggagtctattaatttttaatctggccttaaaatattgaaagtaaggactcactttagtaagctatttctgcaaaagtatctaatttgattcttgctaaagcctctccttgattcctatttaaccagcatatccttgagagtctttttccttagtcgggtaagacttgcgaaagtacactccgtactcagggttttcgaacccatgttgttgtaggtgatgaggagtattctaggagttcctgtggctggagggcgtttccagttctagaggaagattagttaggcttatgtataagctttggagggttcctaccttcctgctattgtaataagttatgcactttgagtatatcaggacttgtaataaatataactcttcctatgtaataaccttgagttttagaaatgaaaagaatgttttataaagtcttccgctcttatctccgaagtgtgtgtgtatcgaatgtgattactgtaatatgcatgtatggtgggagatccttgggatgatgagttcaagtggttgaactcgtgatagccttgttaagttacctggtacacgtgcatagccatctgagaccatcaaggcaaggattggtgcatgtgggcctgataacttgggagggctgccacaaagacagcaaggatcttcccaagaactggcaagtccccg

SEQ ID NO: 33646 - DNA, 1095 bp, Zea Mays
tcatttccccctctgtctgtcggcagatggcagtggcatgctgatggaaaatgcagtgccttcatgggtgtggtccaaatctgtatcgctttatttgcaaaatctgctatctgcatccagctgatgaaacgcacatgcagacacaaaaattctagtacttcattcccaacaagcaatcagataaaaacgaaaggagcaacttcaacagaacctgcggctccagtgattggaccgaccgatatttgcaaactgctgaaattgaatccatgggtagaggaagaggaagagggaagaagctaaccactgtcaggagccacgaagataaaggtagcagcggcgaagaagttgtgcctgcaaaaaagaggaggggaaggccccaaaagcgcttcgccagtaagatcgatcaggcagtcgatgttgaaaattttgtagaaaaggtggacggcgaccaagaagaagctgacgatggcaagctgaagaacagcgccgcagctggcggtaacaagagaggcaggccgttgaaagagggctccaatattgtcgtagaagataacaactctattgtcccatcgagcagtgatgaatcaacaaggaccaacgggttcaggcagatcgggagccggcggaaaaacaagccccggcgagcagcagaggcaggactagaatgcaagtgaagcatccctgcgagtttcagtgcaaggcagcatccaatttttttgcaatatcgtcatgtctattagctcccagtcccagtgctgaaaagcgaaatgtaaactagcattgtctgattgcatgcctcagtttttttcccccttggccccaagtgtatgaactaatggtacacctacttgttcagctgctctaggcctgattctatttggagcttgttgtggcagagatttcatctcagtttacaaaggctagtgatgctagaaggtgttcctgccattttgagtgatctggtcttctcctttgctcttactgcaactattcatttatttgtacttcactaaagttctggaaatgaaaaggagcataagtgctgacttgaggatctgttatctgctgttcttaggtcgctaaactaatatctaa

SEQ ID NO: 33647 - DNA, 1818 bp, Zea Mays
  misc_feature (1818)..(1818): n is a, c, g, or t
gtgattcggcccattgtagccccgagacagcgtccgcctacggcctatccgcgtcagcccgccggcgagtcgcgcacgagacctgcgaggcgcgatggcaggccgcggcggcgccggccggcggcctcgcgccgtcttcatggccttcggcactcagggcgacgtcttccccatagcacttttgcgtgtgaccaacaggagtatgctgtggtgttcatcactcattcagcgcaccggagtttgtcagcacatctagcagccagcagtgttagatacatgcctgtgtcaagcccgcctgtcctcgctgccgaacagttagagaatatctcaagtgattctattcaatcaaaccatgagcgtgagtccttttcaatgcggaaaaaagccattcaagcggagcacaggaaagaatgcttgtcttttgtggaagaagtttttggaaacgacccaagcatcagtggggattttattgtgatcaatttcttcgctttggaaggttggcaccttgcagaactattccaagtaaagtgcgtcattgctgctccctattttgttccatatagtgctcctacatcattcaaacgccaatttaaacaaacttttcctctactttacaagtactttcaagaagctcctgcaaatacggtctgctggactgacattatccattggatgtgggcactcttcatggaaagttggggatcatggagaaatgattgtctgaatcttagccccattcctttcacagatccagtaaccaatcttcctttgtggcatgtgcgagaggagtcacctttattactgtatggtttcagcaaagaaattgtggagtgcccaggatattggccgttcaatgctcatgcttgtggcttttggtttctacctatggattggcaattttcttgtgacaaatgcatggagttgtctggaaatatcaattcttcatttggtggtatgttgtgtgcaaaccattcttccctggaacacttcctcacaaggaatgcttattcatcaagacctatatttgtaggattaagttccattggtagaatgggctttcttagaaatcctaaagcatttttaatggtgcttaaggctgccatagagtcaacggattatatgttcatccttttctcatctggatacaagccattggattctgcaattcaatctattgcttcatcagtaaatgaatcaagaggggtggattcaccttctcttggtggtgacagcgctctcctttttaatggccgccttttctgctttttaggatcaataccgtacagttggctttttcctaggtgtgcagccgctattcaccatgctggcagtggatcaacagctgcagcactacttgctggtatccctcaggtaacatgccctttcatgatggaccaattttactggtcagagaggctacagtggttgggagtggcgcctgaacccctacaaagacaaaatctagtcccagataatgatgacgccttgagcatccacaatgctgcagatgtgctagttggagctatcaggtcagctttatcgccggaaaccaaagctcaggcggccagaattgctgataggctttcttctgaggatggaattggagaagccctcaggatattgaaggcgagagtgttgactcagaacaaaatcatcagctcattcatcgcaagtaaataattagtactgatatgatatgaggcattgatttaaaccactaaatttaagaaatggacttctaatgcaccgccccatgtaagatagagtaatttctcaaaccaatcaactttacggggcgtttggatccctttattttan

SEQ ID NO: 33648 - DNA, 1470 bp, Zea Mays
tttggcgattggggttgcgaagggagtctgattctgatagtgaagcatcggatgttagcggctctgatggagaagacacctcatggatttcatggtattgcaacttaagagggaatgagttcttctgtgaagtcgacgatgattatattcaagacgacttcaacctttgtggtctcagcagccaagttccttattatgattatgctctcgatctcattttagatatcgagtcatctcatggtgatatgttcactgaggaacaaaatgagctcgtagaatcagctgcagagatgctttatggtctgatacatgcacgatacattctgaccagtaaaggactggctgcaatgctggagaagtataagaactatgactttgggcggtgcccgcgtgtttactgctgtggtcaaccatgcctgccagttggacaatcagacatccatcgatctagtaccgtgaagatatactgccccaagtgtgaagacatctactacccacggtccaagtaccaaggcagtatcctaaccatactcttatcagactgtcttaatgcgtatatgtttcaaacttcgacctcttggtgagaactcaaaccaagggtattttttgtaccaagtctgacacagaatgggctgcccatgttctcagatgtgttagcacccactcacccacagctctcgtcggttgaaacaaaacattaaggactagcttgggaacctcatttttccaagtgattttcatttttccatggaaaatgaactatttttttgggaaaatgaaaaccccttgggaaattgaggttcccaaactagccctaaacatgaaatctgtctagtgcgcccatcaatcaccatgtgttttcaacccccatagattaatattgtttagtacctgaggtgcacaagctctcttctgtgttattgtggttctgtagttgcagaatgtttgccattttgttatatcctgctattttcttaaccttgttcagacatcgacggcgcatactttgggacaacgttccctcatctgttcctgatgacatacgagcacctcaagccacagaagctctcgcagcgctatgttcctcgtgtctttggcttcaagctccacaagccatgaacctcatgtatttgtcttttaaactcctcaagacgtggcactgggggcatgcgggagttttgcaatccttgaagacttgcatataagagcgccattggcaggtcagtggattggtaaaattctatcatgctgcagcgtgcttgtaccttagctggctggcacctatccaacatttgaatgtagctctaaggatatcaatgttgtaacctaactgctattgttctttgattagtaaaccaggagccccccctacaatgtagaatatggcaattatttatggctttgcagaaaataacaacccttcatctgcttggttctccaaaaagctatttatctaaaaaaatatcaaaa

SEQ ID NO: 33649 - DNA, 1235 bp, Zea Mays
gctaaccccaaaaacacacacacacacacactgcctgtttattttgtggacctatagcatattcccgtggtctccccccttttgctttgcttgccgagacggcgaccatggcgaagcagcagaatcctatccccatcccgatgccgctgtcgctgtcgctgcccctcgtcctcgtcgcgctgctcctgccggccgcccgcggcgccgcggagacgccgcagtacacgacggtgcacgcggagtcggacttcgaggtgcggctgtacggcgacaccgtctggatgtccgcccccaccccggacatcccttccttccacgtcgccaccaagctcggcttccacagattgttccagtacctgatgggcgcaaacctcaactcttcgaggatcaggatgaccacccctgtgctcacgagtgtggttccaggtgcagggcctctgcgctcctcggcctactccgtccggctgtacctgccggcgaagttccaggcttcccctccggttcctctcccagagctgaacctgcatccagatcggtggccaggccactgcgtcgcagcgaggagcttctcgggtcgtgcacgggacaagaacgtggtcgaggaagccgagaagctcgccatgagcctgagccggtcaccatgggctaactccacagactactccagcaagagcgcttactcggttgcacagtacagcagtccattccgcatcattggccgtgtcaatgaggttgtatggcattctcaaaggttgcaagctgtgttctaatatcagaaattacatcttgcatctgcttcaaggactccttccgcgcgcacagctcatcggtcactctgctcccgggacatcgaattcgaaagccttgccaactgactcggaagaaatggaacgagggtcccacatgagaggctcgatatcagaggctcggcgagcgatctccatgaccagcatgtctagattgagcagcttctcagatccaaacgcggtgtcacgggaatctatacgtgagcccttcttctcgctctagctgctccttccgttcacgcccaaccaaaacgagttctcaaccgaaccctagccgccgcaccttgccgccgcaccacagcctccgcaccacagccgccacactcaaaacaccatggatcgaactgctcccgtcgtcgctgttgcagaggctgttgatgccgctcgtgccgccgctgttgctgcggcggaggcaagatgcgcggctgt

SEQ ID NO: 33650 - DNA, 1376 bp, Zea Mays
cagagagtttttgccaacatgggagggagtactagagtcgagatccgaatatgctggaaggcctgctttaaatactcgggctccccacctgcggaagtatcacgaaacggaacgccaaaccaaatccatgactgaacaactgaaccgggagtacgacatcggcgacgagatcggccgcgggcgtttcggcgtggtccggcgctgtgtctcccgcgccacgggtgacgccttcgccgtgaagtccgtggaccggtccctcctcggcgacgacctggaccgcgcgctggcggagctggagccgaagctggcgcggctcgcggggggcgagggcgacgggaacccgggcgtcttgcaggtgcgcgccgtctacgaggacgacgcctggacgcacacggtcatggacctctgcacggggcccgacctgctggactggatccgcctccggcgcggcgcgcccgtgcccgagcccgacgccgcgcgcgtcgtcgcgcagctggccgaggcgctcgcgggctgccaccgccgcggcgtcgtccaccgcgacgtcaagcccgacaacgtgctcctggacgtggaccccgccggcgaggcgcccccgcgggtccggctcgcggacttcggctccgccgcgtggctcggcgagggcgcgcggggccgcgccgaggggctcgtgggcaccccgcactacgtcgcgcccgaggtggtggccggcggcgagtacggcgagaaggtggacgtctggagcgccggggtggtgatgtacgcgctgctctccggcggcgcgctgcccttcggcggcgagacggccgcggacgtgttcgcggccgtgctacgcggcagcctcaggttcccgcccgctctgttcgccggggtctcgccggcggcgaaggatctgatgcggcggatgatgtgccgcgacgtctcgcgaaggttctccgccgagcaagtcctcaggcacccgtggatccagagcggaggcggaggccgagagctggtgcggccaacctgagcagccatatatcgaacgagacctgaaccgatcgagtatcatcgtagcagtccggtgggtgtgtactcccccgatgagtgttgtgcagacgtctctgtatatccagtaagcaggcggcggcggcggcggcgagtgtgagactggagatcgtcgtttcgccgcacctcgcccgtgtgtgtgtgtgtgtgatggtgacctgggccgttttcctcttttgccttgtgggccttttttcgggccgccctctttgcttgggagttaaacgtcgtgcgacgatgatctgttatgtccaaccgtccatgtacaaatgaagtttgagctttctcgatgatctgatcaaatcctgatgatactacttatccactga

SEQ ID NO: 33651 - DNA, 3872 bp, Zea Mays
ccaccccacaccctctcccatctctctctccgtgccctcctcctcccccccagtccgccccacccttccggccctccccctcttttatatccagtaccatggtgatctccgagctcgggtgagctgatgagaatgcggccgatttgaggaaggctgtgggcgcgatggatgcggtttcgggcggattcgctaggaggctgtagaggttaggttccggtgtcccccggcccggccggtcgtgggagatgagctcctcgtccgcggccagcatcgggcagccgccgccgcccgcgccgccgccggaagaagagaagaagtgcctcaactcggagctgtggcacgcctgcgccggcccgctcgtctgcctccccaccgtcggtacgcgcgtcgtctacttcccgcagggccacagcgagcaggtggcagcgtcgacgaacaaggaggtggacgggcacatccccaactaccccaacctgccgccgcagctgatctgccagctccatgatgtcacaatgcatgcggatgtggagacagacgaagtgtacgcgcagatgacgctgcagccgctcaatccacaagagcagaacgacgcgtacctgcctgccgagatgggaatcatgagcaagcagccgacgaattacttctgcaagacgctgactgcgagcgacaccagcacgcacggcgggttctctgtgccccgtcgtgcggccgagcgcgtcttccccccgctggatttcacacagcagcctccagcacaggagcttattgcacgggatattcatgatgttgagtggaagttcaggcatatcttccgaggccagcccaaaagacacctgctgacgactggctggagtgtgtttgtcagtgctaagagacttgttgctggagattctgtgctattcatatggaatgagaaaaaccagcttttgcttggaatcagacacgctacccggccacagactgtgatgccctcttctgttctttcgagtgacagcatgcacatcggactccttgcagcagcagctcatgctgctgcaacaaacagccgcttcacaattttctataatcctagggcaagtccaacagaatttgttatacccctttcgaaatacatcaaggctgtttttcacacgcggatatcagttgggatgcgattcaggatgttatttgagactgaggaatcaagtgtccgcaggtacatggggacaataacagaagtgagtgatgctgacccagtgcgttggcctagttcctattggagatcagtgaaggttggttgggatgaatcaaccgcaggagaaaggccacctagagtttctctgtgggaaattgagccactgacaacctttcctatgtatccatccctgttcccactgcgagttaagcatccttggtattcaggacttgctgctcttcatgatgacagcaatgctttgatgtggctgagaggagtaaccggtgaagggggctttcattctttgaacttccagtcacctggtataggttcctggggacaacagagactccatccatccttacttagcaatgaccatgatcagtatcaagcagtggttgctgccgcagctgcctcccagtccggtggttatctgaagcagcaattcctacaccttcaacaacctatgcagtccccacaggagcagtgcaatctcaatccgctgttgcagcaacaaatactacagcaagcgagccaacagcagatggttagttctgatgctcaaaatattcagtccgtgctcaacccaggtgctattcagcagcagctccaccaactccagcagatgcagcatactcataatgaccagaagcaaaagattcaaccagatcaacagtaccaagttgctagcagtgcggttctcccgagtccaacatcattaccaagccatttgcgtgaaaaatttggcttctctgatcctaatgtgaactcttccagcttcatcagctctagcagcaacgaaaacatgctggaatcaaacttccttcaggtaagttcaaaatccgtggatttgtctagattcaaccaaccagtagttagcgagcagcagcagccgcaacaacaacaggcatggaagcaaaagtttatgggctcacagtcaatgtcttttgggggctcggtttcgcttaactcgcccactagcaaagatggttctgttgacaacaaagttggtcgtgatgtgcagaaccagtccctttttagccctcaagtcgactcttcctccctactgtacaatatggtacctaatcttacctcaaatgttgctgataataatatatcagcgtttccctctggatcaacatatctgcaaagtccaatgtatggttgtctggatgactcttctggtttattgcaaaatacaggagagaatgatccgacaactagaacttttgttaaggtttacaagtcaggatcagtggggagatccttggacatcacccggttctctaattatgctgaacttcgagaggaactgggtcagatgttcggcattaagggtcagttggacgaccctgatagatcaggctggcagcttgtatttgtcgacagggagaacgatgtgcttctccttggagacgacccgtgggagtaagaaaccatcactacaattatagtttcaaattgtgattttcaatagtatatacatttgaattttttatatctttacaatgtattagaaaaaatatcacactgcatagttcacgctctgatagagtgatagtaacttgttttttttttgtttaatttgtgtaggcagtttttttacccaactgcccattagcctcatcaatatctattgtcccttgcatttgaatggacctacatgttgttttcaatggctcctgatgacctcagacatatctacatgtgcttgattctggcatacatctactatatgcattcaagttacaaaaatgattaatccacgtcccttgatttatgatacttcaatactcaggaagccattttagctaatggctctcagtgtcagcctgataactggggtttgggggtcatctcggtcatgcgaacgagttgttttgtcttaatgcaacacccgggggaggtcttcctccctcctttattacaaactaaagcttacttgtgatacggatatcatgtttctggatattttaagtgatggatgcaacatatcaatcttagtgtgtgcattattatgcatgctagttgtggatctcgcctgaaactgagcttgctcacccaatgcaggtcatttgtgaatagtgtatggtacatcaagatactttcacctgaggatgtgcataagatgggaaagccaggaaacgatccacgctacctatcttagctacctatcttaaatcgatacatggagctctttctggctcccatgacgattctgcggcacactgcagcactgttcacgacggccctgctctactgtgctcgcatgttcgcccgtgtcatctctactctctagcatgcacaccgtgctcgtcttcagaagacgaactccccgtcgcttgtatccggtgcaggtcacccgctcctggactgatattttgtaggttccacgtaggaatcagtatcagcaactctatcctagtttgtggtaggctcgcgcggcgctcgttcctgtgtcgcatcaggatcttcggactaaaatgcgtagtcgaaaccgttctcgtgattcgtaagctattcatgtatttgaggattcctcgacatgctttcgacgatgaactgcaataatctgaatgcaggaggattgtttgagatttgtacttcagttttgtgtctgccggtttgcagggttgctgtgatgacgtttcaggtgttctctgtctgaaactattttttatggattggcgagttggtg

SEQ ID NO: 33652 - DNA, 212 bp, Zea Mays
atctcactcttgcattactcaatgcaggtacttgatacatgttgggaatgaggggagtagcagcatgtccactttcactctcacaataatgctgcccaggcgcagccatgatttaattagaaacttattgtcaaaggaagtttgtttttttatatagtcgtgcgcactggttaattcagttcaggtcgtatgtttatcttcccttgctagcc

SEQ ID NO: 33653 - DNA, 1953 bp, Zea Mays
aggcgtcgccatggccctcctccaacatcaaccagcgactcacacacccgcgcgccgcttctgtagggccccaaccaaccgcgcagggagaaaaccaccacagcacatgcagcgcctcgcctcctcccggaggctcctccaggccgcgctcgcccccgcccgggccaactccagcctctccgcggccgccgtcgccgcgcccgcgccagcgaatggcgccttcccgaagatgccggccttcgactacacgccgccgccgtacgacgggccgcgcgccgaggagatcttccggaagcgcgctcagttcctcagcccatccctttttcatttctacgatcgcccattgaacatagtcgaaggaaagatgcagtacctatttgatgaggatggccgtcgttacctggatgctttcggtggcattgcaacagtttgttgtgggcactgccatccagatgttgttgaagccatagtaaaccaggcaaagcggatccagcactccacagttctatatctcaatcatgcaattgcagattttgccgaggcattggcttccaaaatgcctggtgatctgaaggttgttttcttcacaaattcagacgggagtacaccatgcgcttaatccagaccccttcagaggtgcttttggttctgacggggagaaatacgccagagatgttcaggaaatcatcgaatttggaactacagggagagttggtgggttcatttcggaagccatacagggggttggtggaatagtggaactggcaccaggatacttgcccgtggcatacagtatggtaaggaaagccggtgggctctgcatcgccgacgaagttcaggcaggagtcgcgagaactggaagccacttctggggattcgaagggcatggtgtcatcccggacatagtcaccatggccaagggtatcgggaatggcatacccataggagctgtagtaacgacgccagagatcgctcaggtgttgacccgcagaagctacttcaatacctttggtggtaaccctgtcagcactgcaggcgggcatgcggtgctcaaagtgctggagaaggagaagctccaggagaatgcgtttgttgtgggctcctacctaaaggaacagcttaacaatctgaaagacaagcatgagatcatcggtgacgttaggggcaaaggcttccttcttggagttgagctggtgacagaccatgaaaagaaaaccccagccaaagctgagatctcacgtgtcatgaaccatatgaaagatatgggagtgttggttggtaagggtggtttctacgggaacgtttttaggataacaccaccgttgtgcttcaccaaagaggattccgacttcttcattgaggtgatggacattgcgctctcgaagctgtgaggcaagcagggcgaagatgatgtgcaaaccctggtccgtcgccatgggatttttgcccatgaataatattaagattaatgagacagcacctcgttgtctcttaatctaagacgatgccatgtcatccggtggcatggtattcctaatcctacctgccaaatcactggtattgctcgctgtctcgtaatcagacccatggagcaatatgattcttgtaaactctagcttcatccaatctgttcctcctgatctaactagtctgaatagcagctgttcgtttgtgaccaatatcaacttcttttcagatgctccatatattcctgctctctgtaaacaaaccattatcactgttcaatagatgcggagatgtggatataaaaattacatatacgggtactctttggtgtaccagtgatttggcaagaaagaaaaggtttaacgtacaatccaaaataaaatgttcacgtattaaattaatatgcatgatcatcatcaggtcacatgagaatggaaaacacgaagcaggcaatggtttccgtcatcaaaccgtcacgataatgat

SEQ ID NO: 33654 - DNA, 3209 bp, Zea Mays
cgacgacaaaaaacgcctcctccgcctcctccgccgccttccgcctgttctcacttcccgccccttcctccggacctagactcctccaagcgccagcgccggtgaacaccactttcccatacctgcgccatgggccgcccaaagggcggcgccgcgtcctcctcgaagaagccgaaggcgaagcagaaacagcgaggcggcgtcgacttcaagaagtacaagcacaaggtcgggcgcaagcttccgccgccgaagaatgccaccaacacggaaatcaagtccaaagcgatcgtgctgccggagcagagcatggcgtcggagaggacgggcatggcagtgaacaagcgcgggctcacgctacgggagctcctgcagcagacgggacactacaatgccaatgtgcggcgggctgcactgaatggaataaaggacattgttgtcaagcacccaacagagcttaaactgcacaaggttgctataattgagaagctgcaggagagaatatgtgatactgacaaggtggtccgtgaatcgttatacaatatactgcagtctctgatcttcccatctttgaaagaggataacactatatctgtgcggagtacactgtttttgctgatggctaatattctgaatggaacgacccatctatctgtggagatccagttaatggcttttaggtttttggagcttgtggttcttaatttcccgtcatccttttctagttatgctgaacagaccttcaacaactttgttgcggtactgagcaacgacagaatcaacctacatgataggaataaacttaacagtgttcttagtgggcttggccactgcctttccttggttgctaaaacgatagaaaatgatgatacatcaaatcgacaggctcataacctctctgcaagggaaaattggaaatttaccactgatgaagatagcacaggaggggcattttcaatgtccaatttattaacgaagcttcagaaccttgtccaaatcctcactaattctgtagaggtttcagcttcagagctctgtgcaaagtcagctcttgatgttcagtcaagtgaagcattgctatcagcccttcagtgtctggatctaatctgtaggatatttgttcatgaggtgaagaaacctcagttgaaattctccataccaaaaaatcagcatggaccagactggttgagaagttctttactggtacatctaaataatttatggggagtgaagcgcttgtttcatggaaagggagacgacaaatttttcattttcaatttaaggattgctgaaatctttctgcgcttgaatgtatggatagataacactgtgttttcagctgaagaattttgcctttttgtgtcttctctgttcgcaaaggcaaaaacacttcgcaataaggacctcatcgaaatatatttgagcccacttataacctgcattccaggtcttatatccaatgctccagatgactcaaaaggctatttgttggaggtatttacggactcatttaaagattgcaaggtggattgcaagctaatgttgccatatttggatgcagttggaggaatgctttttcctgagaaaacaagcatatggcttgctgaaaatgattcaggtgtgttgggctatcatgacatatggatacatgagctacctggaattttgctacaatcaattgataaagcccccttagttacaaaggttgctttggagcttcttctaagaattgggcaatacttccctgcagtggactgtggaaggctgcgccccttcatgaagttatttggtcattaccaggagctgtggatcttggtccttttgttaaacttcctcgtgattgccaagaacttgccatttcatgcctttattattttcccagtctgctccctgacgtcattgagccattggcctcatgttgcttaagtgatgcgctggaacccctcatactgttcagggccattgaagtcctacagtcaacatacaaggctggtagtttacatataacagagcaactcagtttcttgttgctgctaatggcaagattcagagttcatcctggggacatagttactctggaggattctagcaagctttcaaattgggatactttcaagtcattgaatcgcctaattttgacttccctatctgaaatgggcgatggctcgctggtccttgaattgatttggaataatttatttaatgcaattgctcaaaaaccatcgttgcataacatgaatggcttgcttagaattattgttacacttgatgccggaactagtaagctcatgaatggaaatgttgtaaagcttatagctggttacttggttgatgcatctttggatctgtctaaatccaccgaatttggttttcaacccgataagacgagactatttcagtactttctcaagccatgcaccatcatgtttgacaagaatgacaaggttctttgcagcacattggagtccctcaaatcttttgtaacaggaggcgatcatctgctttcatctgtctccaacttaaactacccaggagagctgtcgtgtcgagtttgtgctgtcacaaccatactcattttcttatgcaatgaccggaaactccataggaatctttctcttggcaaattggttattaaaggcatcctggaatatataaggcatcagctggattctagtgtgcctgatgtaacacatgtaggaaaacaaaagttaaaatctgcttttgagcaactcaagaccaaagcattgcagttgaattgctgggatagaagtgagctggagggtttttcgagtgctacatgatgtaaaatgattttttcccactatatgatgatactagctagttttgttatgcaaatgagcaatccgattgtattctaaggtatgggcaacaccgttttagggcacgttggttttaatctcaatccatatggatccgaccgaatagagtgggtttaaatctataccaaatcaaaatctttcataattcctttcaatcccgtctaatccatataggatggtaataactgaacaagttttagagtttgttcgttttgtgccaatccatatggatttgacggattggatggatttaaattcatagtaagttaaattttttttttattttttttatattcttcaatccatgtgcattggaaataactgaacaagattttattggtttttttttctctcgaatgattgacatag

SEQ ID NO: 33655 - DNA, 911 bp, Zea Mays
aatttcccctgcgcactgcttctccccacggcgcacgccagccgtcagcccgtcaccgattgttctggctcctgcgcgccgccagccccgcttgttctggctcctgcgcgccgccagccgtcagcccgtcaccgattggagatccttggacacctgcgcgccgccagcccgtcaccgcttggagacccgcgcagccgcgcttccctgcgcgccgccagccgtcgccgatccgtggccgcgtccgccgccgccagccctaaggtcgcgccgtcagccagcccgtctgccgtcgtgaggaatttttctggtaatcagcatggcactgtcatcaatgtttaagagaataaatgtgaaagatttgacctccaaggtttcagtctataccagtgctacaggcgctgggccacgaaaaggactgctggatcaacaaaaaatggtcgcgattccaatccaaagtatttgggggtaaagaagtttggtggagagaaagtactaccagggaacatcattgtccgccaaagagggacccgcttccatcctggaaactatgttggcatgggcaaggatcatacacttttctgcctgaaagaaggcaatgtacgctttgagcgcaacaaactctcaggcaggaaatgggttcatgttgatccagttgctggtcatgatcttcaccccatttacgcagatggttttgctactacatccgacactgagccaatgcaataaatgtgcttggggatttgggctgtcattttgttccaactcattcagctgccattttacagtttcatgtgtaaactttagcaggcttgaacgtagctggatcttttctttgtaatcataactactttgaataatataagttatacactgtaagctttgttctcatggttaacttcagatttcaaata

SEQ ID NO: 33656 - DNA, 235 bp, Zea Mays
ttcagatcgcaccacgcacacgaccaccaaatacgcaaaccagccgccgccgagtaaatctcgcctgtgtccaccactttgagcgttgtggcttcaggccatcggcggtcctccatggggatgcccgtggctgcgggtggcgcgtgggagctgcatggtggcgggaactcctcgccagcgtcgtggttctacgcatcatcgtgaataggagcccctgtgctgcgcaatcgaaggt

SEQ ID NO: 33657 - DNA, 3220 bp, Zea Mays
gagttggtgtgtctccctataaaaataaaccggaaaaaactcaccaaactgaaactagtaggggactaggtctagagaaaggagagacacaatcggccggaagagcgattgatttctcccgccgccgccgccccgtctcttcctcgtccgccgctgcgcccgccgcgcacaagaggagggtttcagtgttagggttctacccccgcctgcgctggtatcagcagccaaatgagaatgcttgctgtgtttgattgatcgtcagatccttacttacaacccaccaggtcttgtggtacctgccacctcaaagtcacgacagatggccgcaaataacaacccttggagggtccctatgccaccgctgctcaatgttcgagctggttttggcgatacaagtctcttctcaacctcactgcctgttcttcctcatgaaaagtgatgacgcttcggccaaaatgaaagtgcttgctgatgatcctgatgagaaagactacaagttcgattttgatcttcgacagatagatgacttgttgcctgatgaagatgagtttttcgcggggatcactgatgaaactgagcccatcgggcaaacaaataccacagaggaattggaggagtttgatgtctttggcaatggagggggcatggagctggatattgaccctgtggagaccatcacagttagttttgcaaattcaagtattgtggacggggctagaggcaatggcatcaacccttttggtgtcccaaacactgtaggaactgtggctggggagcacccatttggagagcacccttccaggaccttgttcgtaaggaacatcaatagcaacgtcgaggactctgaactgcgatctttgtttgagcaatatggggatatccgtaccctttacactgcaacaaagcataggggctttgtaatgatatcttatttcgacatcagagctgcacggaatgcaatgcgcgcattgcagaacaaacctctgaggaggagaaagctggacattcatttttccatcccaaaggagaatccatctgacaaagatttaaaccagggaactcttgttatttttaacttggatccatcggtttctaatgaagaggttcgccagatttttggggcatatggggaagtaaaggagataagagagacaccaaacaagaaacatcataagtttatagagttctatgatgtaagagcagcagaggctgctcttcggtcactgaataaaagtgagatagctggaaaacgaatcaagttggaaccaagtcgtcctggtggaacacgcagaaacttgatgcagcagctcggtcacgatttggaccaagaggagcccagaagctacagacatcctcatgttggttcacctattgctaactctcctccaggggcatgggctcactatagtagtccaacagataacaatatgctgcaagctttcactaggtctccaactggaaatggaatgagtcctatcggaatgccttcactgatctcaaatgctccaaagattgctccaattggcaaggatagcaatcggtctaaatatgatcaagtcttctcaaatggtaaccagtcactgggagctgcatttcagcactcccactcatatcaagatcacaacagtgaacagatgagttctagtcctgggactttatcagggccccagtttctctggggaagtccaaagccatattcagaacattcaaaatcccctatttggcgtccaccagcaaacggacctgcattgtcatccagtagtcgcactcagggccaaggattcttgtacagtagccgtcaggcttcattatttggttctttagatcagcaccatcatcatgttggctctgccccttcaggtgctccattcgagaaccattttggctttttatcagaatcgccagagacatcttatatgaagcaactcaagtttgggaacatgggtaatgttggtattggtagaaacgggggaggcctcatgctgggcatggctagtcatgcttctgtgaatcctggttcttctctgattggaagtctgacagataacgtatcttctagcttcagaccgatattgtcaccgagattgggacaggcattttacactaatcctccataccatgggcctggtacattcggacttgacagctccattgaccatgcccgtaaccgcagagttgacagcagtgtgttgcaagctgatagcaagaggcagtatctgcttgacttggagaagattcgcagaggtgatgatactcggacaacattgatgattaagaacatcccgaacaaatatacatctaagatgctcctggctgcaattgatgagcttcacaaaggaatttatgacttcttctacctgccaattgatttcaagaacaaatgcaatgttggatatgcgttcattaacatggtatcaccggtgcacattatatccttctaccaggcttttaatggtaagaaatgggagaagttcaacagtgagaaggtagcatctttggcttatgctagaattcaaggacggtctgcactgatatcacattttcaaaattcaagtttgatgaatgaggataagaggtgccgccccattctttttaatcccaatggtcaggactctgtgaatcaggaagcattcccaattaatggtatatgcatccacatgcccctggaagatgattgccttgacaatgaagaaaacaagagtctgaacgagaagacaggagagaactctactgatatcgctgggagtttgtgactgtcggccatgatagcaaacatgatcagaatggccacatatataaatctaactgtctagagagtatccacctccaaattgtataaaaactgatgaaggttgatggttaggcgttgaattttgtggtctttcggttttagttgcaacagatgtggcccctggaagcggaagcgaaagcgagggagcttcgaaccggagctgggcgcttgcttgtcgaatccccctcactctttacagatgtggggatgagcaaccgctgctgctcatagttgtgcttgcttttggttgcttgctgtaaaaaggtgaactgaactgaagaaatttagccaaactgtacagtttagaacttttgtgcatattttgcattctagtatgttaatgtgtatgggtggagcagtagttcagagatcctttttttctgcgtgagatctttttcttaatgcaatatcggggctgtcatactcagg

SEQ ID NO: 33658 - DNA, 5819 bp, Zea Mays
cgcaaacccccgcccgatcagatccgcagcgattcggccaagtcccgaacggccgaacccctctcccgctgcatcaccaccacctctcttctctttcctcttcgatctcgatcgccctcgcaattcctccgtaaagcgcccctgccctgggcgagctatagcgcgcgcgcccagatctgcgcggtctcgccggcgatggcgtgcatcaagagcgcgcagcgggcggcgctgacggcgttggcgccggacgcgccgtacctcgccgcgggcaccatgaccggcgccgtcgacttgagcttctccgcctccgccaacatcgagatcttccgcctcgacttccagtccgactccccggacctcccgctcctcgccgccgcgccctccccggaccgcttcaaccgcctctcctggtcgcgcccgggcgccgtcgagggcgactccttttcgcttggactcctcgccggtggcctcagcgacggttccgtcgccgtgtggaacccgctgagcttgatcagctccgaggggaaagcggaggacgccatggtcgcgcgtctggagaagcacaccggaccggtttgtggactggagttcagtgagctgacaccgaatcggctcgcttctggggctgagcagggggagctttgcatctgggatctcaagaaccccgttgagccaattgtgtaccctccactcaagagtgttgggtcccatgctcaagctgaaatctcttgtttatcctggaatcccaagtttcaacatatagttgcctcaacttcgagtaatgggatgacagttgtttgggatttaaggaaccagaaaccactgactagtttttcagattcaaatcgaaggaaatgctctgttctccagtggaatccagatatgtccacccagttgattgttgcatcagatgatgacagttctccctcactgagagtttgggatgtgaggaagaccatttcaccagtaagagaatttgttggccattcaaaaggtgtaattgctatgtcgtggtgtccttatgatagttcattcttgcttacatgttcaaaagacaacagaacaatttgctgggatactgttagtggagagattattagtgagctacctgcaagtgctaattggaactttgaccttcactggtaccggaaaataccaggtgtcattgcagcatcctcatttgatgggaagatcggcatatacaacctagagttctctggtatttatgcggctggcgatgctgttggtgccccagcgcgtcaaagggctccggttccaaaatggttgaaatgctccactggtgcatcttttggctttggtggtaaacttgtttctttccatccggtggcacccacccaaggtgcacaagcatctacatctgaggtgcatgtgcacaatttggtgattgagcaaagtctggtgagccgatcagctgagtttgaagatgctattctgaatggcgacaaaagttcgctgcgtgctctgtgtgaaaaaaaatcacaagaatctttatctgatgaggagagagaaacatggggcttcttgatgattatgtttgaggacggggattttgtaaggacaaaattgcttgctcatcttggcttcgaaccacctcaggcaccacctgcaagttcacctgatgaattgagccaaacattggcagatacacttaatcttgatcacgccacaataaccgattatgcagatgcccaatttcttactgataacggggatgattttttcaacaatcctcaaccttcagaggctagtttggctgaagatttagtttctacaaatggtcaacagacagagcaggaaatgtctggagatgttgtgccgtcagatccatcaattgacaaaagtattcagcatgcattggtggttggagactacaaaggggcggttaaccagtgtctttctgctaatcgtatagctgatgctttggttatagcccatgccggtggttctgctctctgggaaagcacaagaaatcattatcttaaaaacagtatctcaccttacttaaaggttgtctccgctatggtgggcaatgatttaatgagttttgtaagtacctggccactaagttcatggaaggaaactcttgctctgctttgcacgtttgcacagaaagaggagtggcatgttttgtgtgacacgcttgcgtctagacttctaaatatcggagatacactagctgcaaccctctgttatatttgtgctggaaatattgataaagctgttgaaatatggtcccgcaccttgaaatctgaagatggtgggaagatttatgttgatcttctccaggatttgatggaaaaaaccattactctcgcccttgctacgggccacaagagatttagctcatcactgtctaagcttgttgagaactacgctgaattgctggctagtcaaggtcttcttaaaactgcaatggagtatttaaaactgttgggatcagatgaacattcaaatgagctggcaattttgagagatcgaattgcatgttctatggaagagaatgataatgctaggagttatgtttctgaaagcaccgccactccttccctttatggcacaaatcaatcttatacagccccagaccattctcagaatgtttaccagcaggtacctcagccatacaatgtaccaagtaatacatattcagaagcttacccacaacaacctactggcgcctatggatacaacaacacatatcaacctcaacaaccaacccatatgtttgttccacctagcgcccctgccagctctcagcaacagccaggcccttcacctgtaccagtgcctcagcaaacagtgaaggcatttactcctgcgaacccagctggtctaaaaaatccgggacaatatcagcaacctaataccctaggttcccagctttacacgggcactgcaaatcaacagtatccttctggaccatctgcttcttatccaagcggacctccaacaacatttcatcagcctgtatcacctgttcaataccagcctgttgctccaccagtatcttcttttggtccgagcgctcctgtaccagcaacagtccctaaccagatgtttccccattctgctgctgctaactcaacttcaaggttcatgccatcgaacaatcaaagctttgctccgaggccaggtctaagtcccgcacagccctcaagtccaacacaggtgcaggcacagccagctcctcctgcaccgcccccgactgtgcagacagctgatacgacaaaagtgtctgctgagttgagacctgttattggtacactaactagactattcgatgagacgtccaaagctctgggaggatcacaagctactcaagcaaaaaagcgtgaaattgaggacaattcaaggaaaataggggcattgttttcaaaactaaatagtgatgacatatctccaaacgttgcatcaaaactcaggcagttgtgcagtgcaattgatgctagcgattttgccactgcgatgcacctccaggtactcttaacaacaagtgactgggacgagtgcaacttctggctcgcggcattgaagcggatgatcaagacaaggcagaatttcagaatgtaaaccttgtggcctttttctgcagccagttctgtacacaccttttttctgctgcttgccagaaatgatagctgtagcagttcagagagtttgcctgcacaggggtgttatcatgctgctttgttctcggcccttgattctgcctaagcgctttggtacctcagtgctgttatacattttgataatagttttttgttttcgacatctgctataaggtgacctgcggctgggttgttcgttatgaatgttaattgtaagaggacacttagtctgttatagctggtggatcacctgtttcaattcttcctcttagatttcgtcagtttggacattccaagaactctagatggttaatacaagtgacagtggcttgttttttttttttttgcaacacagaatctacatcttgcagttcaggaagggcgagacggagcaggaggtggcatgcaaagtgtcgcagcccaagggcgtcgggcggcgggtcatgtactactaccaggactacggcagcggcggcggtggcaagagcggcaagacggtgcaacccagggcgctcggcgtgcggcgcttcttggccatgctcctgctctccttcctctgcgtggggacgctgttcgtggcgcccgtgtccttcctctccttcgtgcatagcgatgaaggcggcgcggcggcggcggccacggccgcgcgcggcggggtgtccgggccgtgctcggccgtggggaacaacagcctctgctgcgaccgcacgtcggagcgcgcggacatctgcttcgcgaggggggacttgcgcatgcactcggccagcgcgtcgttccagctcgtgtccaccggcaactcgacgccgggggagcggatacggccgtacacgcgcaagtgggaggcgaacgtgatggcgacgatcgacgaggtgcggctgcgccgcgtggcccccggcgacgccgcgcggtgcgacgtgcgccacgacgtaccggccgtggtgttctccaccggcgggtacacggggaacgtgtaccacgagttcaacgacggcatcctgccgctcttcgtgacggcgcgccacctccggcggcgcgtggcgctggtgatcctcgagtaccacgactggtggatgaccaagtacggcgacgtggtgtcccagctgtcggagttcccgccgatcgacttcagcgccgaccgccgcgtgcactgcttccccgaggtgatcgccgggctgcgcatccacggcgagctgaccgtggacccggcgcggacgcccgagcgccggggcatcggcgacttccgcaggttcctggacgacgcgtaccgcggccgcatcgagttcctggagcgcctggagcggcgcgcggcgcgcaggcgcccgcaccgccaccaccgcggcggcgccttggtcccccgcgcgcctcctgcaggtccccgcgaggccgaggccgagcggcggcccaggctggtgatcgtgtcgcggacggggtcccgcgtgatcgagaacgaggcggacgtggcggcgctggcggcggacgtcgggttcgacgtgcgcgtgatccgccccgaccgcaccacggagctgtgcaagatataccgggagctgaacgccagcgacgcgatggtcggggtgcacggcgccgccatgacgcacttcctgttcatgcggcccgggaaggtgttcatccaggtggtgccgctgggcacggactgggccgccggcgcctactacggcgaccccgcggcgcggatggggctgcgctacgtcggctacaagatcctccccgaggagagctcgctgtcccgcgagtaccccacgggcgaccccgtgctgacggaccccgccggcgtcgcgcagcgcggctgggacgtgaccaagaaggtgtacctggaccggcagaacgtgcggctggaccttgcccgcttccgggaggagctcgtcgcggcgcaccggtacctggccgcggccggcggccggcggcggcggccgagagcggccgagacgacgaaggctcggaacggcttcctcacgcggccagtcgccgccacagccttgtagttccgtgtaggttgggttttttttttcccgccaggctgtatgggtttgttggaacagactaatcagctttggttaagcgtcaacaaaagcctgctagcagtggccgtaaagcgccgccacccatcgggggtgtgctggctggctggctctggcatggacggccccctaacggcacgcacagtaccacggcgat

SEQ ID NO: 33659 - DNA, 546 bp, Zea Mays
ttcaacagcttgtgcagcattttgatcaaccactgtccaaaggaaagattgaggccatcaagaacctgctggaaaatgggaagcagttgaagaggaaggttaggggcaccaaagtcgcgccagctgttctggcttgcccatctgcgctggtctaatggtggagctggctcattagggtcgtcttcctatttttatccatgttacagtctgctggagtgttgacaatagttgtgtgtcagggtctgttcccttttggtagttttaaaactaggccttcctacaagtgtgtggaacgtagtaaggtgtcagcttggggggagcaaaatcagttttctccctcccttcctgtcttgtttctgtccctggctttgtacttggtcttttgcgcccagcctcatgggaattgggtcagtctcttggccttgttgatgttgcaacatttatctagtagtcgattttttctttaaatgtcacaatcaaattgtaaggtgctatgttggaatatgagaggtctaaatgacgctgccaagcgggcgagtgtacgca

SEQ ID NO: 33660 - DNA, 2689 bp, Zea Mays
ccctatacagaccggacccgcatgtcatgacatactgggccccaaaacagccgagcagaccgacgcaaaccgaaagaccccaggggaaaaaaataccaaacgcacgcaaagccacacgcacctcgacccgttcccaggccatcacaccaccagcaccacctcgtcccccgtacctgcctcgccgccgccgccgcctcctgccggcctccgatggcgaagacccgcaagcctccggcccctccttctccgccgccgccccccgcagaaacgccatccccgcagcggcggcgcaagaagaagggccgcccgtccctcctcgacctccagcgccgcagcctccgcctgcaggcccaaaaccctagccccgccgcctcgcccacccgccgggaccccaatccctccgacgacgatgaggacgggaccgggagcgggcggcggcggcagaagcgcctcaagagcgtcctctccggcgtcgtcaaggaggagcagggggaggggaagaaggatgcagcgaaagcgacggggaaagaggacgctgcgtcggatggtgggcccacggggactcccctcccagacaaaaagttgctactcttcatcctcgataggctccagaagaaggatacttatggagttttctcggagcctgtcgatgcagaggagcttccagattactttgacattattgaccatccaatggacttctcaacaatccgtgagaagctgttgaatgactcgtattctaagttggagcagtttgaggatgatgtgtttctactcacatcaaatgccatgtcttacaattcagctgatacaatctacttccgacaggcacggtctattgaagctcttgccaaaaaggattttgagaacctgaggcaacccagtgatgaagaggaacccaaaccaccagctcgaaggggtaggccaccgaagaatcccaagacagagggtgatgtgtcaccagacctatctaatgtgaaagcaaataaacctgaagacaatgtcgatacattcagaaaaaggtcaactggagacagaactcgaaatacaaataccccaatgaaagatctgtccagttttcacgatacgtttggttcttttagtgcaaaaagaacagataaaattggtgattattctggttcatcgaagtggggaaagaaacctgttagtctagatgacgaccgcaggagtacatatgatcagcactattcacgtaatagctctctgtttgctgccctggatgatgagaggaaactactggtgccagtaggggttcagcagccacatgcatatgctaggagcttggcacgatttgcatcaaaattgggcccagttggctgggatgtggcagcaaatcgtatcagaagggcactcccccctgggacaagtttcggcccaggatgggttgtagatggtgaaccacctcaaaactctcagtgggctcctgcagcatcgactaatccctcctctgagcccactgctccacccaatatgccatccaagaatgatgtactcgatcacaagtctggaccgtcttctaatggggatgttactggtgaggagcatttaactagaactcaaacagtggcttctacatcaacaagctttgataagagctctgacatttccagtaaagtaaccaagcttgagaacggagttaccgagtcatgtggtggtacggacaatacgggatcagcagcgcctccaatgcagcaacacagccacagtcgagaaatccactctaacatcaatggctttactgctatgtcaaacgccatgagtcagtacgcggggcaagggttatttggatcaggcattcatatgacgcacgcccaagtgcttgggatgttttctggcatgaatggcaaagtcaatggctatatccataggcacccagtaactgctgatagtcttaaaacagcaggacagaacggagatgttggaaaggcaactgtgaaccccgtgcaaagcgcaggccaggatccaaagaccgcgaccgaaaatagctctgctcacccaggcttgaattccagagcccagtcatcaggttcctcgcctaggggaaagctgacaaatccgaagcaccctgatctggctttgcagctatgagcgcggtagtaggcattgacatagtttggtttagtactgtgatctgtgacagaggcatgagctcctcgagcactgctcctccgggcctaattctcaagcttccggcacgctgatagacatttgtagcttgccaagcggttgaagaggtaacagatggttggattgttgtcagagaataataacgcaaagcagctgttgcatgaggcggcggcggaacaccatgtaggccccccattttaatcatttgacccccagtgagttgttgtaaaagggtagggtagcttctgtacaggttctaatcttattggagatgacagtgtttcggatgaggcggccgcctgttgtccaatttgtaacatttataggaggaagtatacaggcgaaaaaggcagtgaataattgtgccttttgaaatgttcgaacggccgattggcgacatgttgctgttgttttgatttcttgtgccttttgggctcactctgtccactggatacgttggatgctggtgattggcatatatatgtaggtcatgctcttgagccttctactcgctgtgattcttcttcgcctcggaaattag

SEQ ID NO: 33661 - DNA, 1066 bp, Zea Mays
cgttctgtcgccgcctccacttccaccatcccaggccctctatcgtccctcagtccgctgccggtgccggtgccgcatcgggtagttcagcggcggcggcgctgctgatcaggtggtgcccaggccgtccacggaccgagccctctcgtcctcgtccgacgcgagggcaatcacccacccgggacgccttccgaagcggcatccctcctctggccaacgtcccagcaacgaagctcactgatgcgatatggaacaactgcttcctagacaagctcgccttcaggtatcgaagtcgaaccaaaggaggttgaagccatggccctcatcgtagctgcagctggaggaaaccttcttgtcagaaagttggtcaatttaactccctcgcaaggatcagtaaaggcaccaaatccacatggggactccatccgtgacagtgctaatatgtatgcaatcttgctcgccaacgagcttctgagcatagagttgcagtggcaggatcagcgtgacactttggaactgatcctgggggtgtgggtggagatgtcgttgtatgctgcggatcattgcagccaagagtcccatgccaggcagctcagtaatggctgcgaattcattaccatcgtgtcgttgctggcacaccacttcaagtactactctggggccttcaggggcgccgacaaccttggagaagataaacccgctagtgaaaataaacccgttactgtaaataatcccatgagtgaaaattgtgggaacttggtttagatgagttcgcacaattttcatttgaaatgacctctctgtcagttcagggaaaaacctgaggattcatgactccaaacaagagtaaatatatttatctgtcgatgaacatagtaattaaagtgctaggattcatcaatgttagctttggactctacattcaacagtttgtaaggtgagtctgactgtgtgtgtgtgtgacatgctcatatatcttccatgatcaaggtaatgatcggcgttgagtgtgttgctcaaccgccattatacaatatgcaattattattagataattatcaacgag

SEQ ID NO: 33662 - DNA, 2236 bp, Zea Mays
ctttccctgtctttcccactgccttcaactcagccctttttaaccacccacaaaggccaccactgcttcacactcacacgcacacgtatagctcgatcgctctctgtgtccgctcctcctgcctcctgcacacacatacactcagagagcatagtagcagtagccagtaggatgatgatgaacaccaacgcgatgtcgccgacagcaagtaccgacgccgacttctcgttcggccccttgcagccctacgtcggcttcgacgtcgccggcatgggcatgcccagcgtcgtcgtcgagaggtcgtcgtcgctactgcagcacaacaccagcagcagcagccacaacaacaacctagggctatacgacagtttcgacttcgcggccgccgcagggttaccgttccaagaatctggtctcctgcccccggcgagcctgccgctggcgccgtcgccgcaaagcatggcggccatggcaatgccaccgtcgtcgctgctgctgacgctcccaggcgtgcctgcggcggcggatgtcgtctataacccctttggtggcggcggcgcgggagggttcctgaagcgggaggacggcggccccctcgtggacgctgctggaggcggcgggaggatcgggctgaacctcgggcgccgcacctacttctcccccgcggacgtactcgccgtggaccggctgctgacgcggtcgcggctggcgggtggcggcgtgggcgtgggcctgggtatgggcctcggcatgggcgtgctggggctcggcgccgcccaccaccagcagccgccgccgcggtgccaggccgagggctgcaaggccgacctctccgccgccaagcactaccaccgccgccacaaggtctgcgagtaccacgccaaggccagcgccgtcgccgccgccggcaagcagcagcgtttctgccagcagtgcagcaggtttcatgtgcttgctgagtttgatgaggccaagaggagctgccggaagcggctcaccgagcacaaccgccgccgccggaagccgagcagcgcacaggacgaggactcgtcaccgccaccacccaagaaactggatacttgcataactaatactgcctcttacaatgatgatctcaagagtaagaaactttataccattcgacaaaaagatgcaatagctactacatgcactacttcatcacatctgaccctgacgacgtacatacacatgcactcatgcatgcatgcaaggcgccaaagtttcgacgtcgtacgtgtgctcgtgtgggatcaatatatactgatgcatgcatccgatcctacgctacacatatatacagatagatgcaaattaaccccctgctacgtgcatgatcagatcgatatatgctgcatcaatgtgcttcgatcactatatatactttcgctaactgtttattcttgtacttgtacatgccgcgcctggctactagtagctacgtcctgacatgtctcatcattgtatgtacgacgagcgagcagcaggcgcgagcaacacggcagctgcggccatctcgccgaacggcagcggcgtcagctgcctagacgtcatggacaacggccagacgagcagcgcagcggcgccgacggctctgtctttggccgccccgccgccgccgccgctgcacgagaaggacggcagtctcgactcgatgctgatgcagcgggtcctgcagggccgacgggaggacgacgacgacgaacagcgtcgccacttcatcacctcgcttgtgatgcagacgacccagcagcagcacagcggcggcggcggcgccggcaacatcttgtcgtgctcgtcggtatcagatcagcacaacggcggcggctgcaacggtttctttgaggtggacttcatctagtgtataatcagatgcatgacgtgaggaaagcaagcaaaaacaaagctgggttggtttcactgtagagcggctagtagccttttcttttttactgttgttcttagtacgacttgagctagctagctagtggttggacttcttttaccagatggaaatgcttgtgtacgtagtatgtgtattcctttttcctattgcgaaaaatgtaaattattattacgtgtatgtgtctgagttatactacttattaagcaatatagctagggtgtattattgtacggtgcatgatatgtatctgtgtttcttttgctttttagatggagtaataatctcaattcaaatataactttgtatttcctg

SEQ ID NO: 33663 - DNA, 1741 bp, Zea Mays
ccaggctgaaacgaacgaactttagtggccaccaggtttcatttcagagccggatctataacagaccaggttccagtgaaccacccggatccactctatatggaccagaaataaatacatgtctgttttcaaaccaaagcaaacgaacgcggccttaaagttcttcaggccctggtgtagcagctgaactacctagtttgatggtgaagaaagagctctaggtgatctaaagatggtgatgagataaaagcaccaaaaagtgtacagtgggatagcaaggatatgactgtcatgatgcctcagcgccaccgggctacggccaagaagcccatgtggataatcgtgctcttgtctatggtttgcatcatgttgattggggcttacgtcttcccaccacggcgcttctctaagtgctacctctctgcttcaagtgtatgtacgtctttcaaggattggctcccttccatgggccatcgggagcgtgctgacgaggagattatttcatctgtagttattagggatatcctttcaatgcccatgcctatgtcaaaaaatccaaagatcgcccttatgttcttgacaccaggttcattgccctttgagaaattgtgggagacgttcttacagggacatgagggaagatactccatctatgtgcacgcatcacgtgaaaagcctgttcatactagttctttgtttgctggtcgggatattcacagtgatgcgatagtatggggattgatttcaatggttgatgctgagaagagactattagcaaatgcactggaagatgttgataatcaagtttttgtcttgctttctgacagctgtgttccgctgcattcatttgattatgtgtataactacctgatgggaacgaatgttagcttcattgattggtccacatggcagtggaaggtaccctattgagatgtatcctgaaatagacgagagtgattttagaaagggtgcccagttacgaggagacatgctttaatgattctggctgacagcctgtactacaagaagttcaagctatactgcaagccagcagaagggcgcaactgtattgcagatgagcattatttgccaacgctgttcaatatggtagatcctggtggcatctccaattggtctgttacacatgtggattggtccgagggaaaatggcatccaaggtcatatagtgctgacgatgtcacttatgatctcttgaagaatattacaacaactgatgagaacttccatgtgacaagtgatgacaagaaacttgtgatgcagaagccgtgtttgtggaatggatcgaagagaccgtgctatcttttcgccaggaagtttaatcctgaagcactcgataacctactgaagctgtttacaagttatacatctgtttgagcctatgagtcctacctgattctttgccttgggctttctaatcccacatttttttctgtttatatgtaaattgggaagcccgtatttattgggatctgggcctaaagatatcggtacaactgcaacagctgtgatggcttggagtacagtcctgggtaaatggccacaacaatgtttatagaatgacactgccctgagtgtaatttgtcgtgttcaatgtatgtctccatagtcttccagccaactcctaactcattagttctctattcttggagaacagttttttttttgtcagaatgttatatgatccattctttgtagacacagagattacaacagatgtacc

SEQ ID NO: 33664 - DNA, 1862 bp, Zea Mays
cctactccggtggagtccacctccactcctccagcgagtcaccactgggcactggccaccgccacctcggccccgctcctcacgttgtcatccgtccacactgcacccgctcctctccgtctccccaacagtttcattcctcgagggggatcgcttgtcggcggggaagcaaagcttagttcttgacgcccaacctccccgttgcctattcgcctcagtggcaggagctttgcctttcaattagtagaatggtcttgatcaggtttataagggaattaggcccgaaaactgtacaggcacgctgtttgtttgaaggaaaaccaggaaaaaactcaccacgtcaacccagatgacaaaccctggcaactcacatacacataaaggacacccaatggagcccaccaaacgtcatcattgccgagcttaccacaagcagcaataagaagctcttgcttcccactgtgaacatcagccaaggaccctgtcatgccaccgcaaactcacaacaagccttggcctcccaagaagtgatcgtggcatgtcatcattgttgagcttcgttgcaccaaaaatgaagcagctctgactccaccactgcagatcaccctctaggagagccaaagacgcaccacaagcaagcaacaaacccgaaagagctttacttcgtcgcaaattcaaaggcttgcagacaaatcgatgctaggcagacgggccaaaagcatgaggccgctacaggccatcgttgccatgctcaagcgcatcatgaagaacaactccaatttcctacctcgaacaaaaaacactccccctggcagctgcacaaacatcaatagaaaccccaagtcgtcgatgaaggagatttcatcctgtgttatcgttgccaagccatatcccttgacgcaacagctttgacttcacgctacaagaccaatccccacacgtcaagcatgcatggagaagtgaagggcaaccaccaaaggtgacatcaattgatgtctagaaaaattccaatagcaacgccttgaggaaggccatgatagtgccaccatcgctcatccaaaaaatgtatagagttctcacccttggaggacaagggcgaggggctggagaggatgccccccctgacagcagggcaggagaggtgccgcctgagtcgcccaggagagcgactggggccctggggaaagaaaagggaatttgggaattatgtctctttgaggggaatcaagggacttgcttttacttgtctgggctccatgtctaagtgggagccagtcacgtttcaggaatctcttagctttgttaagaaagtaaaggcacgtgactacatgctatacatatcattgctcgatgtgctcaaccggaatgatcaaatccctctgcaagcttacagcgagctctcgcttctgtttcagcatcacgaagatctgttagcggagctgtcgaagttcaggcccctcccatgcccaaacaacgtttatacacacggctcgatttggatgatcatattcctcatgccttttctgctcctgagccttgtcctcgccttgagaagccattgaagtgtttcctgctccatagactgttgcgagcctaaatgatttgtcgtagcactaacacctagttgttgtatatagatatatggatggggttctatatcctgtaatttctttatgatctccttgtacgctcgtgcgcacggaaataatcgtacaatattatttcagtcgcggcagtctggcagtatgtaaagcctaaacagagatcgtttgacctcgtccaatcggaaattcagctttgtacagagaatttttggtttttttagtctatatacagtttaaacaggtatgaacgacaaggag

SEQ ID NO: 33665 - DNA, 3578 bp, Zea Mays
actgccgcggccgtaccccgccccgcatgctgcccggaatcagcgcctccgccgccgcagcccttccagaaatctccatcccgaatcctccgcgcccccgcctgcccccgcgcatcccgcagcccccgcccccgcgcatcccgcagccttggcgtcgtggccgccgcctctgctccctcctccatcccgcgcaacaacgacgaccgtcggggcctcgcctggcagatcaagcggggaatccacccgccaggcgtctccctgacagtggtagacggtggcggcgatgggggccgagagcgaggatgccccttccccatcctctaccctcccttgcgattccagcattggtgcccgcatccccgccgtccgaagcatggcgctcttcgtctcctccctcgccgccgccctctcccacctctccctcccatcgacctccaaccccaagcctcacccagcctcgctcctgcgcctgcgctccacctaccgccgcgctgttagcctcgcggtggccggagcaagaacggcaataggatgaagctgctgctgtccaacccctacggcttcagcagcccccgacatcgtgtgtcgggatctgggactccagcggcaaggcgaccactatgccgcacgggcgcggtgcaggagctcctccagcggcgccgcaactgcctctgagccctcatggtccagctcgagtgctcgacgcacccgctccgcacccgcccttgtcccccaggtgtcggcgtgcgggattcggtaacggtgttggagctcatccagtggcgccgcaaccgcctccgatccctcaaggtttggctcaaggctgatggccaggtcgaccgtctcctccatgcgcaggggaagaggaaggagctggagcagacggtgaatagcttctctgatttctccctctccggtcctgttgcaaagagccacaaactggttaggatgtcttggatcatcagacagatcagcatgacttgcaagcagctagctactgtttacagatgtcctctacttgccaaaaaataacaaaggggttctcgttcttgaaagctgcatagatagcacctcaacttggccactaaaacaactaagtttttttatggacatgtctgatgtttttctcaataattgtgcaaattttcctttcataattttcgtcgtcggggggcaggaaccgggcggtgtacgtgctggcgcagtgcacgctggacatgccgccggaccactgccgggcctcctcgatggagccatggcagagagcggcgacggaaggtcagcggcgacaagatggacgtggcggtcttcggggcgcggtgcaccctgcggtatgagatggacctgcagttcttcaatgtcactggcaacagcaagatgctgtccctatatttttacagatatttttaataatgacctcagtggaccctatgcatttcttgagccaccttttgttcaaagatcccttctatataagatacaggcaaggagaaaaaatagattaatcggtctcgaagcttctgatacactcagttctcacatgtcgcatgaaatggacctcactagaaaccaaacacccttgaatcgcagtcacccacgtcgccaacaggagtgacttcctcaccctgctccacgccctgccgccgcagagcgggagcggcggctgcgacggccgcggtgctggggaggaggatgcctccgcgctcgccaactccctcgacgcgctttgcaaggcctgcaagcctgaggtgcgtgtactcactccttcactcgtgcgcaacttgttccttctccaacgtgttccagaacaccacagcatgcctctgtccacatacttcattggttcttcatttaattggaattcaaacaaggatttcggtaaatatgagtgtcaacttttgctttgcattcttctgtatagtacaacacacattgtttcttgcatttggaagttgttggtctcatgtaggacacagtggcgccaaggttccagactgtggcgggactgggctctgcagccgctgcaaaggagagtgcttcgtcttcaagcaactctcgaaggagacggccaccaggtcacacaaggccgccaagaacatggccaccggatacacttcggggctgtccaccaatggacctactgcaacaagtactcctccacccgcgtgcctgcataaaatggcaggggttctaccaacaatcaacacacatgtgaagcgaagctgggacgtgcatgtatgtggatccacgacacgtgcatctgtaggaaccctgattttggtatggtttctacactcaaattcatcagtatgatataaggcaatctgctggctggtatttaagagtggccctctcttcatatcatcgaaaggtaaaactattagtggcacacgttggttttttcctttgtttccaacatgtaacattatattaggggtatgtgcagtttagggtaagtaatatactcctttgtgctcagtaagtaattgatagaaggtagaagaaggtagaaacatatgtgcagtttagagtttacctctttatgatttctgggtagccacaatattttcacattgcaattcaagtccttagtaccctggtaatcaaactaacatgtcagagcatcaggcaaattcattgtgcacctgcctattgtatgctaaagaaatcagtttttttgcatgtgttagttgtctcctaacctgctgcattttcaatttttgtgttctgtgttttgtaatttgggagcaccttcaccattgtgttattagagctaggcaccttcaccattgtgttattgatgatctttcttggtctgaatggagtttttgcacctattcacatgccagagagtttatgcattgtcctccttttttggatacactttctgttaaaaaatgctacacagttgcattctacttaccttgtgattttgatggagctctgttgttgtgcttctttgacatttgtcggtcctttgagcattaggtctgcatcatgcattatgttgttatctattgatctatatatcccatattgtggagatcactaaaatcttagtaatttaagttctgttcaaactttcaattccatcgtccgtgaaaaattgataagtatgaatgtgttgacttgactccattttatcttctccttatttgagcttgtattcttattttttaatacattgctgccctgcactgagatttctattgtaaataaacaaagtgctatttaaattttgatttattccttacgaatgtctgttggtttcaggaaagtgctgagagaggtggcatctagaggatgtcatgtcgaacgtgtgaagtttttttagaaatatgtatatttgtgtgaagctttttagaaacttggctccattttattttctatgttcctctcggctttgtttcctatcctttccaatgacttgctatgcatttgcactgtatttggcatgtctaaaactgctacacaaaacttgatatatattttgtctaaaaatactatatccttgttatgcttgattgatctttattttgtctgctcttctattcttgtgtgggtctatcaagaatgag

SEQ ID NO: 33666 - DNA, 1230 bp, Zea Mays
ccaaaaccagcagcacgccgacacgccgccgcgccgcgccgccattctcccatccgcccccgtgcccccgccgcccttccctaacctcgccgcggaagacgtcgcgccgtgcgtagctagcagttccccgtcgcacgcgcgtcggataagaattggttttggctcttcgtctccccccatccttgggtccttcccctcccactccctcttcgcctcgtccgcggcagtaggctcaagcttaggaactcgctaccgaggatcataaatttctctagggatttggcatatccgcgagtgagcagaattagttggaggcttcgtgatggcgggcgcgaaggcggatgtagacgcagaaacaggagatggcagcggggtcggcagtggcggcggcggcctctttagcgagcagatgctgattgataagctcaacaggctcaacaactcagccactagcattgagacactttcacaatggtgcatttttcaccgcaagagggccaaaagggttgtagatacatgggaaaaacagtttactagttcaagggaggagaagaaaataccattcctctatctatcaaatgatatcctgcaaaacagtaaacgcaagggggcagactatgtggatgagttctggagggttctacctagatccctgaagcatgtttatgaaaatgggggagaggaagggaggaagcaggtggcgagattgatattaatctgggaccaacgtaaagtttttgggactcgtattggaagtatgaaaaatagcattcttggtgacaaccctcctatattggataacaatgtgaatagtttaaatcctagctctaatcccacttcaaattccaaagctgcacggaaggattctggtacagtagtaaaaaaactcactgttggcgggatgcctgaaaagattgtgtctgcataccaatcagtgtttgatcaacattttgatgaagacacagctctaaacaaatgtaagagtactgtgggccttttggagagaataaataaagatattaacgatgctagcatcaacggtaatcagccagcatcatcattgatctctgaccttcaagagcaggaaatgaccttaaaacagtgcatcgaacaacttgaaagtgcaggagtcgaagtcaataattctccgtgatcaattgcaattcttaacttttttgaagtactgagcggagatgcagtaggcttgagatccataatttcaactctagc

SEQ ID NO: 33667 - DNA, 1430 bp, Zea Mays
ataatgtttgttgaaagaaaatagagaaaaggtgggaataatccttctctcccttccttatcctctccccacgccactctccctttcatcttcccaccgccgcccctctccctggcatcttcccaccgtcgctcctctccctagcatcttcccaccgccgcacgccctctcttgggtgctgcagctcgccccccccctctgctcaccatctcctccctcgttcccatggcgccctccccttcttggtggctgacgcccctccctccatggagctcgcctctgccatgaccgccctctgcccccttccttgctgttcttattgcagcccctctccatgccaagctcgccctccttctgtgcccagccctagctcgccccagcccctctccctggctgcccttgctctgttttcccccagccctagccgagctcgcccctgccctaagttctcaaggcagcccctctgtttttccatggtcggcaccctccccatcttttgtagattggaagaaaggattcttgtgagtgtgagaagaagcaaatcccagcataacgcatgctaggtgttcgacgaaatgttcgaattgggattgtcgttgatattgtggatctgagtcgcgctttgtattggtgtgtcgtggtgaatatctctagatccgcgactatgtctgtgtgttttgttctatggtgacgtcaggaaagtatctttcctctctttcccttgtctttgtgaagctttgttgtatgccatatgtttggtgaatgaatatgtatagaaggattaaattgtttaggcatatgcatagcatgaataaaatgagttcttcttgtgtgatgatatactgtatggaatgtgcttgattggatatatgtgtatgcaaagtatgattaattagttctttgtttgcatgaagtgagagtagatttaaaaatactaggttacatgaagtgaatggaatcatggttataatgtataagtaatctatatatgtgattaggaagtgtcaagcatgaaagttgtagaagtaaatatgaacccaattggaatgtttgctgtttggactgcgtgtacagttttgattgtgcaactaatctagtgaagcaaatcatatttcctgtgaaaatgttatatataaaagttgtagataacctccttatcttgctcatgctaaaatttcattacaataggcccaataatctgaaagttttgcttctcccaagttcagtatcaaaatctgtccagattctgtacagatttcgaaaatggccttgtttgcccaagttaaacttagaatcagttcttataaattataaagaagttgtagtacttttcttaaactttccaacaagttttggatcaccctttttggtggtctagaagtcaagttatggttgattgaaatgtgatgactgaatctgtccaaatctgg

SEQ ID NO: 33668 - DNA, 208 bp, Zea Mays
ctttttctttttctttttttctttttttttctttttttctttttttgtttctgtttttttacataaccgaaggagaaaaacaaggaagcggcgttgactcagtttgtggcgtgatcaaacgggagatggtggcggcgcgctagggtttgaatggtgaaaaaacacaatgcaaccagcatcaaatgacgcgcaagcacacaaattcaac

SEQ ID NO: 33669 - DNA, 1125 bp, Zea Mays
agcattatcggcgcatgtccacgttgattcatcaatcagttccacaatccacttgcctcggccgctatcgtgaccgggaacaacaactgcgagatggccacggtggagacctcgggcacggcgatagggtcctccgggagatgggcactacacggcaagacagccctcgtcaccggcggcacccgcggcatcgggcgtgcggtagtggaggagctggcggcgctgggggcggccgtgcacacatgctcccggaaggcggaggagctcggcgagcgcatcaaggagtgggaggccaggggattcagcgttaccgggtccgtctgcgacctctccgagagggaccagcgggagcggttgctccgcgaggttgccgaccgcttcggcggcaagctcaacatcctcgtaaacaatgtaggaacaaacataaggaaaccaactactgagtttactgcagaggaatactcgtttctgatggctactaatcttgaatctgcatatcacttgtgccaaattgcacatcctcttttgaaattatctgggtcaggcagcattatattcatatcatctgttgctggagcgataggaatctttagtggaactatatatgctatgactaaagctaaccaagaatttagcttgtgaatgggctaaggacaacataagagccaactctgtcgctccgtggtacatcaccacttcacttacggaaggaattttggcaaataagaactttgaggaacaagttgtgagtcgaactccgcttggacgtgtcggagaacctggagaagtatcggcacttgttgcttttctttgcatgccgggttccacttatattagcggccagacgattgcggtcgacggaggtatgactgtgaacgggttttaccctcccaagccctaggcggcagctgccatgtttctttgtgctgaggaaacgacaatagctgttgttcttggttgttgagaaaaaaaatctaataaaatgtatgtaaaggtaaggttgtcatgttgatactgttcattacattacataattctatcagggcaatgtgaagaacgttgtgtttagatctgaccggtgttagcaaccctgcaatgacgcgagctagctttgacagttaattt

SEQ ID NO: 33670 - DNA, 1188 bp, Zea Mays
aacgacttttccatagtcgtgctcgtcttcgtccacctcccgacccgactgagtagcaagcaattctccaaattagggtttctttccgcttgctttccagtttgcggcatcagtcggtggcgcctgcgatggagtctctgttcggccaatcgcagcggaggaggagggcgggcggcagcggcttcgaatcgctcaagcgtctgggtcacatctcacccgctgtgcagtcccacctcaaacatgtgtacctcaccctatgctccgcgctggccttctctgcactcggcgcgtacctccacatcctcctcaacgtcggaggcgccctcacgaccgtgggatgcgtggcctccatcgccttcctcatctccctgcccgcttcacgggaccaggagaggaaccgcttggcgctgctcatgtctgccgcgctccttcaaggcgcgtccgttggtccgctcgtcgaccttgttattgacttggattcgaggattctcgtcactgcgttcgtcgggaccgcagttgcttttgcatgcttctctggcgctgccatcatcgccaagcgcagggaatacctgtacctcggcggtctgctttcatctggcctctccattcttctctggctgcagtttgctacttcaatctttggccacaccagcgcgaccttcatgtttgagctgcagctctactttggcctcctggttttcctgggatatatggtgtttgacacccaggagatcatcgagagggcgcaccgtggggacatggactacatcaagcacgcgctgactctcttcaccgactttgttgcggttcttgttcgaatccttgtcatcatgatgaagaatgcacaggagaaatcccaagacgagaagaagaggaagaagcggtagctgctgaatgaattggatgacatatgttgttgtggtcactacttcatagtaccgtgtactcctatcctattgtactaataataataatagtaagacgaaagatgactgctgggaatgaatatttggttctgctatttttgtgttgattttctactgatgatggatgagcttgctggtgttgatttgcgggcctcctgagctgcgaacaagcaagcatgacatgatgtagcagcagcagagatttccatggggtatgaacatgacaatatgacatgataataactgaataaatatgtggaac

SEQ ID NO: 33671 - DNA, 6596 bp, Zea Mays
gggtaacaaagcctagcaaaacctttccgtccgttactgctatagcgttcatcatcccattccttccccaccaccacctcctgcttctacactactggactgctgctgctgctctccccctcccctcccctcccctcccctcccggccgccgccgccgccgccgcgtgttctctctcatctagggtttcatctccatctagtcgagcattcccgtgctggggtggggagtgggagactcgactcgatttgattcgactccatttcgtgctagcgcctagcgctgcagagcgagtgaggtgacgggaatggcggctccggggcggaggacggcggacgtgtcctcgtcctcgccctctccgtcccctgccgccccctccaccggcaggcgcctcctgcgcacgcagaccgtcgccaacctcggcgagtccatcttcgacagcgaggtcgtgccgtcctcgctcgtcgagatcgcgcccatcctccgcgtcgccaacgaggtcgaggttgaaaacccgcgcgtcgcctacctctgtcgcttctacgctttcgagaaggctcaccgcctcgacccgacttccagtggccgtggtgttcgtcagtttaagaccgcacttctgcagaggcttgagagggaaaatgaccccacactgaagggaagggtccacaagagcgatgctagtgagatgcaacgcttctaccgcgaatactacaggaagtacatccaggcactgcaaactgtcgttaataaggatgaccgtgcgcgcctcactaaggcataccaaacggctgctatcttgtttgaggttttgagggctgttaatgattcccagtccgttgaagtcgatcaagcgattttggatacacacatcaaggtcgaagaaaagaaaaagctgtttctaccttataacattctcccgctcgatcctgaaagtactggcgaagccattatgcgatatccagagattcaagctgctgtttatgctcttcgcaatactagaggtctgccatggccaaaggaccaagacaagaagcctgaagagaagaatactggcaaagaccttcttgattggcttcaggctatgtttgggtttcagaaagacaatgtgtccaaccaaagggaacatttgatactgttgcttgcaaatgttcatataaggaaaatacccaaggctgaccaacaaccgaagttggatgacaaagctctggatgatgtaatgaagaagctatttaagaattataagaagtggtgcaagtacctcggccgcaaaagcagtttatggttgccaaccatccagcaggaagtgcagcagcgtaagcttctttatatgggtctctacctgctgatttggggtgaggcggccaacttgagattcatgccagagtgtatttgttacatctaccatcatatggcttttgaactctatggcatgctggctggaaatgtgagcccaatgactggtgaaaatgttagaccagcatatggtggtgacgaagaagcctttttgacgaaagtcgtgactccaatatacaaagttatagagaaggaagctgaaaggagcaagaccatgaaatcaaagcattcacattggagaaactatgatgatctgaatgagtacttttggtcagttgattgtttccggctaggatggcctatgagagccgacgctgactttttcaaaactccaaaagatccttatctgaatcatttgaatggagagaacagatctgcaggcaatgtccattggatgggaaaagttaattttgtggagatacgttcattttggcacatattccgtagttttgacagaatgtggatcttcttaatattgtccttacaggccatgataattattgcttggaatggtggaacaccaagtgatatctttgatgctggcgtatttaagaaggttttgagcatatttatttctgcagcaattttgaagttgggtcaagcaatcctagatctcgtatttggctggaaagcaaaaagaagcatgtcatttgcagtcaagctacgatatgtcttgaaattaatatctgctgctgcatgggttgtgattttaccagtgacttacgcgtacacttgggagaatcctactggtcttgcaagaacaataaaaagctggcttggggatggtcagaatcagccatctttgtatatactggcagtagtgatatatatggcaccaaacatacttgcttctatgctatttcttttcccatttatgagaagaatcctagagagttcaaatgttaaggtcataacgatcatgatgtggtggtctcagcctcggttatttgttggtagagggatgcacgaaggtgcattctccctcttcaagtataccatgttctggattattcttttagcaatgaagttgattgtaagcttctatattgagatcaaacctctggtacagccaaccaaagatataatgagagaacctatcaggacattccagtggcacgagtttttccctcatggaactaacaatattggtgttgttatatcactctgggctccaataatcctggtatatttcatggacacccaaatttggtatgcactgttctctactctgattggtggcatctacggggcttatcgtcgtcttgatacgtacattaggaatgttgagatctcgctttgaatctttgcctgaggccttcaatgaacgcttgattccttctgatgcaaataagagtaaaggtcttcgtgctgctttttcgagtagacccaaggcttctggtgacgaaagtgagagagagaaaagagctgcaaggtttgctcaaatgtggaacgccattattacaagtttccgcgaagaggatctcatagacaatagggagaaggatctgctactggttccagactgtaaagaccgtgaacttgatatattccaatggccgcctttcctacttgctagcaagatcccaatagcactggatatggcagcagacagtggtggaaaagaccgtgatctgacgaagaggataaagtcagatccatacttttcctttgctatcagagaatgctatgcttcattcaagaacatcatcaataccttagtatttggtcagcgggagaaagatgtcctagtacagattttcacagttgttgataagcatatagaagaggaaactctgataacgggtctcaatatgaagaaccttcctgcactgagcaagaagtttgttgaattacttgagttactgcaaaaaaacaaggaggaagacttgggtcaggtagttattttgttccaagatatgctcgaggtggtcacgagggatataatggaggaacaggacctgctcgagacgttggattctttacatggtgccaatagtagaaaacatgaaggaattacaccgctagatcagcaagaccagttgtttgctaaagctattaagtttcctgtggtggaatcaaatgcatggactgaaaagataaagaggcttcatcttctgttaactgtgaaagagtctgctatggatgttcctattaatcttgatgctaggcggcggatatcgttcttcgcaaattctctatttatggatatgcccaatgctccaaaagttcggaacatgttgcccttctctatcttgactccttattacaaggaagatgttctgttttcattacaaaatctggaagagcgaaatgaggatggagtttccattcttttctacttgcaaaaaatttacccagatgaatggaaaaatttcctcgaaagggtgggctgcaagaatgaagaggtactccgtgaagatgaacagctggaagagaagctttgtctttgggtgtcatatagggggcagacattaacaagaactgtaagagggatgatgtactatcgaaaagctttggagcttcaggcttttcttgatatggccaacaatgatgatcttatgaaaggctacagagcaatggaagtaatgtctgaggactcaccattaaagactcaatgcaaggctatagccgacatgaagtttacatatgttgtctcatgccaactatatggaattcagaagcgttctaatgagccttgcgcacatgatattttgagactaatgacagagtatccatcacttagggtcgcctatattgatgaagttgaagcacccagcaaagatagaatcaagaagattgaaaaggtttactactcagtgttagtgaaggcttctgttacaaaacctaatgagcctggtcagagccttgatcaggtcatctacaagataaaactaccaggtaatgccattttaggtgaaggaaagccagaaaaccagaaccatgcaataatattcacccgaggcgaatgtctccaaactatagatatgaatcaggagcactatatggaggaggctttgaaaatgagaaatctgctgcaagagtttgagaagaaacatggagtgagacatccatcaatacttggagtcagagaacacatatttacgggcagtgtgtcatcccttgcttggttcatgtcaaatcaggaaactagttttgtgacaattggacaacgagtgcttgccaatccactgagggttcggtttcattatggccatcctgatgtcttcgatcgtcttttccacgttacgaggggcggtgtcagtaaagcatccaaaattatcaatcttagtgaggacatctttgcaggattcaattccacattgcgcgaaggcaatgttactcaccatgaatacatgcaagttggcaaaggaagggatgtaggtctcaatcaaatatctctgtttgaggcaaagatagcaaatggcaatggcgaacaaacgctgagccgtgacatctaccggctaggtcatcgctttgatttcttcaggatgctgtcttgttactacacaacaattggtttctacttcagtacaatgattacagtatggactgtatatgttttcctctacggccggctatatcttgtacttagtggactcgatgaagcactggctactggaaagaggtttgtgcacaatacacctctccaggttgctcttgcgtcagagtcttttgtgcaacttggatttttgatggcgctgcccatgatgatggaaatcggtttggagagaggattcagaactgcattgagtgattttatactgatgcagcttcagttggcctctgttttcttcacattctcgttgggaacaaaaactcactactacggaaggacgttactccatggaggagcggaatacagagccactggacgtgggtttgtggtgttccatgccaaatttgctgagaactatcgactttattcccgtagccattttgtcaagggccttgagctgatgattctactagttgtgtatgaaatatttggtcagtcatatagaggggctataacttacatcttcatcaccgtatccatgtggttcatggtgggcacttggctctttgcaccattcctgttcaatccttctggatttgagtggcagaagattgtggatgactggactgattggcacaagtggatcagcaatcgtggaggtattggtgtggcaccagagaaaagctgggagtcatggtgggaaaaagagcaggagccccttcgttactctgggaagcgtggtactattgttgaaatactgcttgcattgcgtttctttatctatcaatatggactcgtgtatcatctgaatataacgaagaagataaccaaggataaccagagtgtgctggtttattgcttctcatgggttgtaattttcgttgttttactcgttatgaagaccgtatcagtggggaggaggaggttcagtgcagagttccagctagtgttccggctgatcaagggtctcatatttataacttttacagccatcgtggtaatcctaatagcaatccctggcatgacggttctggacatctttgtttgcatccttgccttcatgcccactggatggggtttgctcctgattgcccaagctatcaggcctgtgattcaaaagatcgggctgtgggggtcgatcaaggctcttgcccggggctacgagatcctaatggggcttctcctgttcacgcccattgctttccttgcctggttcccgttcgtgtccgagttccagaccaggatgctgttcaaccaggccttcagcagaggtctgcagatctcccgtatcctgggaggacacaagaaagaccgagggacgcggagcaaggagtagtagggctgctgattgaaggtccgtctatcgggagttatgtcgtcctggagcggtctatcaggttcagagaatattagggtccgtatgtatgtatgtgtgtgtcgcacctagcaccagtagtatgtatgtatgtatgcgtatgtaggttcagagaatattagggtccctatgtatatgtatgtatcaggattgctatggtcttttggattggaagatctgagatttgctggtgcaatggccagtatctgacatccaaatgttgaaactataattaggctctgctaatagttagctaacttacagctaacaattagtttattagctggcttacgactaagtagtcagattaaagttgggatgtcggtcgccccctttaggtttagttaggctcgttccaatgggtggcgagagc

SEQ ID NO: 33672 - DNA, 1703 bp, Zea Mays
gttgacagatgaaacaatgcccaggagggagccgaaggtgcaggggccagatgccgggacttcgtcgaggccaggtagtatggggtgtcgacaagacggatggatttgaggccaggtgtggcggtgggtggcagccaggcaagggccagtttgcaatgactcatcaagcagctttggcaagtgttacagcacaggcacaaatgcacttgcagtcaccaactccatctgcatgttcggaagtgccatcaagtccattttatatgacaccaagatctctagtgccattgcagcattcaccatcagtaactgaaggaaatatttgtacaccaattgctgacaagtcattttcatctgattcaaaatcacaccatgttgtaaatatggtagctgatggcttcaactggaggaaatatggtcagaagcaggtgaagagtagtgataattccaggagctactatagatgcacaaactctggttgtctcgctaaaaagaaggttgagcatttccctgatggccgcgttgtggaaatcatttacagaggagcccataatcatgaaccaccacagaagaccagatttgcaaaggaaagagtgactcctattagtgttccctctggaggcgaaaccttgaggcttgtgaacacagaaattgtagaatctagcacgcctacctgtgaattggaacggagtgccatctcagaaacttctgagcagcatctcttttgctcaagtgactgcgaaggggatgctggtaacaaatctgaagatgaacatcctagcgcggaagccctgccaaagcgaagaacacttgaggctacagcaccaaatttaacgccggttcgcagaactgttagagagcaaaagattattgtgcaggctggaaagatgagtgatggatacagatggcgtaagtatggacagaaaattgtgaagggaaatccaaaccccaggagttattaccgctgcacgcacggtggatgccctgtccgtaagcatgtggagaaggcgccagatgatgttaacaatattgttgtaacgtatgaaggcaaacacaaccacgacgaacctttcagaagcagcagcataccagtttctgtaatcagtccatcagcgacagccactgagcaacccaacacatcaagtacgtcagatgagagacctccaaccattacccagaaggacgccaacagtgagtctgataaggagacaaccttgaaatttggaggcgagaaggcactcgaatctgcgcaaacgctgctcagcatcaaaactaactccgatgacatgaagaactctgtcctgaaggaaacttctgctgcagttccagtccaaaacaattgagcatgctgagatagggtgattctattgacatctcttaggctgtcatatttattggttgagtgatatgctattatgttaacttgtatgacgtgaggcttggtgttcggtattccgtgtggagcatttgaggaagcattaggtttcaggaagccacgactggttgtttctgcctgtatagattcccattccctagtgtgtacaggtactgtattttatctgaggccagataacatgtgtggggtggttcttgagaacctgtgtgtgctgtattgttctagctcgatctattgcaatagctgatacgagattgtcatttatttatcggtataacacatcgtgcgtgccgtttgcagtttgtgatag

SEQ ID NO: 33673 - DNA, 2555 bp, Zea Mays
aacaaatgctgtttccatctgcctgccctctttcagcgcgtgcccccgaatgttccttccgaaagcaccgcgctcgcctacagatcacgacacctcgcaccgccgctcccacttccggcctcgccggtgcgtgcatgtgcgcgccagggacgccaattgagctcggctccagcacgcaatcggctgcagagtgagctcagagctcaccctctccctctgccgctgctccgctggcctcttgaattctgttcatggttcggggatcaagaccattaggccagactatttcaaagaaattttcagacatgagatactccaatatttcctggccattccttctactgctatgttttgtttcgatggcagatgcagagtacatgaagtacaaggatccaaagcaacctattaactctagaatcagggatcttatcggtaggatgacccttgctgaaaaaattggccaaatgacacagatagaacgccaggttgcatctgcaaatgtcatgaaacagtactttataggaagcatcttaagtggtggtggaagtgttccttctccccaggccagtcctgcaatttgggtgaacatggtcaatgaatttcagaaaggtgccttgtcaacgcgtctaggaattccattgatttatggaattgatgctgttcatggtaataacaatgtctacaacgccactttattccctcataacattggacttggagctacaagggatcctggcctcataaaaagaattggtgaagcaactgctcttgaagtgcgtgcgacaggcattcaatatacttttgctccatgtattgcagtttgcagagatccaagatggggtcggtgctatgagagctacagtgaggatcacaaggttgtgcagcagatgacagatattatccttggtttgcagggtgagatcccagtcaatcataccaagggagttccatatgtagctgggaaggataaggttgctgcttgtgctaaacactatgttggtgatggtggaactcataatggaatcaatgagaataatacaatcattgatgagcatgggctgctaagcattcacatgccaccatattatgactctatcataaagggtgttgctactgttatggtttcttattcaagcttgaatggtgtaaaaatgcatgccaatcatgacttagtcactggataccttaaatccaagctgcattttagaggtttcgtgatatctgactggctaggagtggaccgtatcacctcacctcctggcgcaaactatacttattctgtgcaagctggaattaatgctggcattgatatggtgatggtgccatacaattacactgattacattaatgatctcacttctctcgttcacaagggtgtcatcaatataagcagaattgatgatgctgtgaagcggatccttcgagtcaaatttacaatgggcctgtttgagaaccctttagctgatcttagttttgcagagcagcttggaaagaaggagcatagggaactggctagagaagctgtcaggaaatcacttgttctgttaaaaaatgggaactctcccgatcagcaattcctacctctccctaagagagctagaagtatcctggtagctggaagtcatgctagcaatttggggtaccagtgtggtggatggtcaatccaatggatgggggacagtggtaatatcacaactgtgattcagtatcctgtgcagggacaacaattcttgatgcgataaagtctaccgttgctgactcgacgtctgttgtctactctgagaaccccgatgacagtttcatgaagcacaatgacttctcattcgctatcgtcgttgttggcgagccaccatacgctgaaacagttggcgatagcaccgacctcactatgctagaccctggtccagacacgatcagaactgtgtgtgctgcagttaaatgtgcagtagtcatcatttctggtcgtcccattgtgattgagccgtatgttccattagtggaagcgcttgttgcagcttggcttccgggaaccgaaggtcagggtgtcgcagatgtactctttggagactacggtttcacaggcaagctcccgcacacctggttcaagtctgtcgaccaactgcccatgaatgtgggagacctacagtacgatccactctaccctttcggcttcggtttgatgataaattcatcattgccagggttctctggtgttgacaatctgggatataggaagcaaagagtgctatttgctgtgctgtgttctctactgtcattggttctaatcagttaatgaattgggcgtagatagtatttcaacacatagctgcccttttgtagttctcatatgattagagtgttactaatctagctttagcgattgttagctgccaaatgagtcactggacgtcaatcaatctattatctatctatctactagatgattccccgcgttttgccgagatgctgccattgattatattcctcctgctctgattatcactttggttaccttgtgcaaattgattgttcatgatgatccaactgaggtcccc

SEQ ID NO: 33674 - DNA, 2726 bp, Zea Mays
cagcctcccggaccggaagctccacgtggcgcgacagctcgtctctgtcgtctatggcggcggcagaggtgtactcgccgaccgcggcggcgcagcagcagagggagaaggcgacgtcgcaggtgtggcgggcggtggtggggtggatcggcttccttgttcaggttctgcttcagatcctccggggcacgccgtcctgcgcccaactctttccttcggcggcgtccggtacccgctcctcttcgggcctgcggcctcgaactcgtcgccggaggtggcctccgtccgtccagctctgaggcgggcccatggaaatcgttgccatatcagatcagcttcgccacggaccccatctgcgacccccggtgacgcgctccgcccacagctctgaggcgggcccatggaaatcgttgccatatcagatcagcttcgccacggaccccatctgcgacccccggtgacgcgctccgcccaccgcccaccgccgcccgggaatggctcgagcgctgctcctgctgcgagtagctgtagctcgctaccctcctctcccggcctcacccgcgctcctccagccgcagccgctgctgcgctgccacgcgccctcccagtacaaatcccagctccgcttcctctcctccctctcctcgtccgtgcccaacagctcagatgctcccagcgacggcgggggcgaccgcgacggggaagaagatggcgcgaagagtggcagccacgtcgattacttggggatgagcgacgaggagctcatggagcagtgcgatatgggcacgttcaaggcgtccggccccggcggccagcactgcaacaagcgcgagtccgccgtccggctgaaacaccttcccatcggcatcatcgcccaggctgtggaggatcgatcacaacataagaaccgagcgtctgctttatctcggcttcgaaccctgattgctcttaaagttaggaggccgataaacctggaagactacactccacctgttgagcttcttcagatattacccctgaagtccagcgttagaggaaatgatgttggcccccaaatcggtccaaataactcaaaattttctccaggaatgcaagcattattagacctgctgtttgctgttgaagattctgtatcagatgcagcaaagattttaggcctaagcaccggtgctttgtcaagattgattctgtcagatgattctctccgaacggccgcgaatgaactgcgagcttcgaagggcaccggtgctgtactacgtgctcctgacgttgcaggacagcgtgcacaaggtcttctacgccgtcgtcgaggccgctgcagttcgcgcagacaacagccatcttggagggttggcgaggtatccggtctctgcaactcttccacagattggatccagattattccttacatggggtgtcttctggagttttcctgaggtgattgactgactcgagaatttgccgacgcttgaagaaggacctaatgtgagcttttacatacttgatgaacagcttgagctcttgagcaaggtgctgaatgcaggggatgacatgattggtgttgagtgcttagaagaagattgtgatggcaaggttctatttgtttgaggttgcttcaccattccccaaagcacattgcatcttgttttagtgtttttttgattgccgtcgtcgaggccgctgcagttcgcgcagacaacagccatcttggaggtatctaattccaatattgtatgtctcggttgaacttgtgaaggcgttgcaagcacatatcattaactgggatattcatatgtttgatgaggagatcggcaataccactcagaatgaagatggtcaaaatcttgatgttttctttggttgcatccgcattctggactattcctgacagcatttaagtttttattacggttcaacggtcgtccagcgtaatccttttacaaccatgggtggcaagtttgaccatgcagatcgtttgttccaaagcattgagaacgcttacataaatagcttatcaaatacaagtgacgtcaaagagcttattccagaattcttttacatgcccgagtttcttgaaaattcaaattcatatcatcttggtgtcaagcaggatggggaacctataggcgatgttgctctccctccatgggcaaaggatgataactcaagtgacgagtttgacaaagattctattgagagtgatgatagatctcttgaagagctaagctgggagacactagaacttcttgtggtacctcatatattcagataattgggcaacggtgtgtgtatatgttcagattcagaaagtgaggacaatatagcgtttgcagcagtgtgccgaagatgatccacagccgatgctgttaacaaacacatacaggaaggtagaacttcgggtagtcgacgtgcataccctactaatgaagctggactagaccataaggagtcttcgaggctcatttcgtcgaagatagaaggaaaagaccactgtacccttggcatgtataatagtctaaatgtgtaggcttaagggcataattgaaaattcatcgaaaatgtatcccacgcctataaatagaggaacagtgccatgcattgttcagactttttgttcaagggtagaattcatttctcactatacgaagctgtaatctctctacccctctcattttagttttacgaagctcaaggtactcatgtgaattcttgttccataaaagaag

SEQ ID NO: 33675 - DNA, 449 bp, Zea Mays
ttgtgaggtccagtaaattcttgattttttcttgaatccctttttattatcaggtttatgaacattgaagtgaacttcaggcagtggagcagaatctagagggcggtgcggagcattctttaaagaagcttatgatgtttttcttactgagtcaatgtatgcataagctaataatatttctgaaaattattagagcgatattgctggtgcaacatcctatcctctggaagcatagtagatagaggtttctctatattatctgtctctaagggctctttctcacaaaacttcaactttgaacaaatactatgaagagcatgattgtattctgcaacagatttgaattcttgcagatgaagctgattccactcatgattggccgaaggtcatatgagttccttctgctgttcatagcgctctttacgagctttccataagttatgtgggca

SEQ ID NO: 33676 - DNA, 3710 bp, Zea Mays
ccgagcacgaacagagagagcctcgcccgccgtctgcaccggccttgaaagagctggagaagcgagccagcacccagcagagcaagaaagccacaaggagatactgaggacgcgaggccaagctcccccgacggcattagagtaggagggaggaggggaagcagagagggacggcccttctcgtcctcgcaccctgtgaaacgcggcccgcgaccgacagcagctcgctcgctgtcatctctcgagatctcaagcagttcgttggttggccattttctttttctttttttgatatacttgctagcttggaagttggtaaaagatgaactcaacacgccgagcttcaaaagcggcaaagtcaacaatcaattaccacaggttttcattagatgagcaccacttatttgagccagatgctttgattaccaaggagcgagatgccaatcatcaatcaaggcaaagttctcaatcttgcagaacatatgcatacagaagattgaccactccccagtttgtatctgcattgtctggaatctggaatcttgttggccagcctgaatcatctggcacagctcaaagatctagtattcatgggatttcgagtagggaagaccctgtgtgctttagcagggaccaacaaggaaatatactgacaccttgctgtgtggaaaactctagtggtctgagatctcaatactgtttctctacaccaaaagaaatttatgaggatcttatttacgtaaagaagaagatgttaacgctgacaccattcaataacattgttggtgcatcatccacatggatgcatatgcattccacaaataaggttgaaggtgcgcattatttgcaatttggaactatatactctgtgcaagctgaaaagatggaaaaaatcgagacttctcagaatagcaaaagaagcatgtgtgaggaaacttgtgctagttccaacaatatggatattagggacaatagctattcaaatcaaacaagacacatgcctaacgagctatttactatctcaaatgaagaagctagcagtacacatgattgtgaaagttctcggcacaatactgaatgcaatctagaaaaaaatcaagaagattctaattttttagcttgcccagtacatgaaatggaaattgccaaagaggtgaggataatgccagggagtcaggttttcagtaaggcgtgcacagatgctcagcttgacaaatcaaagcacatgtcttgtctggtgggtgatgctgttgttcttaattcagcaaatgcagatgaaagtgcttgtagggaggacgtgtgtctgcagctttctctagacaagtgttcacaagagctccaaccaacttttcagcatcgatttgatggtgctgttaccataaacaggcatgctgtggcaggagcattagctgggacagcagtcagtgtttctttgcatccaattgatactgtgaaaacgataattcaggctaacagttatggacagagttcagtctaccatacactaaggcgcacccttattgagagaggtgttctggggttatatggaggacttgctagcaaacttgcttgttctgcaccaatttctgcaatttataccttaacttatgaaacagtgaagggggctcttctgcctgtttttccaaaggaatatcattcaattgcgcattgtgctgctggtggctgctctagtattgcaacatcctttgtttttacacccagtgaatgcataaaacaacaaatgcaagtgggttcccattatcagaactgctggaatgctttagtaggatgcctcaaaaagggtggcattgcttcattatatactggatggggtgctgtcctttgcagaaatatcccacattccatagtgaagttctatgcttatgagagtctgaagcagtctctgttgaaatcagcacctgatagggccaaactcaattctggccaaacggttagttttttagacttaccttattaaggtatcattcttatacccacatattgacctgtgtaataactaataagaaatatcaaatgcggaattataagtttaaaaaaaacacaaatattttgtttctgaataactgatactattcccatgcacctgaagcataaaatcaaacagagttaagcacaaatgaaggtcattcttgcattggaactagcgcaatcaagtgactgacataatgcccaagtatgggcttgaatagctgcattggattcatacttcagctgacacgggtcacctattatagttgcgggaaggagcaccatgccaccatcccttcttttttcttcacgctgctgaccttatctacatacttccaggtgcagcattgtgatttttcatacacatctagaatccatatcagccaatgcagctactcaaagcccataccttacatcagtcacttgattgtgcaagttctaaggcaaggatgatcctcacttgttgacttctgtgtttttaattctatttggtttaatacttcaagtggatgagattagcatattcataaacaaacgtccatgtgcttaggcttttaactttgcatttattatttcttacacagacctctaggtgggacatatcccacctaataccctcctataaacatgtgtaagaagtaaaaaatgtgaatttaaaagtttttttcttgaatacgcaggagagctgcgtatcattatattaataggagagaaaaaggcatcaaacccaaaaacaaacatacaaacacacacacgcacccaaagataccctcagcgcacaacataaacaagacaccagcttacacatcctaagcaaaacagatgtttgtgttctgaacaattgatgctaatctcatctcatgtatctgaagcataaaaccaaatagtgtcaccctggaagaagacagcaagtgaaggctatccttgtgttggaacttgcacagtgaagtgattgacacaataatgccaagctatgggcttgagtcgttgcatcctggattagctcatacgaattatggatgtgcacaaagcttttatgtggaggttttgctgggtcaactgctgctctctgtacaacaccgtttgatgttatcaagacacgagtgcaattacaggcactcagccctgtttgcaagtatgatggggtggttcatgcactaaaagaaatttttcggcatgaaggcttgtgtggtctttacaggggtttgactccaaggctggctatgtatatgtctcaaggtgctatattctttacgtcctatgagtttctcagtacattaatgtttcctgaacccgaacaagaggttcatgcgaggagcgtttgatcgtgaaatgagaagatggcacagcaaaatacagaactcggggatagtctgacatgtgatgtgaggggtttgaatccaattttgggtgttgtttacaaagttgtctgttaggaataggatagcattcatacatatttttcggtaatctcaggtctagctaggcgattgaaaattttgtagtagaacctgattttgtattttagtctcgtatatatagagaaacaatggccagttttggtatcctattgttttgtatccacatgtatctgcatacatggccaagtgaatctggaattaaacagcatgggacgcaagactttctattaaaaaaaagatcagttgcagagcgacttcaatgttgtcgtccggcagttctgatgattgtaaagaaaatta

SEQ ID NO: 33677 - DNA, 256 bp, Zea Mays
gcgacttctttcccccaccagcgtggccgcgtgaatggttcaggtcagtttattcggattcaaccatgcatgtgatcgatctatcagagagctgaccaccttctttgcttgtcgcttggaaccatcgcaaagttctttccaaagcctacaacttctaggaaatcggatacgatcacccgaaaaaaggcaagggggaaatcttcttatagatctgttccgtcactgtgacaatcatttgggagagaaacaagtaaac

SEQ ID NO: 33678 - DNA, 2988 bp, Zea Mays
gcacagtagtacgtactggcattgttacttgtgccctgcccccactgcttgcaaaacgcaagcccttggtcagttggtctcgcgcgcgcgcaccaaccacgccatgtggaggttgcgatcgcagcgcacacatgttcgcgtcgccggcggccagctagccatgccgcatacgcccaccggaccggacacgcagggcgcatgtgtctccgcagtcgcaccgcacgggccccgctctcgccatccgccctagcgcacgcatctcggcgcgtgcccccaacggagccgtccatgacgtaccgcgcgccgccgcctccgcgcattaaaaaccatcgatcactgaccggctcccgaggagacttggcttgtactgcatcgcaaaccgcaatcgcacgcggcacttgccccccgcgatcataacctcaccgcccgccaccagctgcagccacaagcgcagcgctcgacagcctcaccagccgccatcactcgcggcagtacccggccgctgggactgcaagagtggggagtgagacgctgctgctgttgccgagcgcgaggagacactactactcactcaagagtcaagactcaacagcagcaggggcgaccgagctctgcgtgcgtggggagaaccggagaaggcagcagaggagggagggagggagcgcgtggaccaggctaggcgcagcagcatgggcgccgggatcagggtcctggcggcgctcttggcggcgctcgcggcagccaccgccggcgtgacggcgcagctgcggcaggactactacgcggcggtgtgcccggacctggagagcatcgtgcgcgccgcggtgtccaagaaggtgcaggcgcagcccgtcgccgtgggcgccaccatccgcctcttcttccacgactgcttcgtcgagggctgcgacgcgtcggtgatcctggtgtccacggggaacaacacggcggagaaggaccacccgagcaacctctccctggccggcgacggcttcgacaccgtcatccaggccaaggcggccgtggacgccgtgccggcgtgcgccaaccaggtgtcgtgcgccgacatcctggcgctggccacccgggacgtcattgagctggctggcgggccgtcgtacgcggtggagctggggaggctggacgggctggtgtccatgtccaccaacgtcgacggcaagctgccgccgccgtccttcaacctggaccagctgacgagcattttcgccctcaacaacctgtcgcaggccgacatgattgctttatctggtgagcaaattactaccgctccagtgcgttcttcttttttcccccttcaacagctgctgtatcagcgtcagcgaagtacgcaggctagattccgttccatgtctttcaagtcaagcaaagggcccgcccaacggaccaaggccaacgctcccagcgccgcaattaactgcaaacgttttattattagtggtctctcgaagcatccgtagcgcccatagaaaatgcattatcccccctagccctaggttagtagtagtacagtggagtgtgtgtgtgtgtggcactgcagctggtcgctcgtagtcgtagatctgaaacgagtcaaccgtggcgactgtctctgtctggaatgctggctcggtagccgtgcttgcttgcacagatgcacgtgaaagaccggccagcatcgcattattgataccataccatggcctctggctgaactgagctgacgtggcgttggggttccttcctcatcggctcatcctcttgcacagcggcgcacacggtggggttcgcgcactgcagcacgttctcggaccggatccagccgcagtcggtggacccgacgatgaacgcgacgtacgcggaggacctgcaggcggcgtgcccggcgggggtggacggccgggggctcttcgcctccgaccaggtgctcttctccgacgcgcggtcgcagcccaccgtggtggcgtgggcgcagaacgccaccgccttcgagcaggccttcgtcgacgccatcaccaggctcggccgcgtcggcgtcaagaccgacccgtcgctgggggacgtccgccgcgactgcgccttcctcaactgaaaaaggatgataagcgctagctagtaggtgtaagcatcggctggcactcacctggaggaagaggccggcttttggtcagtggtgacatctgatggatgtccaatcacgcaggatgccaaaaggcccacgcctacgcatatgaacggtgaaatatagcgaactctaaatagcaaacactgctggagggctcttggacgctaagaaacgctacatcttctcgcaccttactttgttgttcttactttatagtttgatttgtggaatggaataagttaattcatcaatatttcatttctcattaactaataatcaataataatataaggaataagttcatttatagaataaactcattatacatcatatcttatcatttagaatggattaattgttcgaaccaaacactccgtgaaggaccgttggtggacaagccagctagcgtcaaaagctgcgttccgacggctgtgcatgacagtgggactccattgccggatgagtcagtcagcgcgtgcaaggagcaaggccggccgaccccggtggatgctagttgctagcctggttggactagtggggtgtgactgttcacacatacgcacgcgggccgacgcggacagggcgcgtccaaggcggactcactaggcctgggcattcggttcttcggttcggttcagttcggtttctcggttcttgtagaaattcggttcttcaaaaattagaaccgaaatagcaagataaagaaatcagaaccgactagttcagttctcggttcttcggttcggttcctcggttctaaccgaactgtaacagccaccctaaaattatgaataacgacaacttttgtgagaaatttcagcaacatctccccacaaacaacgacaagtgcacaatgactataattt

SEQ ID NO: 33679 - DNA, 2225 bp, Zea Mays
cggcaaccgtcctccctcctccacctccaccagctgcactccccacgccgcgcacccgcccctctgcccctcctccagctccaaaccggaaacgcggggataccgcgccgtccgcgtggcgtgtccgaagagatcccacgacccggcgggcggcgctgcgaggctgaaggcgcggcggcggcggatttaagggcctcaccggctcgggatctccgcgcgatcgccgctgggccgcgcgctcgaggtatacattggttgttgcagcaagctggtttcttgagatccatattgatgtggtttgttctggaaatttttattcttcatggatgctattaagagccatgcaaagaaggttgatcttgttgatgagactctaagaccaccactagttccatccgagaagcacaatgctttccgagtgaggaatgttgcatccaggtgcaaaactgatctggctgatgccactaagataagaagatgtacatcaccaagtcttggccagacctcagcaattgaaggcacaccagcacccaaaagagctcagtctgcagatagaagaaggccgacaccttcaacccctccctctaaggtgtcaacaccctcaacccctgtgtcaaggtccatcacaccagttcgtgataccactagagacttacacaagagttccaagcgtatagcaagcacaaaggctcctgatggcttgtggccagcaatgcgtaacttgtcttcatctttccagtcggaatctgtggctgcacctactactagaaatgataaggtagtcacggctttggattgtagcaaggggcaagtgagtgttctaacggagaggaagagaagtccttttagaaggaaaaacattggtgaacattgtgagaatgctcaaccttcagaggagccccctaagaggttaattgagcaacacagatggccagccatgatagctgggcaggcgccgaagaatctcatgtcaagaagcattgacctttcggacaaagctaatataccagtcgcatcatcaaatacatcaagaggtctttcaccaaggaagacgccttctgtcagacctgtgccatcatcaaatacatcaagaggcctttcaccaaggaagaccccttccgtcggaccagtcccatcatcaaatacatcaagatgcccttcaccaatgaagaccccttctgttgaagcttcagtgaaactgtcaaatcagtcattggatgaagtggcaaggagtttggctattcaatcaagcagaaaagatgataaggtagattcacagacaatagagagatccaaatctttgagccgaccaaacagaacagttacttttcctgttccaattctacaacgctcatcatcaccaagcagagcattgccagctacgtcctcaacttccagggcctttcagagcccatctcggacaaggccatcaacaccctgtcagtcccaaagtgttggagctatccaatcaagcgttccatcttctcttattaactacatggttgatgcgcggaaaggaaagaagaatgccagccaaatcgaaaatatccaccaagtgcgtttattgcacaatagacatttacagtggctctttataaatgcttatgcagaagatgctttatcttttcaaaaggctactgttgagaataccatgtataatgtttggaggaatactgtaaacctgcgggattctgttaatatgaaaagaataatggtgcaacacttccaacaagaactcaggctttacaacattctgaaagagcagattgcttaccttgaacaatggccaacgctagaaagggagaatagtatctctttactaggggcaactgaggctctgaaagcaagcaccctgcgcctgccagttacattgggagcaaaggctaacacaattgctctcaagaacgctgtaagctcagctgttgatgtcatgcaagttttgggctcatctgtttgctgcattcattcaaagatcacggacagcacatccttggtttcagaactctctgtcatagcaggacaagagaagatcatgcttgatgaatgccgagaactcttagctacagctgcaaaactgcaggtgcaggagtcgagcctacggacacatcttgtgcaacagagacaaaggcttcaggattgaaatggcaacctgaacaagatgcagaagccccaggccatgccattgaacaggctcttcacctagacacactaaagtacaatttaag

SEQ ID NO: 33680 - DNA, 1566 bp, Zea Mays
cttgcacaaaggtctaattttaaaccctatactaccaaatagggtaccaaacacccccctgaaggcatcccaacagctccttaatttcattcccaaattcatgttttaggaaaaaaacaagaaaacaagcactccaacaattccctaattaccttccctttcctcccgcgcgcgcaaaaacccagtcgcgcgcccagatatccgccgtcctccctcgaccgccgtcgttcgtctgctcgaccctcgtcccttcatctcctcgacgacgacgaccttcatccaggccacgcccctcgtcgccgagacaccgccggcaaacatccaacacctcgacgacatatctaggaggcagccccggtcggaagttgcggcccactagaggcccatcgtcgggcccagccccaaccctagctccagccgccgcttggctctcctgctgtccgtcctggtaccgcgcggccgcaccacctctccaggctccagctccagcgccgcagcgcgctcgcccgcggcccgcgcctcctgctcctgccctcctctgtcctctccaggctccagctcgcccgtcaggccgccaccgccaggcgctcgcccgccagcgcgctcgctcgccaggccgccaccgccaggcgcagccgcccacagcggccacagcgcgctcgccccgtcgcccgccaccgccaggcgccagccgcggagcgccggaggcccggagccgcaggccgccgcagcgctcgcccggagccgcaggccgcagcgcgctcgcccgcagtggtgtcgtcgtgctcacctacgagctccgcgaccgcatcgttaagctggtttactagcttacccacgcacggccgccgccgcctcacgcacgcagcagccggccagccgcggtacgttctccaggtcgtgccgacgtccgacgacaaagaaggccctgggggcgctggcgcgcatcgcgagtcccctcgccggcaagtatatttgcaagcagaccctcgagctcgtgcgtttagcctcggagggcaagttcccgaaccggggaatcaaggacgtcgtcaggagcatctgttgcgggaacgaaaatgtcaacgaatcctgatgaacctaagagtcgtgcccggacagactttttgctcaacaatgaactggaggtccagaagttttgggatgagaacacggtttttcaggctgatcctggcaatgactctccaagccccggggaaaaattctttgggaactttccatacccttacatgaatggcttgctgcatctgggtcatgccttctcattgtccaagcttgagtttggtgctgcataccacaggcttcgtggctccaatgttcttttgccctttgctttccactgcactggaatgcccatcaaggcctccgcagataagctagctagggaaatccaacaatatggatatcctccggtgtttcctgtggcagagggttctagtgctgcagtagcagatgctacccaggctgaccaggctgatgttgttgccccagataagtttaaggggaagaagtccaaggctactgcaaaggctggtgcacaaaagtacc

SEQ ID NO: 33681 - DNA, 3434 bp, Zea Mays
attcggtgttcgagactagaagcctggagaaacgtttgttgttcttccagaacacgccctcggaatcctatcgcctcccacagcacacgacgcgcctttgctgaactctctctgtcgccatgctgccggcggtcgccgctgcatcccccggcctctcacatctgccgcgctaccaccaccttggccgtcgctttcacctccgccgccaccgccttctacctgctattccggccaggctatcgtgtggggccacccacgcccgccgccttctccttgccggcgcgttcgcaaaaggggagggttcttcaggacaggatgttgatcactctgctggtgccacaaattctgggtctgcataccttggtctcttcgttcgattgcttggcttggataatgacacccgtgatagggagcatgctgtttgcacactctatcaatactcccttggtggaaggaagagcatcgatgagataatgcaattccctggttgtattgttctcatcattagcctcctgaaatcagagtccattcttgcctgcgaagcagccacaggtcttctgcgtaacattacgtcagttcacatatataggaagatggctggtgagagtggagcaatggaagaaatcattaatcttctctgtaaatctacaataacccccaagattctagagcagtgtttgtgtaccatttggaacttttctattgatgaaaaatggaggtacaaggttctgaagagcgatgtcctaatgaagattgttggttacctggatgaagaagacatacaagtcaaagaagccgctggtggtatcatatcaaatttagctttgagttcctctagtcatggagctttggttgaagtaggcgtcatcccaaaattggttcatcttttgcaaaccaaagaagatgactataagattattagaaaggaagctaaaagttcactaatacagctggccactgatgattgttactacagccttataatagaggagggtctagttcgggttcctttggttggctcagctgcatataaagcctttaaacctctccctcattcatggccctcttttcctgatggctctaagattcagcggagttctcatccctcaaagtacggtgctaccgaactgctccttggcttgagtgtcaatgagaacgatacaaaaccagatgaagctaaaattaatgctatgataggacgttctaatcagcaattccttgcacgtgttggagctattgagttggatgatcaaggacaagaggaatctggatctgaaaagaatgacatgtataccattttgccatgggtagatggtgttgcacggttagttttaatccttggacttgaagatgtctctgcaatcaaaaaggctgctagagcaatgggtgatgcatcaataaatgaacatatgcgtacctcattcaaggaagctggggctgttaaacctctacttcagctgctcaagcacaaagatgtacatgttagagaagctggtgcttatgcgttggaaaaattatgtgtaagtgccacagtctgccataatatcaaaacagaaggtggactagaattgcttgtaaatatagtcaaggatcgacatactccagtagaactactagagaagtttttgtgcagataatttatatactttctcgaatgtttgacatggggatttgcatggttgctgtgccggatactgaaggttataaggatagtgaaaacagtgcaaagacatctgttaaccaagagatgtccagtatgattgttggcaaacatatcaactatgctgtggttctacatactaaagtttcagcgaggaccctctttgggacacacagatctttaagacacaacttatgcagtccatgggtactgcgctgtcatctttggcttctttgcttctcttttgggcacacaagcttgatactttataatttatgtggtgtagtgcccgttggaattttatagtgatgcgattctttcaatgtttgtagcgagttgatctttgattttgatgctatctcacacttaacggaagttctaaaggaagcatcgccaaggttgcaagcaaaagtctgttgtgtacttgaccatatagcagcttcggagcaacatgccaccgcaatgactgctgcttgcactggttcagtaattgaagctattcttgaaataggggttattcatgggaccagaagtgactctgagaactttgaaattcctagtgtagttataaaagaactcagtgaggctgtgtctgcagctgtgaggttactctcaaagttattgaactttgatcttttcatccgcagcataaacggtgaaaaaatcacttctttgctaagaagaacgctcaaatcaaatttcccccttcagtcaaaggattgtcttgcggcatgcctcattaagctagaatccagagctggcttatcaggagatcatggtgttagtagtatagatatggagataactatctatgagactattccaaggctaattgagcaaatgatgatatcactttcgtttgaaaataaaagaagtgctgtaatagagctcaacaagataatatctggtggtgtgctggaatatacaagagcagtggcagattctggaggcatatttccactggtgaaaatgcttgaagaggcggatggagatgcactggaggctatcttatctatcttatataatctgagcatggatccagagaatcacccagcaataattgctgctggagcagtgcctctgttgaagcggattgttcgtacagaagccccacaatggagtagtgcaattcagctgttgagaacattgcctgtatgacattgatgaagaaaatggccattcatcgccaacaaacattataaactgcacttagggcctgtttggtttgatggctaacttgccacactttgcctaacttttgtgcctaaggttagttcttcaattcgaacgactaaccttaggcaaagtgtggcacatttagccacgaaccaaacagccccttagtgcatgcacagccaatttcttagattgaggttgcggttgaacctagctccagctccctatcatcatcaaaatttgaattttatgatctggaagaaagcatcagcaaggcatttcctccaaagtagcgatatatgctgcccttttggctagttgaaaagcacaccggggcctgatgtgtccttttgctcacatcacatgccacggcaatagctagtaccacgaactattttggataccggcagtttgctggttgtgagaggacccaagaaagttcaaattgtagcttgctaaatcgtcgtgtttcgacactaggtgactttactctttaaaaatgctatcctttttgtgtaacctgaaatcctgaataacctccacggtgccaatatcaaaagaatctctttttgactccagctggggtaatcgtgaggca

SEQ ID NO: 33682 - DNA, 1864 bp, Zea Mays
ctgacacccaatgggttaatcatagtttacctccggcgcattcttaaacccctacctaagctgcatagctagggtttccacgcatggcgaccacgacgccgcctacggcgatcctaggcaccctcgtcgacttcacatcgcgggagaactgggacaagttcttcgcgctccgcggcacgggggacagtttcgagtggtatgcggagtggcctaacctccgggccccgctcctcgacctcctcggggaccgcggcgccgcagcgggggcggcccaggagatcctggtgccagcgtgcgggagttcggtgctgtcggagaagctctacgacgcggggttctgccgcgtcaccaatgttgatttctcccgcgtcgtcgtcgccgacatgctccgccgtcacgcacgcgcgaggccagagatgcgctggcgtgtcatggacatgaccgacatgcagtttgcagatgggtcatttgatgtcattcttgataaaggaggactggatgctcttatggagccggaggctgggacaaaactggggataaaatatctgaatgaggtcaagagagttatgaaatcaggagggaagtttgtgtgccttacccttgcagaatcccatgttttagcgcttcttttgtctgagttcagatttggatgggatatgagtattcaagctatagctagtgaatcctctgaaaaatctgcgttccaaacattcatggtggtcatggtaaaagggaagatgggtgtagctcaaacaataaaatcatcattggatcaatctgctgaatactgtaacatgagacaggcaaatgctgtgattcgtgctcttgggaacgagaacatcatccgggagtcatactcgtctagtgttgatgtactgctctcattgcgagatcttcagctaggagctataggagatctgaaagtgattgtcccaggacgaaggaggcaattcattcttggtgaacaggaaacttcgctatattgctacaaggctattttattggatgccaagaagcaaacagaaacctttgtatatcactgtggagtttttattgtccctaaggctcgagctctggaatggctattttgttcctcagaaggacagtggcatgttgttgaaagtgcaagggctgcccgtctaattatggttttcttggatagcagacatgcaaatatcgacatggatattattaagaaggatttatctccccttgttaaggatttagaacctggaaatcctgaagaggaggctcctataccgttcatgatggcaggtgatggtgttaaacaaagacatactctgcaagaggtaacttcagaaataactggtccaatggttgtggaagatgttgtctatgaaaatgctgatggagatcaaggttccatgtctgagaaaatgttccgtcgtcttatttttggaagaagttctggtttagtgcaatctgaagcgttgttaatcagagatcctcccagtgatgaggtagacaaaaagaacaaaagtgcagctgcaacatctaaaaaaagaaggaaccataaaaggggatccaagaacagtctgagaattgaccataaatttcttggtagctcatatcacagcagtatcatatctgggctttctttagttgcatcttctctgagtgctgctgcttcatctggagaaaaagtcagcatcaccgttgtaggccttggtgctggttgtttcccaatgtttctccgtggatgtctgcctttcgtagatattgaggtcgttgagttggaccccttggtggctgagctagcaaagaaatattttggcttttcaatggatgagcaattgaaggccaaacatcgcatttccgtatatgctgatgatgttgtgttgtt

SEQ ID NO: 33683 - DNA, 1450 bp, Zea Mays
cgacatgggggcgggattgttcggaggcagcagcaagcagagcggccacgcggtgtcgttcctcctcggcgcggcgctgcccactgccctactcttcttcctcgcgtccgaccgcctcggcgagggcttgtccaccatctccagcagctggcggggcaacgggtcgatatcgaccgcgcagcagcctgccgcggcaaagccggcgacgaccgatgctcatgctctgtccgccgccgccgccgacgcctccgatgcccgtgccgcgcctacgcaagatcacgagctggtatgcaggtagagttcgcgggccttgccgagctgctggcgagagtggcgacggaggacaggacggtgatcatgacgtcggtgaacgagatatggacgcggcccaactcgctgctcgacatcttcctcggcggcttgaggggcggcgaggacacagcgcacctcgtcgaccacgtcctcatcgtcaccgtcgacgccggctccttcagcggctgcaaggccgtgcacccgcactgctacctcctcgaggtcaagtccatggacatgaacagggccaagacgttcgggaccccggagtacgtggagatgatctggctcaagctctccatccagcagcgcgtcctggagctcggctacaacttcctcttcacggacgccgacatactgtggcttcgcaacccgttccagcgcatctccgtctacgccgacatgagctgctcggtggacaactccaagatggcgccggcgctcctggactgcgagaacaacgtcgggttctactacatgaagtcgacgaaccggagcgtcgagatggtcaggtactggcgggcggcgagggcgaggttcgacgggaacctgatcgagcaggtggtgttcaacaagatcaagtacgagctcatcagcaggctcggggccaggatccagccgctggagacggagtacatcagcggcttctgcgacttccaggatcatttcgacaaggtctgcaccgtgcacgccaactgctgcatggggctggagaacaaggtgcatgacctcaagagcgtcgccgcggattggaggaactacacgagcctgacgccggagcagaggaagctgcaggaggggagcttcaaggtgacgcccccgcgcatgtgccagaagtccatgggatgggtctgaactctgaaggagaccggagatgcatcagagaccgcggagtttcaggttgaaatgcagttcgagcatccaccgctgcgcctgcgcgcactagtaatgcgacctctcagctctgaataacatacacacacacggttgcttgttactcctgtatgataaaatgaaggtgtcatgcgacagagtttttttttagaaaccttttgcaaattactagacgggagagagagaatgttgcgaagcaattgccaagcacgaggaccctttgacttattactctcgtttccag

SEQ ID NO: 33684 - DNA, 170 bp, Zea Mays
ggatttacctccaccacaaccacacaaacatacacataattagcatctagtaaatcaacgtcgggtacaggtactaacgaggaataaacacaaggagacagcaggtcctcaccgggctgaacgatgacgcgaggaaactacgccgtgaggagaggctcgctggtttccca

SEQ ID NO: 33685 - DNA, 1528 bp, Zea Mays
atgggatgcaggattggcgttgtcttcagtgggaggcaatcccccggagggcacaatgttatatggggcctctatgatgttgtaaaggctcacaactccaacagcaaaattattggttttcttggaggaaccgatggattatttgcacagaaaactattgaaatcactgatgaagctcttccatcctataaaaatcaaggtggttatgacatgcttggtcgtacaagggatcagatcagaacaactgagcaggtaaaggcaacaataggtacatgtcaagcattgaagttggacgctcttgttataattggaggtgtcacatccaacacggatgctgctcagcttgctgagacatttgctcagttgaaatgtccaacaaaggtagttggtgttcctgtaactctaaatggagatctcaagaaccaatttgttgaaacaacagttggttttgataccatatgcaaggtgaactcgcagttaataagcaatgcatgcatagatgccctttctgctgaaaagtattactactttattcggatgatgggacggaaagcatctcatgtagcattggaatgtgctcttcagtcacatccaaatatggttatcctaggcgaggaggtttctgtgtcaaaacttacaatatttgatattacaaagcagatatgtgatgctgtgcaggcaagagctgaaaaagacaaatatcatggagttgtacttattcctgagggccttgttgagagtattcctgaactgtatgctttgctccaggaaattcatggactgcataataaaggtgtttctgttgagaacatctcttctcatctttcaccttgggcatctgcactatttgaatttttgcctccatttattagaaagcagctgcttctccatcctggatctgacgattcagctcaactgtcccagattgaaattgagaagcttctagcacaattggttgagaccgaaatggacaaacgcctagttgttgagacaaaattcttctagcttcatgatggaagacatctaccgaaaccctgggccacttcagttcgaagggtcaggtgctgatacaaagcctatttcattgtgcgttgaagatcaggattacatgggaagaatcaagaagttgcaggagtatttggagaaggtgaaaagcattgtgaagcccgggtgctcgcaggatgtccttaaagcagcggtaagcgccatggcttctgtgacggagatgttgaccatcatgtcttccctttcatttagtggacaggcgaccatctgaaggccaagctgaagatgtcatatgctgttgcgctctcatgtcccgaacatatttgtgtttttttgggaaagaaacatacaatttttgttctcattctagtatcgtctacctatgtcaaactacaatatgataggacccttgctaaataattgtttcgtttgctggtatttctcatctttgatgctaggcatgttgaaaagttgattgagatgagttaaaataagagcataatttgaactggttacaattaca

SEQ ID NO: 33686 - DNA, 2369 bp, Zea Mays
gaacatgttattgccgagtcggcaagaaaggaatagataccagagaaattcctggcgtgaaccacgggtgttgttcacatttggtaccagagccaatactggatcctccacacgggtactggacgagatcgcaatcgaagttgggcggcatggcgccagcgaagacggacgatcctttgtcccagcttctggcgaagatcgaggagggaaacaaggagactcaccgacgcatggaggcgattcagggggcggtgggaaatatggaggcggcggtcaaggtggtgatgacggagcacggagatcttcagaagtggaaaccggaggtggaagcgaaagtgacggagatttctgatgctctaaaggcgatccagatccagatgggaaagatggagaagaagccgctcggtttcgggtcgagacaggaagaagaaggagaagacggatttctgaagccgccaccatctgattcttcgaatttggagtttcgtcgtgaagaagggcggacccaattctcgcatggagatatctttactgggttgcaggtgccggaggaagttctggagtccaggcttcttcgtaaagggggtaaggtgatttcgcagttgctcattaagtggtccaattggccggtgtcactgtcaacctgggaggatgaagaggccattaagcagaaatttccacaagcaccagcttggggtcaagctgtcgttaaagaagggggaaatgtcagcagagcagatcacatggaccatgcagaggagcggactcaagcagtgcaacagaaggcacagacagagggagtcaaggaagacaatcagagcccgcgcagccgtcgtgtaccaaagccaaataccaagtacatcggtgcagagtggcgcgtataggtatacggagttatacgtattgatgagggcaggtgtgccggtataaataatattgtaatcgtttctaaactcagtctggaacatgttattgccgagtcggcaagaaaggaatagataccagagaaattcctggcgtgaaccacgggtgttgttcacactcgctgtccctgcctgactcttaaaaagggcggcgtgtcaccgcctggttactcacagtcatagattcacgccgcggaacgcggattccaagaacccaagtgaatcgcggctcctcgagtccggcggtgccgtccggagaggtagagctagactgctagagcacagccccgccatggcggccgcggcgcgcgcgatcatctgcgagctggcgccgcagaaggtgtcgtcgacggcgtcggggcccgcggcgccgaagaagcgtgacgccgggacgaaggtggtgctgcagccccgcctctgcacgctccggtcgtacggcgccggcagcggcgtggtgacgcggaggattctggccggggaggaggacggcagcggggccgccgactcgggcggctccgcggcgttgccgttcttcgcctcgctcgctgactacatcgagagctcccgcaagagccaggacttcgagaccatctccggccgcctcgccatggtggcgttcgcggcggcggtggccgtggagacgacgacgggcagctccctgttcaagaagctggacaccatggagatcgaggaggcggcgggggtgtgcgtggcggtggtcgccagcgccgcggcgttcgcatgggcctccagcgcgcgcaataggatcgggcagatgttcacgctgggctgcaacgccttcgtcgactccctgatcgacaatatcgtcgaggcgctcttctccgagggcgagctgcaggactggtccgatgacatatgaacatgcacatgcatatatagagactaatagtagacagacagtaatacagtatacgtacatacatagagtcaactattaacagtaagacactaggtagatgaagttgttaagtgagttccatgcattttcgcaagcttcgtcatcgctgcacaacggcaaggctgaatatttcagagatggatcgttgattagagctccgcattctgcgtaggaacacacaagcagggatgtctttcagaagtgaggcggctcttaaagccttcaaggttgtgaaatatgtagatctcttctcttgggagaaatagtggtatcctactatcctaggctctggaaagattggcccccagaattaactgtacctgctactagtactactagctataccgagtgtatttagagaatgaatcatgtaatcaaatccatgtaatatatgccaagtgtagtcagagtcaaatctggagtattgattcttgacattgtaccacatggagtggaaatgagagcctatacaccgcgtttctctagcctatctccagctacccaaacgcctgtgcatactcattttt

SEQ ID NO: 33687 - DNA, 1469 bp, Zea Mays
ctgttgcatgtggacatattgtgcacacatttgtaatgtacgatgcttctggtatcagattgcatgctggaaagcaagcagcggtactgaaccaaatagtttgtgaacttccttctgaacatcccttgtctgaaacaagaccactgcgagaacttttaggccatacaccaacccaggttgttgctggcgcattgcttgggtgtacgatagccacagcaggacaattattcgtttgaactccgaaggtgcaggagaaatgttgtagcatttgcatcgcggggacttgagaagaagtttctctagtgttctgctactttaggtattggtaagattttcaacttggtgctgtagtgttgtcgaatgttgtaagctctgatggaacgtgattatttgtcaaggtgatgttcacaggattgttgtacagaacatttgttcgataatgtcatggttatgattgatgaaatctaaaatgtgattagaatagtgatgatttgtgaccaatagaaatggctctgaggtgagattttaggaagacaacgggcttgggaatgagactttaaaacaccagtacctaggattatatagcataacaagaagaaaattcataaccatcgtagaagttttatcaaccccacaaccaaatatttcttggcggagatctgtgataggaccaagattaatagcgtggaacgaattgtattcaggtatcgcgagggtccagctagaccagggtgaagatgagttcacctggggtctaactaagtcaagaaaattatcagttaagtcgctctaccaggccttgatcaaaatcaacatcccaaatcataataaagttatttggaagctaaccccccctaaaaatcaaagtatccttgtggtatctaaaaaggggagtcattctgacaaaggataacttagcttctatcacaaaacgagacgatcaggcatcttctttttgactgtcattttgcgaggcgagtttgggacatcatttttgtagcttttggtatttctaaaccttctaacatccataatatgtttgggaactggatatgatgcttcggaaatgaccataaaggtctagctctacttgggacaacaattgtatgttggtctatctggctaggtagaaatgagttaattttttaaaacaaaatttctttatcttctttgcaggttatttttactgtagcctagaggcttcacacatgggctgtgctgcggaggtagaactgatgcaatttttttggtaatggttacgtaacatttgactcaagtgaccaaggagtttttttccttggaagcatgcttggcggtctagtcttcggattgatagccactagtgtgtatctttagattctgctggtctgtgtggctcttgtgggcagaggacggaagtgacttttaaggactggtatcacctcgatgtactgttcttgaataaataaaaatccttccttttcaaaaaa

SEQ ID NO: 33688 - DNA, 1608 bp, Zea Mays
caaggacaacgaacccgcgaaattccatttcccagttctcaccatttcaccaaccgttcactccctcgccggcgcacctcgccggcgtcgtgtcctggcacaccaccaccagtgcacggcacttctatcttcgtctccttctgccctcccatccttcattctgccgctcggaacgttggatgtgtgctgctccagatcacgcgggagggcaataagccctagctcggccatcccgggatggaggcggccgcctccagcctctcgacgctgctctccaccttgcgcgtggacgggccctggacgcctccgggaacctgggagtcggccatccctgagagtggcgccgctcgcgttacagacctcggaggacgcctgcagccgatctacgagctcgcatcggttactgatgatgctttgattcatctggccttgcatgcgctgtatggtgtcaaatcatcgttagatgagattgaggagctttcagtgctgttctcctcaaatccagctgacagaacctctaaccgtgttacaaatgtgtggttacgttcctcgagcaccatatctgtggggagtattctcaaatctttacgctctacaggtcttgtggtcttcttcctttgcaagtttgtgcacttttatcttgtccaaagtcgagaaatgaattgtgcaagtagagaagttcatgaacatgaacatcctggtgataaagacactgaacagcatcggccttacagtctagtaaaccaagcatttgcagctgcagttagtaaggtcctcgaaggctatttctgttccttgaatactttaccagcatcaattaggcttaggcgttcagttggccaatctggtataccttccaagacttcagatggaatgagttgtaattccactgcagaagtcactcttctggaagtttatctacacactgaagagttaagaaggcatgttaaatcccttggaaatatttgtttccctaagtttgcaggtgctacattgtgccatgatggtttggatactgaagcaagtgtggagtttgagaatttcccacggggcactgatttgctttcgtatttgtatgtctatattcgtgatgccgatccagttcactatggtcttctgaagtatctttttattcgttcctgtgagccatactttaacttcattaagtcatggatttaccgagcttctgttgatgacccttatgaggaatttctcattacacaaactgaaaataagggtgttcaaggagtctcttctgacataacagatgagttcacccttttcccgttaaagggaagaaatcatgtttctgctccatgttttctaaaggagatatgccatcctgttttgcgtactgggcagcagcttcgagtgctcatgaatcttctaaagtcgtgcaaattgtctgctactggaggagatggttatccctcttgtaatatcattaatatggagggggttctcccatggtttaatacaccaattgagtcttcaatgaattcatttacgttctcaaaaagtagcgtggaggcagtaacatgcaaaagggatgctatgtacaagttgatgatggagaaactccaacgttttttctctaatgtggaggtc

SEQ ID NO: 33689 - DNA, 1456 bp, Zea Mays
ttcggacgctgcctccgcgccacacagaaaggaaaaagtatctctctctcccgcgcgcgcgggtgagccggggaccctcctacgtctcgccaccctgctggtatagcccgccggtcgtccacgccatggccacccaatatgcgcggctctccctgccatgccgcctgccctcgccgctccctccgccggtgccgacgacgacccgccggctgccgcgcgccgcggcggcggcggcgtccacctccccgcggtgcccacgcgtcgggggcgcggcggccacgcgcgcccgcggcccgtgccggcctcgcgcctccgagggcgaagtgcagcagcaggaggcggaagcggaccaggtggtggacagcaacatgctgccctactgcagcatcaaccgcaaggagaagaagagcatcggggagatggagcaggagttcctccaggcgatgcaggccttctactacgaaggcaaggcgatcatgtcgaacgaggagttcgacaacctcaaggaggagctcatgtgggaagggagcagcgtcgtgatgctaagcccagatgagcagaagcttttggaagccgccatggcgtatgtctcgggcaaccccatcatgacggatgatgaattcgatcaactaaagctgagactaaagaaagaaggaagcgacattgtacaggaaggtccaagatgcagcctacggagtcgaaaggtctacagtgacttgactgttgactacttgaagatgttgctcctaaatgttcccgcagctgttgtagctctggcactattcttctttttggatgatttcacgggatttgaaatcacatatcttcttgagttgccggagcctttcagtttcatcttcacatggttcgccgcactgcctttaatattttgggtagcgcaggcgatcactaatgtcatagtgaaggacttcctgatcttgaagggtccgtgtccaaactgcgggaatgaaaacctctccttcttcggtaccatactgtcagtgcctagcggtggctcaaaaaacagcgtgaaatgtgcaagttgtggcactgagttggagtacgactcttcaacccgattgatcacactcccagaaccggctgaggctaaataagtgatggcgtggtttcgatttcgctagcaggaaagacggcccggccggcccgcagattcttgatcgacgacagtacgaatgatgtatgtttgctgtgctagtctgtgtgtatatatatttgaacaagtttagacacctgtattatatagatctaatgaaatgggtatatgtatgtgcatagagtgtacaaagaaaaatttaataagccgagttattgtatgttttttctcctcctatatattgctgttacctagtcggctactacaaacaatgagggataaacaagcaaataaacaacgatttctcgatggaaacccacattttttgtgtgtgtgcaaata

SEQ ID NO: 33690 - DNA, 2325 bp, Zea Mays
atgccggccaccaccggcgcgccggtcgctgcgccagctggggctcggcggccgctcctcttcggcgccgcgccgcgtccgcaggcgccgtcgccgccgctgacgacgacgcggtgtcgccgcgccgcgcatggaacgcctccgccgccgagctcgagctcgggcgccgcggcgaggagacgaggggtcaaggagtacgtggaggcggcgcgggagatggcgcggcacaaggacggcggcccgccgcggtggttctcgccgctcgagtgcgggggcggccgcgtccccggcgcgcccacgctgctctacctgcccgagcacagcgcagcactgatgaaaaagataaaagcgacttgctcgtctgcagatcaggccgccgataacgatgttcgatctgtggtgcttgcacataccagtcgaagaccgaacgcccttcgcaggtacgcccttcgcagggctggtcgagtatgtggagagggcagtaaagtcggagagctcaagagcgcctgacagaccaatctaccttgttggagagtcagtaggagcgtgcgtcgctctagccgtggctgcgcgaaacccaggcatagacctggtactgatcctagtaaacccagggaacttgatgaagatgccagaagcttttgttggacgtggcctctctctacaagaagctggtccgagattatcagagaccacatccagtatgttggattcccttacgattttggttgacgttctgacaaaggagtccatcgtttgcaagctggaaatgttgaaggcgtcgtcatcgtttgtcaactcccgtttacacgcagtcaaagcccagacgttggtactagccagtggaaacgatgagctgctgccaagcacccaagaggccgagagactccgtggcgctctagagaaatgcagaacacgtgttttcagagacaatggccacaagatcttactggaggccggcttcgacctcgccacgaccatcaagggagccgggtactaccgccgcaccaggaggacagacttcgttgcagactacatacctcctaccccagacgagctgcagcaagctatcgaccacgacagggtcctaaagcttgtcaccgaccggtgatgctgtcgacgctgggcgacgggagggtagtgaggggcctggcggggctgccgagggaggggcccgccgtgctggtggggtaccacatgctcctggggttggagctggggccgatggtgacgggcatcctgagcggcaccggggtccacgtccggggcctggcgcaccccttcatgttcgacgggggcaccgagcggctcatgcccgactcggcgcacttcgacctgcaccgcgtcatgggggcggtgccggtgacgggcgccaacttctacaggctcctcgcggacaaggagttcgtgctgctgtatccggggggtgcgcgggaagcgcttcacaggaagggagaggagtacaagttgttctggccggagcagcctgagttcgtcaggatggcgtccaggttcggggcgacgatcgtaccattcggagtggtgggagaggatgacatatgccatttgttgttagactacaacgaccttcagaaggttcccttctatggcatgctcgacgaggccttgaaccgcgatgggctgaggctaaggactgattccatgggagaggtaaaagaccaaagaatgcaccccctactgctcgctcccaaggtaccagggcggttttacttcgtctttgggaagcctatcgaaacaagaggcagagagaaagaactacgagacaaggaggcggcgcagcgcctctatttgcaagtcaaatctgaggtggagggctgcatcaactatctcaaggagaagagggaggaggacccctacaggagtatactgcccaggcttctctaccaagcacttcatggtcccaatgcagaaatacccacatttgaaccatgaaatgttcacttcgagaataccaattgtttatattgttcttatttttttttcttgcattgtcaaaaaaaaatcgattgttaccattgtcctcaaaataattatgatggctgattctatcgtgtagcccatttaaagcacatatataaagaggtcaacggaaggtcatcgctcaactgtaaatttgtaagtacagcaacacaagtatttattttggctcatctcattgcaaacaaagcatggattcaagtcgagagaagatatgaagaatgtgttagaaatatgccttagagataatcatagagatgagcatatttttttatctatatatatattgcttaattgaatatccatgtaaggcaccttgtattgatt

SEQ ID NO: 33691 - DNA, 1940 bp, Zea Mays
ccgacccattgctatcctacctgccagcgaacctgtctcgtctccttgttgcccacgtggcctcgccgtcgccgcgagctccaccttcctcagctctgccccgagcgcgatgtggcgagcgacgaggcggtctccgccgttcctgcgatggctatcgtcggacgcagcctcctctaaggcgccgcggcagcgcgtagcggcgctgtgggggaacggtgactacgggcggctggggctgggctcgctggagtcgcggtggagccccacggtttgccccttcttcctcgcccgcgccgccgacccgcccgcctccctcgcctgcggcggcgcacataccctctttctcacccagaatgggcgagtgttcgctacagggctgaacgactttgggcagctggggataggaacctctgttacacatatgctggagcctgttgaaatttctggatttcacgaaagagttgtagaagtttcagctggcaaccatcattcttgtgcagtcaccgcggatggtaagctctttgtttggggcagaaactcaggtggccagcttggccttggtaaaggtaaagtagtttctaccccaacaaaggttgattgtttgactgacctcagagtaaaaacggttgctctgggatcagagcattcaattgctgttacagaggaaggtgaagtcttgagttggggagctgctggttctggtaggctcggacatggccgtcaatctagcatcctgggattttctctgacctcaactgaatatactccaagattgatcaaaaactttgatggtatcaagattaaaaagatagctgcaggaatgttgcactcagcttgcattgatgaaaaaggtactttgttcatatttgggcagaagactgagaagggatttggaagaccgaacgaagaattcagaccaaatattgttgaagagataccattttcagaagaagttgcttgtggaggttaccatacttgtgttgtaacagatagcggtgatctgtattcttggggttcaaatgaaaatggctgccttggtctggggtattttatctgtgactttttcaataatttccctacatcatcttgtatcctacttatatcagtgtgcaactgtgcatccaatgtcgaagttgtattctgatatgattatctctaaccagaggtacggatatggtccgctctccggaaattttgaaaagttctctatttaaacttcctgtatctaaggtatcttgtggttggaagcacacagctgtagtttcaggtgatgacatctacacatggggttggggaggcgccaatgggacttttttcgaagagggccattcttccggtggacagctgggacatggaaacgacgtagactattttgagcctatgatggttccctttggcacgaatgcaagagccgtccatgtatcgtgtggcttcaatcatactggtgcaatttacgagtgctccgaggactttgactgacgtgccacctgcagacagcagatccgcatgtcttggagacttaggttagttatcaaattatactcgctagaagtgcatataaacagcataaataagctctgatgttggacctgcatttatgtgaagagaaatatagaacaagtgataacacccctgagagggggatgtaaattaaacagaataagggatgaactggatgcattttgtgatgcatcagagttacttgccagtgtatagcatttcttcatttattggctggttctgtattattttgccaggtactaagaaatccattgcctgatgtctcagcaggctgtttgtgtacattatgattgcttgactgcttggtgtcgatgcttgctgtgttttttgtgtgtaaataatacatgaatcagttaatcgtgcttgtacaattaaatatgtacatatatcagtgcatcacttattatatgtacatgatt

SEQ ID NO: 33692 - DNA, 2590 bp, Zea Mays
tatgctgttttcaccataacaaataatttgacagacggctatagtaagtgtgggaatgaattcggtaacatgacttcacacttaaaaatatatatatagggcccttttgtcataaattttctcacaaccatagccggaaaaggcaccaatctagctagtacgcctagcaataatcagcaccttaggccgagtattttctttagatgaaataaaaaaatggacagaatcccatcctcgattcctcatgaaccatactatctcccaagtccaaccctagcaacggcgccactggcaagaacaaggtaactaggggaccatctcctctatataagcactcttccacggggtagacggtaccaccagaacgggtgtagaagcccagccagtaggataagccctcccagatctggccgggcggccggctgctgccttcttccccaattcgggaaagacgactatgaagatcagtttgtgtagcgtggtttggttcttctctctagctgtatctccttgctcccccgcgcgcgctctctctctctccgtgtccagttcttgttgcgtctgcttggtactgtactttgcagcggtggtcgacgttgggatgatgggggcgctggctggagccagcagctcgacggtgtggctgacagaagagagtgagcacgcatcggccagactgcatctatatacggctgctcctggcgaatggatagatgccaaggcgcagctgctgttgcgtgctcacttctctttctgtcagctccctctcctcctagggacttgttccgccgtatgcatccaccaccgtcccagtagtcccacttccgtccatcgcagcgcgccaatgatgcgtcgtcgtcgtcgtccaggcgcagccgttccccttatcacatcggtcgccgttctctgaggcgcctgccggccttgtcgtgtccctacctgaaaccttatcttgtctcccgctcggatttcgatgacctctgctctttggaataaggtactcttaaaatctcagggaagcttagccgcccagcgcatgtacgccatggacccttgcgctgcgggctgcggctggcaacgtttcttttcttttatcggtgaggtcctcgttgccgtctttgtggcttccgatgatggaattttagccagctccgttccgtccttcaggcttcaaccttgggggaagggacgcgtgaaggtttggttaacttaacacctgtgtctttgctctcctccctaggagtccgcttaacggaaagcactgtttgactgctctctctctctcccccctccctctcttatctactcttcctttccgtaaagatttcacacaaaaactattggatcttttccccttttgttgtgctcatctcatgtggttctgtgactgctgagagataggtgggcgaggcagccatggagttgatggtcggaggcagatctgcttggatgcaagtggagagggggctggcgcgccgcacgcggcacctacctccagcagcggcgccagcgccggcggcttcttgtagatctggaagcgccaatattttcttctctagccgtttagcaatcatcatatataggaatgtggacgtgctccatgtacctcttcccctactaatcaagcaaggtagcaagaatatgtactgcttgggaccatgagatgctagagcctgacatgctagagccctcatcctccatgtttgatgtggttatcatctgattcaagtaaccttgtcacttgggcaggtgtcatctaaagaaagaaaaagagaggttcttggaagccaaatccagagttgatgctgacttcagaagaaaggggtaccttgtattagtggattcatacacgaaggtcactaaaatggaatggtttttccacatagatagagcacaaaataattgatctcgatctagatgaagttaattttgtgtacaagttatttttcatgcatggattaatgatcaacacgcgtacttattttcctaaaggtcaacaaggctaatattaacatgcttcgcagggtcgagccatatgttgcatatgatttgctagtttgctcttgttgaccgtgcatggcatgtaaggagctggatctgtacagtgacaacatgtacctcaggagcacaaggtatgcaaatacaatagcttgttcatgatcaactcctcgctgtacgaaaagccattctctttctgctgtacgtattctgcagttctgctgatcagctgattgcgggagcacagtggtgttgtacttataaggttagctatgagtaattctaatcttcatgtacaatagttttcagttcctatatatgtggttaagtgtccataggttatgccataccttgtaaactaaacatcaattataagagagttgtgattgcggtcatcatagtgagatatgtgggcgctatgggagatgcggcaaacccgcgtctgtgacctttacgcttctattgtgtgcttttaatttctgacacagtgtatgtaaccaagttcaatagcaacgatgtctatctgcatgtgtgaagtatatgacttggtaataaatatgaatccatgtacatatatatacctgactttgac

SEQ ID NO: 33693 - DNA, 2375 bp, Zea Mays
aaacaagtccgtctatactcgtcgaatcgcgcaggcacgcgcaacgcaaaccacggccggacttgtctgctcccatcctcacctagtttcaaaatttcctctgttaaaccctacccacccgacgaatccctcgccagatccaaccagctcgccggaggaatacttcgggaggttagcgtggagagagagaagtaggcggctgagggagggttagagctgggcgacgccgtcgctgtcatggaagcgcaggcgacggcgacggcgacggtgaaggaggcgctcgcggcgctgtatcaccacccggacgacgccatccgcaccgccgccgatcgctggcttcaggagttccagcacacgctcgacgcctggcaggtagctgacagtttacttcatgatgaaagcagtaatttagaaactctcatcttttgttctcagaccctcagaagcaaggtacaaagggacttcgaagagttaccctcagaagcttttcgatcattacaggattctttatatgtattgctgaaaaagtttaataagggaccacaaaaagttagaacacagatttgtattgcaattgctgccctggctgtgcatgtacctgtagaggactggggagctggtggaattgtgaattggctaagcgatgaaatgaaagctcatccagaatttattccaggcttccttgaactgcttatagttttgccgcaggaaacttctagttataaaatcgcggctcgtcctgaaaggcgcagacaatttgagattgacctttgttcatctgctaatgttgctattgatttattaactgcttgcatggccattgatcaactgaaagaacaggttttggagggtttttcttcttggcttcgtttctgtcatggaatctctgcctctgaactcgcatcacatcctttggtccatttggcactctcttcattgaactctgatcaattcttggagccagctgtaaatgttacatctgaactgatacatgctactgtatctcatggctctggtgctattgctgagcgaatgccgctcattcaaattcttgtccctcatattatgggtctgaaagagcagctcaaagatccatctaaggatgaagaagatgtaaaagctattgctcgtttatatgcagacatgggtgaatcctatgttgacttgattgccacaggttcagatgattcaattcaaatagtgaacgcattgctagaagttacttcacttctggaatttgatatttcgtctatgacatttaatttctggcaccgtcttaagcgtaacctgatcaagagggactcttatgtatcatatggatcagaggtggcaatcgaagctgagaaaaacagaagattacaagtatttcgtccaaagtttgaaactctggtctctctggtcagttttcgagttgaataccctgaggactatcacaccttttccgaggaagaccgcagggattttagacatgttagatatgctgttagtgatgtgctacttgatgcaactgaagttcttgggggtgactcgacgctaaagctactttccaccaagctagctcaggcatatgggagctgcaacaatgagcagaaccccaagtggcaacctgtagaggctgctctgttctgtatacaagcaattgcgagatcagtctcaattgaggagagggaaattttaccacaggttatgtcactgcttccctgccttcctcaccatgagcagttgctacaaacagtttgttcaaccattggagcattttcaaaatggattgatgctgcaccagctgaattatctattctaccacctttagttgatattctcaataagggtatgagtacatcggaggatacagctgcggctgcttctatggcctttaagtacatatgtgaagactgtaggagaaagttctcagggtccctggatggcctcttccagatataccatattgcaatcagtggagttggtggttataaagtttcttcagaggactcgttgcatttggttgaagccctaagtgcggttattacaacgcttccaccagaatctgctagtagagccctggagctaatctgccagccagtaatcaatcccttgcaagaattaatccagcaaggtgatcaagttcttcaacaagtccctgctcggcatttaactgtacatatagaccgactatcaagcattttcagcaatgtgaaacaaccagaagtagttgctgaagctgtatatagatattggccgacactcaagagtatctttgatcaacgagcatgggatacccgtaccatggagtcaatatgccgatcttgcaaatttgctgatctggccaccaggacccccttcgcctgctgtgatagctcggggcccctctacatgca

SEQ ID NO: 33694 - DNA, 148 bp, Zea Mays
cttgggggcaccttgtgtagaggccagccggccggcgaggcccggtgcggcaccggctgcagaagctggtgccatcttaagggccttccggggagccagaccggtcgaaccgtgcctccgtttgctgggaagaaagggaagagcagga

SEQ ID NO: 33695 - DNA, 2736 bp, Zea Mays
gttttccggtgtccccggctccctgcggccgcggcagcgagcagaactggcggccggcccggctctcatatggcggagccggagcaccctcccctctcccgctcaaaattagcgccaagcggccaagccatttgcttcccgctgggtattatagctaactgaaaataaaataaaatgccttcagctcgtgagacgccaggggcattacggtaactgcgcactaacgctcacccgcgcctccgggttctgggctttagcgctcgctcgccggtcggccccaccattccgcgcagttccgcgtgcgaggaacaggaaccgctgctgctctctgcctccgctccgatcctgcttgcgctcgagaaccgcgacgccgacgcccttccttgacgcgttgttgatctgcgagctcaggcaagagtgcaagaccaactctgttggctagagtattgcatttatacagatctgcatattagagaagatttttcgtatattttggtgaacatgaagagaaaggcgcagtcaggaaaatctcgctcatggtggtgggacaatcatattagtccacaaaattctaagtggctctctaaaaatctagaagaaatggagaagcaggtgaaacaaatgttggggctcattggcgaaggagagttttctgcagaaaaagcggaggtgttctatgagaagcggcctttacttattactcatgtggagaacttctattgcatgtatcgtgctcttgctgcccgatatgacgatgtaactggacaactacgcaaaaacattccatcatctcttcaatcatatggctcggttggtgtctctgaatcagattctgagacacaatgtttcacatctccagagtttgatatgccacagcaaaagcaaaagcctggaccagatttccttgatttttccattggctctggtgttagctctgatgtatcaaagaagggtagtgaaaggtcttcatcatcttcagattctgattcagagcttgatgaggccaaagaggaaaatggcagtatgttttatgccttgagccaaaaaaatattgagctagaagatgagcttcaagaagtaaggggaaaacttgatgctttagaggaaaaacatgctcattgccaaagagatttgagtaccaactcaaaagatactgaacatgaagaaaacctgcacacttcagatgtggaatccaacacccttcagaaggatgcagaagaaacagattttgctttagagagctcaacagaagtcaacagcgaaaaggaagcattggaagctgtgctgtttgagcggaaaaatgagattgaaatgctgaaaggtgcaatggcctcagctgctaagcagtttgaagttgaattggcacatcgtgatcttgaaattggtaagtgcaagcatgaacttggagtactctcggagaagtatttgcatgataagtctactctcgaggatgagcttagaaggctccatggaataatcaagaatatggaaggtgacttagaaaaaatttcacaggagagattgcagctcaggtctcggattaaagagctcgagcaggcagctcacagcttagactattcagcttccgagatagttgagctacaagaagtaataaggaatacacaagcagaattagaaaaggtcacaaaggagaaagaagtgctcaaagaacacgctaacgaatttgagcaacttttaaagggccttgaggtctcaggtacagaggttgcaaagctaccagaaactatcaagaacctggaagcccagctagaaagatccttcgaagagaaatcagtactccaagaccagatcaagcagctggagcaggttatgtctgaatcttcggagaaacattcacatgagcagttctctcttactgcggatcttttgaagttatctgaagtgaacgcttctcttgaagacaaattgtccgatgtggcggcagagcttatccaagtttatgctgacaaggaagaagaatctctcgataatgagaagcaaatttctgtcctcagtaaagatattgctgatctcaggagaaagcttgaattgttgtcatctgagaaaaccacagttgatgatgagttggccaaactgctagctgatattatgattcgtgacgaaaagatgaagcaaatggatgaccacctaaatcagcttcagttagagcatgccaagctgatggcagaatttgacagtgcacacaggtccttgtcagagctgcatgcgcaggtttctgagctggaagacgaggtagagaagcagaagcttgtgatatccgagagtgcagagggaaagcgggaggccatcaggcagctgtgcttctccattgaacactaccgcagcgggtatcagcagctgaggcagctgctgcaaggccacaggaggccgttggtgatggcaacctgataaatgaacaaagtccgtttgccaacaaattgcgcagttgcttgtctctgggcgtgttctatttgtagctctgttctttcacaacttgtgccgtgtagtttatgttataaagaattctgtgtggtatgtgtgtagaatgtaatgggatgggatatttatgttgttccttcatactcctgtggctgttttctttttccttgctgtccgctgatgaatgttatgatatgcttgaaccttcgtcttttcagtcacgactttatgtggtcaataactgaactgcacaatggaactcccttttcaatctaagacgtgtttggcagaaacata

SEQ ID NO: 33696 - DNA, 3892 bp, Zea Mays
acgaaaatagaagggttggctgcgtagtgcagaggccaagagtagggcacccggcgaaggagggctgggccgctgggggcagtcacgcacgcaagcacccctcctgttccatttcaccacggccgcggcctttgtgtggctgtggcctccgtctcgtgctatctcttcttcgagttcttccgcctcccctccccttcctccccccctcggcaaagcccgccttctctctcggtctcgacgcgacccgccgctccctgcggctgcgcgcccaattcacgccccactggaggcggcggcgagcgcacgagtgcctcagcgccgccgatgaggctgcgccgcgccatgcagacctcgccgcccaccgtgtccgcgtcgtctctagagtgcgtgagctcgtgcagggccgcctcgtggaaggggggcggaaggccctacgaatgcagcgtactcttgtgcgcgtggaacgcgccgcgcgcgctcacgggcgcgctcgccagcaccgcgcagtgctcgtcgtgcggccacgccgaggccggaggcggctggaggaggcgcgggcggtcgcgtcggagtaacaactcgttaccgcgcatcaccctggatgaggacatcaatagagggaaatttggttatgatccatcgcgtgcctactctacaagttttgtcagatcttggtctactattgttgaccgaacatggagatcttactgctattcatcatctgattctttcatctctccagagactttgtgggaggatctcaaaccagctgtttcatatcttcaacctgaagagttaaaatttgtgcatgatgctttgaagttggcatatgaagcacacagtggacaaaaacggcgaagtggagaaccattcattattcatcctgttgaagttgctcgtattcttggagagcatgaacttgactgggaatccatcgctgctggtttattgcatgacactgttgaagatacgaatgtggttacttttgaaagaatagaaaatgagtttgggccaactgtgcgacgtattgttgaaggggagacaaaggtgtctaagttggggaaacttcagtgtaaaagtgagggtagcacaaaacaagatattaaagcagaagacctaaggcagatgtttcttgccatgacagaagaggttcgtgtgattattgtcaaactggcagacaggttgcataacatgcgcactctcacacatatgcctcagcacaagcagtatgccatcgccgtggagacactgcaggtctttgcccctttagcaaaactccttgggatgtaccggataaagtctgagctggaatatctatccttcatgtacgttaaccccactggttttgctgaactaaggaaaagagttgaagacttgtacaagtcccatgaacaagaattggaagaggcaaatagaattttaaggcaaaagattgctgaggatgagtttctcgatcttgttagtgttgaaaccgaagtgcgttcagtttacaaagagctctacagcatttacaaaactacactcaaatccaagagttcaataaatgaggtgaatcaggttgctcagctgagaatcatcataaaaccaaaatcttgcaatggtgttggcccattgtgcactgcacaacagatctgctatcatgttcttggccttgttcatggcatatggacacccattcctcaagctgtggaagattacattgcaactccaaaacctaatgggtaccaaagtctacacacaacagtgataccatttcttaacgagagtatgttccatttggaagttcagataagaacagaagatatggatttaatagcagaaagaggcattgctgcacattacagtggaagaagggtggcttctggacctgttggccttggaatatcaagtggaagaaatgccaaggggaaagtaatctgcttgaacaacacagactttgctctgaggattggttggctcaatgcaatccgcgagtggcaagaagagtttgttggtaatatgagttctagggaatttgttgatactatcacccgagatcttctaggaagccgtgtctttgtgtttactcctaaaggcgagattaaaaacctgcctaagggagccacggtggttgattatgcttatctgattcatactgaaatcggcaacaaaatgattgcagcaaaggtgaatggcaatctggtttcaccaattcatgtacttgcaaatgctgaagtggtggagattataacttatgataaattatctagtaagtatgcattccagcgtcaccagcagtggctacagcacgcaaaaactcgcagtgctagacacaaaattatgagattcttaagggagcaagctgctctttctgctgctgaaattactgctgacgcagttaatagttttgttgctgatcttgaagatgaaagtgatagtgagctttcacttccaagcaccaagaaagaagatagtaaattcaactgggagaagatattaagttctgataaattattctttgtcaacaaaagtagtgatggctttttacctgttaataatgtctatccaaaggtcaatgggaagcaaaacaaaactgttaaggatttgggcatcaaaatcaatggtcattctacaattcgaggtgatagcttcagtgagttaatgcaccctagcaattccacctgcaaggaagttttccctggtttggatgactggaaatctggtaaaatttctggttggcataatacggaaggcaactctgtccaatggctttgcatagcctgtgttgatcgaaaagggatgatggcggaggttacatctgctcttacagcttgtggaattactgtatgttcctgtgtggcagaagtcagtaaaaggaggggaatgggtgctatgctgttccattttgagggaagctatgagaacgtggtcagtgcttgtttgagtgttgacatgatttttggtgttcttggttggtctgtggggtgtagctggtgtccattgggtgctcttgagtgctaatgggtatcaagagacgtatactgcagtagttcaccactaatactatcttcctccaagatgatgataatgttggaagcaccaagacatcggtggctcaaaattttgttggtcagatccttaaaatctgggaacatagagcttgtccatattcctcattttggaaacgttcgtccgttccggagacgtgggaacaatctcgtcccccatctcatccttgtagtgttaaaatcctttttaagcacgttcccgttcctcaacctcatcgatccagaaacttggttgctaaggtcagatcatgattggacaggtgagcgagtggaatcctttacttctctgtcaaatcagaaagtgagggtgagcaaagtagaactagatatatatggttcattctgaaagtgagtgtacatagcagagtgagtagggttgggctatggctaacaaatcgtacatatgatcatgtaaaacactgttttgcattgcgaattacactgtttacattgtgtagtttgaaataagagatagagatgaataagctgccgactatggagagtcagtgcatgctgggattgattggattatacagaaggccttgtaaaagattgttaagggcggttcttctcactttgtggttcgcatatactagtttgcttaaatgtgcagctagaattttgacctggacgctaattccaaattttgtctgtgtttagtttcctacctctgcatgtaaatgttattgtatagcttcagttttgcgagtcaaaatttgagcatacttaactggcagatgcacgcttctggattacttgccatttcctgcagtatgaatggtaacttaattagaggtttggttctgatgatggtgaccctttcatgaacatctccaaataagatg

SEQ ID NO: 33697 - DNA, 2119 bp, Zea Mays
atccccaatcgaaacggctcgcagctcatctcaatccgatccgatggcccgcgccgccgctcgcctcctccccatcttcctcccatggcggcgtcctcccccgccctgcctcctccgccggggcttcctaaaccctagcagccccagaacctccgcgcgcgtcgacaccctcgttctccctggagacgagcgcttgcccttcccctcgcccccacgcctcccgaaccagctgcgtcctgactacgggagtggcggcggaggcggcgctccctcgaccatcgcggccatcgtcacctcactcggcggaggccctgcagcggtggggatcgtgcggatctccggccccgatgccgtcgccgtcgccgaccgcgttttccgcccagccgggaccaggagggcgtcgacgccgtggcaaccgcgcagccactttgttgagtacggactcgcgctcgacgcggacggcagcgttattgacgaggttttggtggtgccaatgctctccccgaggtcctacacgcgagaggatgttgtggagcttcagtgccatggcaacgatctctgcttgcgccgcgtgctcagggcttgcttggaagctggagccagacttgctgatcctggtgagttcacccttcgtgcattcctgaatgggaggttggacttggcccaagcggagaatgtgtctaggcttatttcagcaaagtcagcagctgcagcggactcagctttggctggcatccagggaggcttttctaccctagtaaagtcattgagatcaaggtgcattgagttgctaacagaaattgaggctcgtttagattttgaagatgagatgcctcctttggacccagtgatgcttgtcagcaaaattaattgtatgaggaaggaggttcaggatgctttggacacttccaattatgataaattgttacaatctggtctacagatagcaataattggccgtccaaatgttggaaagtccagcctccttaatgcttggagtaagcttgcagagtgaaagggctattgttactgaaatagccggaactacacgggatgtagtagaagcaaatgtctcaattaatggtgtacctgttactcttttggacactgctggtataagagaaactgatgatgttgtggaaaaaattggcgtgaaaagatccgaggctgctgcaatgggagctgatcttattgtaatggcaataagtgcagttgatggatggactgatgatgacactaaacttatggagcatgtttcggtaaataggaagtcctcaggttctgcagttccgatggttcttgtaatcaacaaggtagattgtgcgccatttgttcctggagaacagttcaaacaattcagtggcctcttcagaaaacacgtacagacatgtgcagtcaccggtaaaggcatttctgatttggagagcgctgtaatagaggtcaggggtattgagcatgtgccttctgagggacgaaggtggaccgtaaatcagaggcaatttgaacagctgttgaggactaaagaagctttcgcacgtctagagtcatcaatcaacgagcagttaccaatggacttttggactgtggacttgagggaagctgcgcttgcccttgcaacaatcagcggggaggacatctccgaagaagttttgagtagcatattcagcaaattctgcatcgggaaatgatctcgcaagatgctgcatccagtagtttggagcagaagctttttccttgactgagaacaggaaccaacatgctgagtggcacttggttcgcggcatcagaatggtgaacaggcgtgcttgttctctgaggtgccacaaagaacacaagggaggtgaagccctgtccatcctagtgcacaccgtatagatgctaaggatggaaccatcgagttcctgtcttcgacgtcggatacgaatcctgtatactcgtggttgatatgagaaaattttattagacctaattgagaacgcaaacagtttcattcatccgtcttgctgtacgggacgcaacatacccgaattgtgaccaggagacattaaggtgccgtctggttcagacgttgtaacaggaatcgtaatgagatcccttaccggcggtaatgtaaaaagaa

SEQ ID NO: 33698 - DNA, 340 bp, Zea Mays
gtccagcctacgcaagccacctccacgctccgaccttcgaccctgcgcctgtgtgagacctgcgtggcccacagcctcggccactgtcgcgcggagcccgcccccctatggtcaccggccgactcgtccaccatggtccgagtcagagcagtggcacggtggccgtctccacctgcctagcgccgcccaagtcgccgccccgcccccgccactccgccaggccacccatggcagcgcggctagtccctcgtcggctcgctcgcccctgcttgctcgtcccacggtcccagcttccctcccagggactgaactgggaggttgcaatgaagcagtggtggct

SEQ ID NO: 33699 - DNA, 2084 bp, Zea Mays
gcaaggttcagtgtccttgggcagggcatgcaaacctgcgtggagctgaagacaggccacgtatgattggtccatgcgttgctggcacccttggagtctctcttcctcatgctgtggttgagctcggtgacacctgctccttattcaatgatataaaacttgattcagtgaggatgctccctgtccttaagtctggtccgtgtttatcaccagagtgacacagctcttgagttcaagtcgatatacatcctctccccagccaatagctcggtctgcccttgtgcttagcgctccaacactcagtctggtgaccacgctcacccaactgctcacctcaccgtggccgagacgcttggagcaattgcatccccgggtggtcagaacagtgccacgctgccgcagaacagagtcgtggacagctccaccgctggctttccaatccatgttgatctcgaatgatcttgtgcgagcactgaaggtcgtcgacgtcgtggccagcgagggcgggtgcttggctcgagcatgaaaacattggagcttgttaacatggacgtgttttgacggtgattatgatgcgcctgaggtcagcgccgctgtggctggttgggccggctgagtgagtttgggcctgatattgttctaagttttgtcttttctattagctgagagatttgaaatggtgccaaaatttgtagaaaattccaaaaatcatgggacaaaatttgttggatgtataaaatcaaaagctctctaggaaagttggtttctggatttttaggttggttaccaaatattaagggatttaaatgtgctcttggaaggattgtttggattttaaaaataaaattacagtgccaaaacttatgaaattttttgggtaacattttttggtcatttgagtttgtggtaaaggtttgaggctgttcagaatccatttgctctgaaaactttgtaagccccaaaataaaatggttaatccctaatcaagtgtgagttagtgctttggaaaggggataagtttatctaaggaagagatgcagtttcttaagaagttttaagcttttggatgagatataagttggattagttccctggtttacctaagcgaattcaaattggtcacttttattaagtgctaggttgtctagatgtgtatgcctatcatatacttatttaggagtgtttatattccccacctctccttgtgagagtttgcatttcatatcataacataagcatacatgtatttgtaattgacttgtagaacacctagaagaagtggtgtttgaaggagtctactccagtgcctgctcatcaagtggatggagctatctaactaaaggttgggtagaaggatctagaacctcttctctgcaacaaaggcaagccccggtgcatttgccccttccttgtatttttaaaaagacttttatacacttaagtctagtgaaatgggcattaagtttataggaattgcttagaaactatttgatgcattggctaccttgatatccatacctttatagatacttctgatgaagtatcaaaatatgatttacaaaaatgcttagccctgcttagatcttgtggatagaggttgtcttttgcattaatgcctagctcaggggttatcttgaggaaggatgacttctacctgcaagaatattttcattgggagcatggtgggatcttactgcaaagttccctataatgctcttttcatccttaggaacacaaaacaatcctaagggtggaagtacttaacttgagacttgggctaggaacaggtgatgctccacctaggttaattaaggattggatgtgtatgtaggcctgtatgatcaaggactatcttaactggccacatgccctggatatgggacagagtaagcttgaacctggctattccatacgtgaaaagacaaccgcgcactaggcgtgggagatggtgggagtagcgtgtaccctctggctagaggctggacggaggagtattgtgctctcgggtagcgcagaccagttcatgttgtggaggatctgtgggaatgttgacatatgcagggttaagtgctacatatgtcgtg

SEQ ID NO: 33700 - DNA, 6644 bp, Zea Mays
caagctacagagagagaaaggacaagggaggagaagccgccatgaagcagcggcagcagcagcagcctcctagtcgtccccgttaaatccctgctcgcccccggtccgcgaccccgacccaacccgtttgtgtcgtaggcggtttgcactagcgtttccgtgaggtgggcgaaggcgtccgtgaccgaccgaccgaccggagcttcatgcgccaggggcggcggcttcaccccgtcgtttgatgggcaacgcatgcagcggcgcccttagatccaagtacctgcacagcttcaagcacgccgcgtcgcagcgccacgactccgagtacagcgccagcgccgacgactcgcccaggaagcccacaccgcccgccaccacggacgcccacgcgccggcgccgcccgccgccgccatgaggcgcggcgcggctggcgcgacgccggacctcgggtccgtgctcggccacccaacccccaacctccgcgacctctacgcgctcggcaggaagctcgggcaggggcagttcggcaccacctacctctgcaccgagctcgccacggggatcgactacgcctgcaagtccatctccaagcgcaagctcatcaccaaggaggacgtcgacgacgtgcgccgcgagatccagatcatgcaccacctatccggccacaagaacgtcgtcgctatcaagggcgcgtacgaggaccaggtctacgtccacatcgtcatggagctctgtgccgggggcgagctcttcgaccggatcatacagcgcggacactacagcgagcgcaaggccgccgcgctcacaaggatcatcgtcggggtcgtcgaggcctgccactcgctcggggtcatgcaccgggacctcaagcccgagaacttcctgctcgccaacagggacgatgacctctcgctcaaggccatcgatttcggtctctctgtcttcttcaagcctggtcaagttttcaccgatgtagttggtagcccatattatgtagctccagaagttctgttgaaaagttatggacccgcagctgatgtatggacagccggtgtcattctttacattctactgagtggtgtgcctccattttgggcagaaacacaacaaggaatatttgatgctgtattgaagggtgccattgattttgattctgatccgtggcctgtcatatctgatagtgcaaaagatcttatcagacgaatgctgaatcctcgctctgccgagcgcttaacagcacatgaagttctatgccatccatggattcgtgatcatggagtagctcctgaccgtccactggatccagctgtcttatctcgcattaagcaattctctgcaatgaataagttgaagaaaatggctttacgagtaatagctgagagcctatcagaagaggaaattgcggggttgaaggaaatgttccagatcatggacactgacaacagtggcgcaatcacttatgatgagctaaaagaaggattgagaaaatatggctccacactaaaggacactgagattcgtgatcttatggaagcagctgatattgacaacagtggaacaattgactacatagaattcattgctgcaactttgcatctcaataagctggagcgtgaggaacatctcgtggcagccttttcatatttcgacaaagatggtagtggctatatcacagtggacgaactacagcaagcttgcaaagagcataacatgccggatgcttttcttgatgatgtcatcaacgaagctgatcaggacaatgatggccgcattgactatggagaatttgttgccatgatgaccaagggcaatatgggagtcggtcgaagaacaatgagaaacagcttgaatatcagcatgagggacgcacctggtgcgttctgagacttaacacgatgtacagcttgttgcttggctacttcctgccttgctgccctacgaaaccttctgcattttttcaagatgttgtcaagtgtctgtgtggatgtgtttttctggggattctgattcaactctggtgattgattccatgaaatgcataacaagatgcccatgttacgcaagaagccagattgtaaatgctgctgcccctttgactctcagaaacactaatgctcagtgaaaagaaatcgctccctattgattgatggcatccgttcttggatgcacgctgtatctcaaagcaatgtgttgctccgtttggatgaacatgtactcaatatactgtttcctgatactacctccatttttttatttgacgtgagatagtacaaatttacactaacaaacatcaaattaaaaaaaatcggagggagtacttgccatgatgtaagcatgatctagcgatctggccgtctttatttaggctggagcgaatctatagattatggataaggaatgacgaaaaaagataacatcaagatattctatgatactctcctcaaccaatgtcaacgaaaagaactatgcaagaatccatggaccatggtcagtggtcaccactcaccagtaatccccgcaagagcaggaaccaccattgaagtggtggaatcgcacggcatctcgaatcacgaattctcggccagtcactgtggatatcagcttgatcacagtgtgacagtcgccgcaaatgcgcagattcttcatgatgtggatcggcatccaggtgggcaaggtcatgagcccgaatgctacagctagcttctcgctgtggtgaatctcggagcgcgtggagtctgtcctcacgtaccctaggcgcgcgatcttctccatgagctcatctagcttcttccgaatcgcgagaacttggggatggctcacgtcatccgctttgaagacgtggaccttgttgtcaacctccatccagctatagcccgggttcttttttattcccttgtccctcatcagcttccttatctgcgcagagtcatctgatttcccggcatcggcataaatcttcgccataagcatgtagctcccagaatcaggtgagtccagctcaaacacatgtttcgctgcaagttccgcgagctcattgttgccatgtatcttgcaggcgctaagaagagctccccaaacctcagcggttggtttcatgggcatatcgtcaatgagatccttggcttccgtcagatgcccggcacggccaagaaggtctaccatgcatgagaaatgctccaaacctggagatatgttatgggccctcttcatcatatcaaaataaaatttcccctcctgcacgagtccagagtggctgcagcctgacagaactgcaacatagcttatgtagtctggctttgcacctcttttaagtatgtcatcaaagatctctatggcttgttttcccattccgtgctgtgaataaccagtgatcatggcattccaagatacaatatccttcacgttcaggaagtcaaatacctttcgagcttctaaaatccttccgcacttggaatacattgttatgactgcattcgcaacagaggtgtctataatgagaccaacctttacagtgcgaccaataatctgatctccaagtttgtttgcacctaagtctgcacagcctttgaacaatgtgacataggtaacccagtcaggtctaacatactcctcacttagcatgaccttatacatcctgaggccatcttcctcagctccatgctgtatatatgctcccaacatagcattccatgtaatgacattcttttctgacatgccatcaaagaactcacgagcttttgcaacgtttcctacttgagaatatgcagttatcatgcttgtccatgatacaatgtccttttcattcataaatctgaatatagcttcagcactctggagattgtcgcactttgcatacatggagatgagagaattggagacgactacagcttgaatctgcccacttttcagacaaagtgaatgtagttgcctcccaaggcacaaatccatcctgctgcagcagccacttataagagtagccaaagcgaactgatcaagtgtcatcaactcagctctcatctggttgaacaattcaacagattcagtgaaacacccatactgcaagaatcctgagatgagaactgtccaagccacattgttacggtcatgtaaagagttgaagacccccttagcttccttgaaacagccagattttgcatacagttcaacaagagcacttgcaacatatggatcaatgtgcggtaggttccgaatcacctgagcatgaagttgcttaccccatcttaaagaagataatctagcacatgcagtaagcgaactagtgtatgttgttgaatcaagacgcacccctttgctttgcatgtctacaaccatatcaagggcttctctgactcggccactctgagacaatgctgataccatcatgttccacgaaacaacatcacgttcaggcatgctatcaaaaagctcaagagcatgatcgacaccatatgtcttgacatatcccgctagcatactgttccgacagaacatagtgggttctttaatgcgaacaaacaaccttgaagctaaatccacagctccacatctcacaaacatgtcgacaagggcagctgctacctcactatcatcctgagaatcgaacttctgaaccatcgcaagcagctgcagcgccaaactgtgccatccaagggcgccacaagacttcatggcacaagctaatgtgaatgcatttggccacgaatcaccacttcggtgcatggacagaaaggtttccaaagaaaccaagtactgtcggctctgaaagtatccggacatgagcgtgttccacgaagccacgtctcgcgcgggcattctaccgaacagctccacggcatcgctcagtcggccgagcttggcgtacccattcagcatgacgttgtgggtgatgacattaggatgggcgatgtccatcagaagcaagcgtcgggcgtcggagagggctccgcaggagaggtaggcatggaggagcgtgttctgtaggaagacggcggacgcgaggcccacggcgacgaggcgaccgtgcaacgcgcgggcgccggcgagcgcgccgcgcgcaccgcacgaacgcagcgcgtcggcaaacgcctgcgtcaccgccatgtgggaggcaaccgccggaggaggaggagacggcggtgacggccatggggacgccaccattcaaacgagtttcttggagcagaaatacctgacgtgcatgacttatcatccggtgtgctttgtcaggggtggacaattgaaacaaagtattattcagctgatctttccatctggacagcaaatcttggtgaagaattttctcttgattccctccctcatttagaccgggtggctgccctcgttatggtcttcgatatgagtgatgaatccaccttgcttactctgcaaagctgggctgccagtgttgatatccagaggtttgagatcttgttatgcgttggaaataaagcagatcttgtacctggtcatagcgtgcatgtagaatataggaggcgtatgcaaaatcttggggagtcaagttctgatccacaccctgattatttcaattttgggataaatgaaagtgagggttgtagcttgttatctgaggaagaaccatgcataaagatcagaaactcgactgcacagtggtgcattgagcagaacatagaatatattgaggcctgtgcttccaatgctgactttgataagtgtctatcagtggatggtgatagccaaggcttagagcgactccttggagctctttctgcacatatgtggcctggaatgattctgaaatctggaaacagaataactgtcccatccttggttgaaaaacaagaatccacagatgatgaatccaactatgattttgagtacgaggtcttgtctcatggatccgatgaccagtgggaatttattggagagacaagtacatccagaagatttgagagaccaaatgagcctgatggtgcacaggatcacacacatcaagttgtgaatgccggtactgactcttcagcatccaactctcccccgactaacacacccacagaaactgctgaagagaatactgtaactcagagcaacaaaaccgacaatagtgatcatgtggacaaaaccacagcatatagcactgaggatcatcaaagtgatcttcgagaggctaaccatctttttgaggacgagcattatggtctggatgacctggagaaaataatgtcggagattggcaacatgcgatcaaacttaagactcatgcctgacttccaaaggagggagatggctgcaaagctagccatgaaaatggcagccatgtttggtgatgatgatgaagaggcatttgatgatatctaaggcaattcatgtaactccaccttgctgattcccagacagggttgcagatgattgaaagatggctttgtacaagccgacgagcctcttgccacctagggcctttctcatgataatgtcttttttcttagtgaaaatttttgtggctgttgagcgttctatatgccttgtaagatgtattattatgaactttaactccttcaatcatccaggtggaaattttgtggaccatggtgcaattgaacaaaacggtgatattgtagaaccaaagacaaaaaaaaaaagataacaagtttgcatattatagtcc

SEQ ID NO: 33701 - DNA, 1634 bp, Zea Mays
ttccttccctccccctccctgctcggtgctcgcacacgctggcgcggcttgcccccacgctgcgctcccaccaccaccactatataatccccgatcgcctcacgcacacgcaccgacccaccggccgacgaggggcgaccgccgcaacacaaatccacacgcccgccgccaccgccgccatacggacccactcctcctttgccctggtgcgagcaggcttcggcagcaaaccccgcagactgctcccggacgagggagaacgcgcggggctgggctagccgctacccgctagccaggggaccggggcggaggcagcgaggaggtacgtatggacaagtacgaggcggtgcgggacatcgggtcggggaacttcggggtggcgcggctgatgcgcaaccgcgagactcgagagctcgtcgccgtcaagtgcatcgagcgtggccaccggattgacgagaatgtgtacagggagatcatcaaccaccgctcgctgcgccatcccaacattattcgcttcaaggaggtgatacttacaccaacacatcttatgattgtgatggagtttgcagcaggtggagagctttttgatcggatctgtgatcgtgggcggtttagtgaggatgaggcccggtatttctttcagcagttgatctgtggagtgagctattgccattacatgcaaatatgccatagagatctgaagctggagaatgttctcttggatggcagcccagctccacggcttaagatctgcgattttggctattccaagtcatcagtgttgcattcaagacccaaatcagcagtaggaacgccagcatatattgcacctgaggtgctatcccgtcgcgagtatgatggaaagcttgcagacgtatggtcctgtggggtgactctttacgtcatgcttgtgggagcatacccatttgaagacccagatgaccccaagaatatacgcaacaccattcagcaaataatgcaagtgcaatacaagataccagatcatgtccacatatctacggaatgccagcaacttattgcccgtatctttgttgccaatccaatgaggtactttttacgaatattctccagagaatcacaatgaaggaaataaagagccatccatggtttttgaagaacctaccacgggaactcacggagactgcacaaggcatgtactacaggagggataacagggtcccttcttattcagaccaaacgtcggaagaaatcatgaagatagttcaagatgcaaggaccatgccgaaatcatccagatcaggctatgggtggagcagtgagtattcggatgaagaagaagagaaggaagaggaacacagaccagaggagcatgaggaagaggaagatgaatacgataggagggtgaaggaggtccatgcaagcggagaactccgtatggacgctcttcacatatgaaagctagtggaagagaaagttgcatgtagataactgggttgttgcggatctgaaggatccagtgggatgtatgcagttttggcttgagaatttgcttctgtttgtcaattttcatgtaacataatttaatacaccgagacaacagactaccatgttcttatattggtaaatatgaagcatgtaccttctatctgcat

SEQ ID NO: 33702 - DNA, 231 bp, Zea Mays
cgccgagcagagggcagtgagatgggaactcgaccgtgggagagagagagcgagctgcagataggagcggccatggcaggaaggggaagagcgcgcgtgggacagggaaaggggcgcgctgccatgggcgatctggagagagctccagccatggagtgagatggggcgagcatagggaggaacggctggtgtctggtgagcgagctgggggaggaagagcagggaacggac

SEQ ID NO: 33703 - DNA, 1772 bp, Zea Mays
aatagaattaggcctaccctccgagagtcagatctgaggcgcgccacccgcgaccaccgcaccgcgtcgtcctcctcctcgctctagcgacgccttctggaagctttgggaggccgcgctacgctacgcgacgctacgctccggcgggcggtcgggatggggctgttcgaccggctgcccccgatggaccacatgcggtccgagaagatgtgcttcgtgcagctcatcatgcccgccgagagctcgcgcctcgccgtcacctacctcggcgagctcggcctactccagttcaaggacttgaatgaggataagagtcctttccagcgtatatttgtcaaccaggtaaagcgatgtgcagaaatgtcacgcaaactaaaatttttcagtgatcagatcaacagggcaggtttaagatcttctgttcgacctgcacttgaaccggatattgatctggaggagctagaggcaagattgggtgaacatgagcatgaactgcttgagatgaatacaaatagtgacaagctaaaacagacatacaatgagcttcttgaattcaagctggtcttgtcaaaggcaggtcacatccttgcttcttctcacagccatgcagcttcagctgagcatgagctagatgaaaacatatatgacaatggaatacatgagggaaatgcctatctgctcgaacagggagtgcatcaaggagcacatggacattctggagtgagatttgttagtggaataatattaaagtcgaaggcacttgcttttgagcggatgctttttcgagctacaagaggaaacatgttattcaatcaggcatctgcaggggaacctgtaactgatcccatatctggtgaagagagaaagctgtttttgtagttttcttttctggggaacaagcaaaagcaaagatactaaagatttgtgattcatttggagcaagttgctaccctgttcctgaggagatggtcaagcagagacaaattttcaatgaggtatcggctcgtctctctgacctggaagttactttggatgctggaatccagcacagaaacaaagctcttgagtcaataggatcacaattgtggaggtggacaatcatggttaaaaaggagaaagctgtatatgacacgctcaacatgttgaactttgatgtgacaaagaagtgccttgttggagaaggatggtgtcctatatttgctaaatctcagatcaaggattgtttgcagcgttccacaattcacagcaattcacaagttggtacaatatttcatgagatggacactattgaatcaccacctacatatttccgaactgataagtttaccaatgctttccaggaaattgttgatgcatatggcgttgcccgatatcaagaagctaatccggctgtatattctgttgtgacgttcccatttctttttgctgttatgtttggagattggggtcatggaatatgtctattactaggagctttggttcttatacttcgcgagaagagattttcctctcagaagcttggtagctttatggagttggcattcggcggacgatatgttattcttctgatggcaatattctcaatatactgtggccttatatacaatgagttcttctcagttccattccatatatttggcaaatctgcatatgaatgccgggacaaaagctgcagcgatgcacatacttttggtctcatcaaagtccgtgaaccctatccttttggggtggacccaagctggcgtggaagtcggtctgagctaccctttcta

SEQ ID NO: 33704 - DNA, 2024 bp, Zea Mays
gcagtccttaccaactgcccttccccaccccgctcccgcgtaatccaaccgctaataataaccgctgctctgattagcgcaatctccaccgctataattacgctcccgcctgcgcgcgcgggcctatcagccctagctagctacccagccgcctccgctgctcgcctcctcacttgcgcgtgtcgtgtcgtgtcgtgttgcgctaagtcagctgcttgctactagggttagggtttgcggctgcgcgctcgcgtgcgtgcatgcgcgtgggttggccgcggcagggatgacgccgcagcggtcgccgatgggtaccggaggaggaggaagtagcggcggaggcggcgggggaccgccggcgctacactacctgagcggcccgtacggagacaccacctttaccaaggttttcgtgggcggccttgcctgggagacgcgaagcgagggccttcgcgcgcactttgaggtctatggggacatcctcgaggccgttgtcatcaccgaccgcgccacgggccgctccaagggctacggattcgtaaccttccgggacccagagtcagcgaggatggcctgcatggacccatacccagtgatcgacggccggcgtgctaattgcaaccttgccatcttagggcggcctggtccagctgtgccttttggccatcagcatatggaccagaatacctatatcagcagaatgcatacggtccatatgttggacaacagtacgtgccggtttacggtggcccaaggacagtaggcccagcagtctacccatatgggcagtttggccaacctgtaccaagcgatcatgcttattctcctggttatgccccaagtcatgttctcccactgtcgaatcagaatgttagtgctgcaaatgttgtgcgcataccaccagttcagcaacaacttcctccaggagctccacgccctcagcaacagcttttggtccctgcccgtgcaccaccgttcccgcagaacaacatttctgaacaagcgacaggttgacaaggacgccagaaagtgacgaattttaggcatcctatagtctgcagcaggactaagaaaagccataccgctaaattgggcggcatgcttttttttcttgcaaattgttttcttttgcactctaaaggttgtcgttatccatggttacccgaacttcttataatgtgagtgtctgaagatgaagcccctcttgctcagcttctgtcagtgtgtgtgtacattccccatctcctgccagaaattctgatagctggtggtctgtgcatggaccaaagtggatggccggaaatggagtccggcctccaacctgtgtataataatataggtcatgcagtaggtccaaatcgtagaacattctttcaaaacatctggttgtgtatattaattctcttcttcgcaccttctcagtacctccagtgcatgttcccatgtctcattagagcataggtatttcagtgtcactgtgtcgtcgtcagcgagtcatgtacattattatcctgaaactgtaaactatatatcacctatgtcaactgtaatcaaataatgacagccctaccttgggaaagaatgtgatttgttgcaaattgcaacggatggggggaaaacatcggggcatattcatcatactattcgtctgtttctatggataagaaatactgcatacataactacagaacgagcaaaattgaaaatcgtgtttgttggcatgtaactctagtttatggttttgtataaaattaaaaacaatctacgtagcaaagccagtagtaacatcaaaacggttcgtagctctagtgctatatatataaacacgatcctggggatggcaatgggcaaatggtaacatggggctctgagaagccgaggtcacctgacttatatgattccatatccgtgtctttcttcctgatcccagcatatatgatgaacatcattggtaaaatgaatattaaaaagatgctccatagtccttaagctgaatgacagaccctgcagcatttttatacgtc

SEQ ID NO: 33705 - DNA, 2636 bp, Zea Mays
ccctggtgtcttggcgcctccgttttgtgtcgcattggcattttggaagtgcatgggttagtgggaatgtgaggagatatcatcatttagtgaaagtaaatcagatgataaacggttttatataattactccgaccaaaacacttcaactgaggactggttgtgctaatgaccgggcgacttggattgaagcgcttgtcactgcaagaagcgaatattcttttaatggggatttatcaggtgatcagaatgatgcatcattttccacagaaaagctcagaaatcgcttgaatgctgaaggcgttggcgaggccgttattaaagactgtgagcagattattcattcagaattttcgcagtaccaaacacagatgaagcaacgttgtgaagagtatttaagctttattggcactcttccacaggatgttgaggtagttaattcagtagattcaactgtccctgagaagccacggctagagctgttcaagcatgactgctccagctctggaaaatgtagtgaatatagcaacacagaatcttctgatgatgttggcaagcaagagattagtgaactatcagacggagatgaatttcatttctatgacacaaggcaaagtttcagtgaatttgcttctagtcctgctgacccgagaaagggatgtttaaacaacggaaatgaagatcataaatctgttgaatcattgacggttgacaaggctgagaaatatatgctatcacattcaaaaaggcgcttacagttgcctgaaccaatagaaaaggagaaaggagttagcctttggtcaatgatcaaagacaatgttggaaaggatctaacaagagtttgtcttcctgtttactttaatgagcctttatcttctctccagaagtgctttgaagagttggagtattcttatttgttggatcgtgcatatgaatgtggtttaagggggaatggtctgatgagaattctttatgttgctgcatttgcggtctctggatatgcatccacagattcccggccttgcaaacctttcaatccattgcttggggaaacctatgaagctgattaccctgaaaaggggatccgttttttctctgaaaaggtcagtcatcatcctatggtcatggcatgtcactgtgaggggaaaggttggaaattttggggagacagcaatctgaagagcaaattctggggacaatccattcaattggatcctaatggtgtgctaactttagagtttgatgatggagaaattttccaatggagcaaggttacaacaacaattaacaaccttatccttggtcgagtatattgccatcaccatggcacaatgaacataagtgggaatagacgatattcatgcaagctgacttttaaggagcagtctttccttgatcggaatcctcgccaggtaaagaaagacaaaaaaatcacccataagatttatatgggttgtgctaatatatggctctatggaaggttcaaggagtcgtcaaggatgctggtggaagcaaggttgcaacattgacggggaagtgggatgaaagtgtgcattgtgtcatcaacaatgatgcctctaaggtgaactctcatggtccacatcagagttctggttccactttgctatgggagaaaaatgagcctccagtcaatcctacccgctacaacttgtccgcatttgcaataacactaaatgagttaacaccagagctcgaggtacacatggaacatacatatatcccataatctgagttctgttagctcttaacctaaaaggctacgacacatcttttacgctcttgttaaggagaagctgccaccgacggattcaaggctgagaccagatcaacggcacctggagaatggggagtacgagaaggccaatgctgaaaaactgcgcctcgagacacagcaacggatggttgtacacattttacattgctatactttttttttctcatgaaagctacatcatgatcactgatcgactccatttctacattgtttgggcactgcttgcaccttgagatcttgcatgtacatggtggactgatttcccatcatgggatgtttaatgcatttttttattttgccttaactgaagtcttgtatgtcttggtctgcaggcaaggaagatgcaggagagtggctggaaaccaagatggttccaaagggacagcgaggatggaacgtaccgctacgtcggaggttactgggaggcaagggagcagagaacatgggtcggctgcaatgacatatttggtaacttgtctagcagccagaagctcccaccatccgctctctacacgagctgaagtatataggggtgggtaaggccggaagggcatgttcagtagttgttgacatcgcattaaccagagggtttttctctcgtttctgttgtgttaagctgtgagctaacatgtttttcttgtcaattgtcacattgaagccaaggacatccaagcataacccaaccttttgtcgatactaggatacttatgagagatcttgtggacattattgcgaaaagaattgtcgatgatactattttcttctttgcattccgcaaggacgtgtctgcatttggcccttatgttgtcgtgcttttgtgtgtttatctcgcattggtgatg

SEQ ID NO: 33706 - DNA, 3232 bp, Zea Mays
cgacggtccagactccagagcctgcagaccccgacgccgctcgcgttcgggaccgtaccgccctcccctgccgtatccgcccacacaccctccctccccgccgcttccgcccggtatcccccactcgcgcggccgtaggacacggccacgtgcgccgcctcaaactgggggctgtggctggggcgggaggagcggcggcgttagggtttccccatggacggtggcgaggatcggacgttcaaggcgaactttaccagcgagggggtgacgatgctgcaggaccgcgtcaaggagaagctcagtgagctcatgggcgactactccgacgacactcttgccgagtatgttgtagtattgctaaggaacgggaggcacaaggatgaggctgcaaaggagctacatgtttttttaggcgatgacaatgatgcatttgtatcctggttatctttattcacctgaaccttttctgtttcattttattttcatgtaccatgcatttcttctgacaaaaccatgaatctatgtacaatcttgcaggttgtgggatcatctgtcctcaaatttgcacctttatgttcaacctaaagctgcctcttctaaggatgacactagaagcagtcacaatgctgccagaggattgcctgttcacagtgtgataagcagcacacaagttaatcatgaacctgaagctgaaacccagaagacagtgataactcataaaaaaaaagattggggtcatcgaaaaagagattggggaacaatcggtcgaggtcaatcagaaacagttcctcttagaagcgttgtcgacaatgtttctcttgcaaaggagaaggatcttcatgagtcacatgcagatgaaaaggcttttcataaatcacattctgtaagacgaacccgctctcctgacatgcataaccacagaaagaggagcagagaggcagatagtgcaacacacccagttaatggtgcaccacgtcggcttcttcagtttgctgttcgtgatgctgtcagaactgtgcccccagttacttctggttcagaatcagcttccaagcgactttgttctgtagtgtctacattggcttcagattccacacttgatattactcatattaggttacagaaaacaaattcagatttgagaataccagttgccacagcagcactaagagctgcagctgaggctgctgaagatgctctcaaggatagcttttgtggaagtgtttttagtagattgggcagaatgcccacaataaattctagtgaacaatcacctgatcgtagatcacaagatcttgaaggcaaagaatatgagaatatagataacatacaagctgaaaatcaagttgaattttatggaagaaatcaacatggtggcagtgatgtttacatgcgtgatcggagaacagaggaagccacaggttctctttctaatattgatgagtatggtcacaacagttctgttaggtataatggattgggttctctccgaagtgcattgcctgctagtggaggtaaagagtcattagtactggggtacgtaagaggagcttctgaagtacgaagcggaagattgatagctcaggggccacctgctggttcaggaccaagatcatctgaaaagatcctaaatgtttctggtaacactaagacacagaagcttcgaactcatgtaactagggatgcccttgcatttgaccctcaagtgccaatggagaaggtttctggtgcaaggaagtcgataggtcaggggccacatgctggttcaggaccaagaccatctgaaaggattctaaatgtttctggtaacactaacacacagaagcttccaactcatgtaactagggatgaccttgcatttgaccctcaagtgccaatggagaaggttgctgatgcaaggaaatcacatgtgaagattgcacatgctaacgatatgtccatgacaactgataagtccaaagatttgatacagtcaagttcaatgctggaggcacaaaaggctacatcagctgctggatcaaatactacaggtcaacccgaaggtggctctgattctagaactgtctttgttagcaacgtacattttggtgcaacaaaagatgctctttctcgacacttcaataagtttggagcgatcttgaagacccatattgtgaccgatggtgtcactggtcagtcaactggctcagcgtatattgagttcttgcacaaagaatcagcagagcaggcgttaaccctgaacggggcatcatttatgttacgcattttgaaggtcgttcggaaaaactccactgaagcaacccgatcgcctggcttgcttcgtgtttcgcggggatcaccatttgcttcaaggctcattagaactgcatacccaaggccaacgtttcctggtgcaatccgtggacgactgccactcaggggtgttgcccagagcttacagtggaagcgcagtgccacagattcctcaaatgctgtaaaaccaagtcaggctgcaccttcagctcctgggaatcagttggtcaccccgaccccacgaagcttcacctacacacgcacggagccaaaaccaaatgacggtgcgatggcttgactgctcagctgcagcatgccgcagctcctgatgaatctcgcagaaagagttcgtgatactgttacgtggttcattcagctgcttttggtaaatatttaagtagctgcagatgttagtttgtagcaggctggtttttgtggaccaaaacctttgagcgatattctgtgaggttttctgtgctgtttttcaccgtcagcacatattctgtgctggctggctgttcggagttcgtggatggagagtaaaatatatataaaaaaagtggtagtaaaggaaaacacggacgcgataaaaacgttgcaacatttgttattattttttgatggattatttagcctccacggtttccttgtcaaggggggtgatctgtgagattgatcataatatccaaactaccggatggtcttgctgtctcagttttgtaaatagaaaaaccttcacctgtggggtatggttgcctactgcacgtctgcacattagcaagtgatggtgcgtgtttcgactcaaatgtttttttgcatcctgtcttgtgtagaaaaagaaaactgaagacctgtctgttctgggtgtctgctgtatctattttctcagagagaagtgcattttatcttggaatcagcgggactcacgggtggctgaagt

SEQ ID NO: 33707 - DNA, 4125 bp, Zea Mays
ccgcggcggcggctgacgggctgagaataggagagagaaacccctctttctcttcctctccttctcgacgaacccgtcccacaagcacgtgcgagccaaggcagacaagagcgaggtggagagagggagagagagtgagtgagagaggaaaaccccgcccccgtccaggcaaccttcgtcgacgcatacggcggaggccacagaggcgccacgcgagggagccccgccgcagcagcggccgcgaattcggcacccccggatctccttgccggcgcccggggccccgatcgcctcctccccatggtcgtgcccctccgggcgttctcctcgcgcgggcgcctgccatgtcggacctcgcttccaccagcaaggataaacttgcgtattttagaataaaggagctcaaagatatcttaaatcagctggggttgccgaagcatggaaagaagcaggaccttgttgacagggtattggcagaattatcagatgagcaaggtcaacgccatcatggatggggaaggaaaaatgctcttacaagggaggcggtggcaaaagttgttgatgacacatacaggaaaatgcaagtatgtgctcctgaccttccctctaggagtcacagtgggtcagatttcaatcattttaggcccaaagaggaagccactgacttctactatgtggagactaaggtccgctgcctttgcaatagcacaatgctaaatgacaagattatcaagtgtgaagatggcaaatgccagctgtggcagcattttacctgcgtactcattccagatacacccacggagggtgctggccctgatattccacctcatttttattgtgaactgtgccgactgaaccgggcagatccgttttgggtgactacagcaaatccactactacctgtgaaatttatctcatctggtgttggaaatgatggagcaagcgcacctcaaattgtggagaagaccttccaactttcccgagcagaaagagaaacagtccagaggccagaatacgatctccaggtttggtgcattcttgtaaatgacaaagtccagttcaggatgcaatggcctcaatatgcagaattgcaagtgaacggtattcctgtacgagtaatgaccaggcctggttctcagttactagggataaatggacgtgatgatgggccactggtaaccacatgcagtagagaagggattaataaaattagcttatcaagagttgatgctcgaaccttttgctttggagttcgaattgttaggaggaggactgttcctcaggtattaagcttgatcccaaaggaaggtgaaggggagtcttttgaggatgctcttgctcgtgttcgtcgttgtcttggaggtggaggtgctacagacaatgctgatagtgatagcgatctggaagtggttactgaatctgttacagtcaaccttcgttgccctaatagtggatccagaatgaggattgctggaaggttcaagccttgtgttcacatgggctgttttgatcttgaaacttttgtggaattgaatcaacgctcacgcaagtggcaatgcccaatatgtttaaataattactctctcgagaacttgatgattgatccttatttcaatcggattacttctttgttgcacaattgcagtgaagatgttaatgaacttgatgttaaacctgatgggtcatggcgtgtgatgggtgatgccgctaccagagatttatctcagtggcatatgcctgatggtactctttgtgactcaaaggaagatacaaaccctggtgtcgcaagtgttaatgagttcaagagagagggtgcttctgatgaacatagaactttgaaacttggaattaaaaaaaaccctattggattatggcaggttagcagtaaagcagatgatatgaaacctgtggttagaaatcacatccaaaataacactgggttttcaacaccaaacattgtgcctatgatcagtagccccactgggagttacagagatggcgaagatgtaagtgtgaaccaagaagggggtggtattcaatttgatatatcattgaaccaagagtttgacagttttgcccacaactttggtcagacatacaatacagaggatagaccacaacatccacaccataatgctgcagatgtcattgttcttagtgattctgatgaagaaaatgacccgactgttcagccgccagctgtctatgaaaatactcctacaaatgatgacagttttcctttcgtcactgatgctgccggatctggatatcctgaaaggtaccaggaggatgctagtgttggtacaagtggtcttggtttattgaggcagaacactggtgaatttgaaataaataactggcaaatgctttcttacccacaaccagagcaagggtttcagttttttgtgactgatactgatgttggcaatccttttgttgctccacataattcctttactattgcaccagaagactactctcttggctgtaatgttggaatagaggacccctctgcagctcacgatgtttcaatttgccgaaacagtaatgatgtgcatggaagcttggttgataacccactggcattaacaggtgacgatccatctttgcaaatttttcttccaagtcaaccttccactgttccccttcagcaagaattgagtgagcgttctgatactccaaatggagtccaccctaacgattggaggatatcgcttacgcttgccgctggtggagggggcaatgaagagtctacaagtgttggcggtctaaaatcacaaccaaaagtttcatcgaaagaggcaggagttgaacctttacttgatgctgcttctgctcttggaagcatgaacaatgacagatgcactggatctaatctaaatcctaaaaggattgaaaatatattttctcatcctcgccaaccgcggtctgttaggcctcgtctgtgtttgtcattagatactgattcagagtagtttggacatcacactgggatagctgaatttgctattaatctggtaaagttggcttccagaatcttgatcgttactgtggagggctatctggttattctggttgatacaaagagatacaccagtgtggatgctttgttgcattaacctggtaagattcaagtgttctatatgatccaagtgggatctgcatagagttcatctaatggttggtacaggatattttctaactgggagtggtttaatgtggctagtggagcaggctgtacattgtccctgacatttactgggtataaaggaatagggggccatcacttggcacaagacaaatacatgtgttgtgtgtaccatcattgtatttagggtttgggtgctaatttagatgtttattaccctgacgtttgatggagaataaattattccttgaagtggtggtcaataaacagagagcccttcggttttgagtcggagctgctgaccgttcatctgttcttgttgcgaagtggtcgctcccgctttggttcagctgcagctttcatggcgggactgaccatgccaaagtcttgtgtagcagagggcaatctccatgatgtcatgcgatacaagtgatctgtattttgccctacaggatgacaagtttctttgtgcaacatgctgtattattggttcgatactctttactatgtgggttcagtgcaggtgcataggacataccggcagtctccggactttgctgtgatctgcctggagcagagcatctgccgcctatcgcacatgtaaacttgcaggtggtggtggattgtaccagctttatgaaccctggcgattgaaaggcgctgggattgagtactgggtacgaagaacgtcgtttctttcagaacatgaaagcacatcgtcggtgcacagatggtgaaatcatgctctgggcgcaaataatatatctgttgctcggctgaccatcctctgatgccagcttgatcggtagaagacaggttgttaaagtaattgtaggaatgtaacttttagggctagtttggaaacttaaaattcacttttagatttatgagaattgagtagaaagttagcttatttccctggagaggatttaagttttcagactagtccttagctataagacatcatgagaatatca

SEQ ID NO: 33708 - DNA, 4279 bp, Zea Mays
cacttcgcttctcactcgatctgctttgctctgctctcggtctcggctgcttgcctgcttcgagtcgtcgccggcgggagcagagaacccacccgcacggtgcgatgtcgttgaccgcggcccccgtggccttcatcggcctggacgagctcagcgttgagctagctgcctccttcctccgctccggcgcttgcgtccgctccttcacccccgaggcggaacggtcgccttctgcggcgctcgcggagttgaatggcctcctccagtgcgcgagcccagtggaagccgcgcgagatgctgcgctggtcgtcgtgctaagcgatgctggtggggttgacgagttgttcttcggggttgaggggatcgcgaaagggttatgcgcgggttctattgtattgattcattcgacattgctgcctagtcagttggagaagctggagcaggagcttacagaagaaggatgtcttccttctggatggatacattttcactggtttatctgatgaattaaagcaacagattattattgttgcatctgggagacaggacatagcagaaaaagctagcaaatttttccatggtctatacaaaaccatttattttgctgaaggtgaattctgcactagcagaaaaattaggatggtgaatgatttgctggagggcattcattttgttgcgtctattgaagcaatgtatcttggtgttcgagctgggattcatccaacaattatttatgacataatatcgaatgctgctgggagctcgaggatatttgtggagttagttccaaaacttctgagtgaagatcctttgctgattgattttctaaaatcaacaaggaaaaaagcaagccatgtgatggatatgtcaaaatcagtaacatttccactgccacttctgggtgttgcctatcaacaattggtacatggttcatcagcagtaactggagatggatctgcctcaccgctgaaggtttgggaagcatcgtttggagtaaatattgtagatgctgctggcgaacaaatttatgatgcaagcaaattagctgatcagcttgttgcggaatctaaagcagcgaagcggattggcttcattggtcttggagctatgggctttggaatggcatctcatttgctgaaatcagggttctgtgttgttgcttatgatgtctacaagccaacaatggccaggtttgctgatttgggtggatcaacaaaaggttctcctgaggaaatagcaaaagatgtggaaatacttattatcatggttgcaaatgagtctcaagctgatagtgttctttttggaaacgctggtgctgtaccagttttatctgctggaacatctgtcatcctttcttctacagtttctcctggatttgtgatccacctcaacagaagattagaagctgaatgccgacagataaagttggttgatgctccagtatctggtggtgtcaaaagggcggcggatgggacactaactataatgacttcagggacagatgaagccctccattgcactggttctgttctatcagcgctgagtgaaaagttgtatgtaatcaaaggaggatgtggagctgcaagttctgttaagatggtcaaccaacttcttgctggggttcatatagcttcagcagctgaagccatgtcatttgctgctcgactaaatttgagaacgagaagagtcttcgaaattatgcaacatgcaaggggttattcatggatgtttggaaatcgtgtgccacacatgctcgataatgattatacaccctattctgcagtggatatatttgtcaaggatcttggtatagtatcttgtgaaagttccaattcgaggatcccagttcacgtctctagtatagcccaccagctgtttatttcaggatctgcttctgggtggggtagatatgacgatgctgccgttgtgaaggtctatgagacattaactggtgtaaaagttgaagggaaggctccgatgctcagtaaagaagatgttcttcagtctcttccatctgaatggccagaagatccaattgataatcttgtacctattgcatctcatagtagcaaaaagtttcttgtagttttagatgatgatccaactgggactcaaacagttcatgatatagaagttttaactgaatggcctgttgaagcccttgttgaacagttcctcaagctaccaacttgcttttttattttgacaaactctcgttccatgactgctgataaggccatgctgctagtacaaactatctgtaaaaatcttaaagctgcggcagagaaggtccctggtgttagttatacaatagtcttgagaggtgattcaactctacgtggtcatttcccagaggaagctgacgctgctgtctccgtattaggtgagatggatgcttggataatctgtccattttttcttcaaggtgggagatacactattaacgacatccactacgtcgcagactctgatagattaattcctgctggtgaaaccgaatttgccaaggatgcagtttttggctataaatcttccaatctcagacagtgggttgaagagaagaccaaaggacgggttttggagaaccaagtttcaacaatttccataactctcttgcgtaaacaaggaccaactgctgtttgtgagcatctctgtagcttggagaaggtgtctgtcgagatggtttcaatgaaatcaatggaggacagagaccaagaaatcagacgaattgttgaactagggaatgcttatatacaatccagaaaagacactctaattctcaccagccgccaactcattactggaaaaactcctgaagaaagcttagaaattaattataaagtgagttcagcactagtggagattgtgagaaggattgatagtaaacctcattatatcattgcaaagggaggaatcacttcatctgatattgctacaaaggcgctggaagctaaacgtgccaaagtcatgggacaagcattagctggtgtacccttgtggcagcttggtcctgagagtagatttcctggggtcccttacattgtttttcctggtaatgttggtgataacagtgctcttgctaaagtggtgaaaagttgggcttccccatctagaagttctacaaaagaaattcttcttaatgcggagaagggcggttatgctgttggtgctttcaatgtgtataaccttgagggaattgaagctgttgttgcagcagcagaggctgaaaagagtcctgctattcttcagattcatccgagtgctctaaagcaaggtggagtcccactggtagcatgttgcattgctgctgcagaacaatccagtgtgcctatcagtgtccactatgaccacggcatttccaagtcagacttgcttcaagctcttgaagcgggatttgattcagtcatggtggatggttctcatctaactttaggggataacatcttatacacaaagagcatatcttccttggctcatgcaaaaggtttacttgtggaagctgagttgggtaggctctcaggctctgaagatggcatgaccgttgaagaatatgaagcaagatttactgatgttgcccaggctgaggaatttattgatgagacaagcattgatgctctagcagtttgcattggaaatgttcatggaaaatatccacctagtggaccaaaccttaaattcgacttgctaaaggaccttcgtgcattaacattaaagaaaggagttagcttggtcctccatggagcatctggtctatctcatgagctcgtaaaggagtgcatagacttgggcgtgagaaaattcaatgtgaacaccgaggttcggaacagctacctggcgtccctcagaaagccagaaaaggacttgattcaggtgatggcgtctgctaaagaggcaatgaaagctgttgtagcagagaagctgcgcctgtttggatcgtgtgggaaagcctgagcgaagtacttgcgttgcgccggcaacatgcagtacaagaccgactgcatcatcgggttcgtgatgctgctgctactgtgcagttgcttacagttacagctcattgcgttgaacagctgaagtggttattgtactttgcagtgtagcgcaactaaggctaattcataaatcgtaataatgtatgtatgctgccccgctgtaaaaatgctccgtcgttaataaatgccatcgcgcttgctgtgcctttgtttacatttttattcgcctctcgagtgttctaacatgcaatctcagttgtcctatttagccctagtttgaaaactcaaat

SEQ ID NO: 33709 - DNA, 4445 bp, Zea Mays
cacgccggccccacaagacccaagctgcaaaactatccagccaccattcacccctccgcactccgcctccgccgcctccctgccctcaactccacgcccggcagggtggccgctcgccggcagccaaaccctaggcgatcgcggaggccaaccacgcttcgggcgcgatcagccgccgccatgcagggcttccccggcggcgcccccgatccgcagcagctacaggccaccatgctcgccatcgagcaggcctgctccctcatccagctgcacatgaatccatctgaagcggaaaaagtgataacttcgctgcattcgtctctcatgccttatcaagtatgcagattcattcttgagacatcccaaaaaccaaatgcaagattccaagctgctggtgcaattggtgatgctgcggtaagggagtggggagttcttacagatgacaataaaaggagcctaataatatattgtttaaactatgttatggagcatgcaagttctcctgatggctatgtgcaatcgaaagtttccgctgtggcagctagattactgaaaagaggctgggttgagttttcggaccaagaaaaagcagctatcttctttgaggttgagcaatctatccggggcatccatgggcctaatcgacagtttgctgcaatcaatttcttggaaaccttggtttcagaattctccccttcaactgcttctgctatgagcctgcctaaggaatttcacgaacaatgtgaatactcactcgaagtgcagtttttgaaggatttttactgctgggcacaagctgctgtgttcaatactgctgacaaaatcttgaattcaactgtaacaataccggacgaaagagcatgttcagcagcattgcgcctgatgtttcagatactaagttggaatttcaaacatactgtggagcacgagagttcagatgctaagataaatttcggcttaaggattgatacgataaatctgaagaagtttgaacgttcgttggtgaagccagggtctatgtggagagagattctaatatcaagtggacaccctacctgggttttaaacttctataccaccttgcgccaaaagtactcatatgatacactgtggggtgattctccaattgctgtctcttgcagacagcttatagtgcagttatgctccttggcaggctctgtgtttcctaatgataatggggatgcacagattaaacaccttatgctgatattatctgctgttgttctatggattgaacctcctgatgtaatcacagcatcaatccgaaatgggggaagtgaaagtgagttcatagatggttgccatgccttgctttcaatcgcatctttaactactggctcactttttgacaacctcctaaaatctataaggccctatggtacagttaatctgctttctgctttgacgtcagaagctgtcaagtcggttctgaataaccagagtgaagaggaaacctggggcatagattcccttgatattttgttagaaacatggaatgttcttttgggggacgtagatgccgataaaaatccaatctcaaccgatggagcacttgcatcttcaagtttgtttaagatgattgtggagtcacacttgaaggctgctgctgattctgcgttcgaggatactgatgatactgaatattttcatgtttctgtttcaaaacgtgatgaacagttagccttgtatgctctaatagcacgggcttctgcaaatactactattccatttcttgcacagttgttttcagaacgatttgcccggctaaatcagagaaatggtgaaagtgatcctactcaaacactggaagagctctattggctgttgttggttactagtcatgtcctaactgactctggcgaaggagaaacactacttatccctgaagcattacaggctggattccctaatgtgattgaagcagcacatcatcctgttgttacactctcctggtgaaaaatcttacctcaatctattccccttttcatttcgttgaaaatcaggaatctgtttgttgctgtttttagagttttttagtgcaaagactttgacctgctgttttttgggccagttccagctctggtctataataaatttttccaggcagtgtttagatccaggaattagggcaaaatacttcagtccacgactaatggaggctgtgatctggttcttggccagatgggttgcaacctatttagtgccacttgacgtgagtagaggaaaagtaagcagagaaattgataatgtgggtacaaatggatcccaacattccagaaaactgctaaacagttttgcttgggaaaataaccaaggagagcttgttcttgattttgttgttctcatttcaatgttagctcttactacctatcagggagaaaatgagttgcagacactgacatgccagaagctacttgctacagtcgttcgccggaaacacacatgcacttatcttgttcaactggattcatggcgtgatcttacaagagcttttgcaagtggacggtctttgctttcattgagtggacgtttacaagtgataggtctctagcagaaacacttgcctctgcagcttcctgcatcaaagatcctgaagcatctgcacagtacctgagggatctcatgggaccagtggcagggtgcctggtagaaaatgctagcaggagtgatctaaaatctgtggcacagcaagcagatgttatttacatggtctgttgcctattggaacgactaagaggcgctgctagagctactcaaccccgaactcaaaaagttctatttgagatggctcatactgtgatgaacccacttttgactcttctggaggtctacaaaaatcattccacagtcgtatacatgatactcaagtttgtggtggactttgttgatggtcaagctgtattcctggatgctaaagagacatcagctttggtgagcttttgcttgcaactactccagatatactcctctcataacattgggaaggtaatgctctctctttcttcaagtctgcgtaatgagtcacaagcagaaaaatataaggatctgcgagctttgcttcgtcttctgacaaatatatgttcgaaggatttggttggctttctgtctgattgtggcggtgaaggttcacctgatatcgcagaggttatctacattggtcttgatattgtgacccccttgatatctttggatcttctgaaataccctaaacttagtcgtgattattttgtgcttatatcgcacttgttggaactgtacccggaaaaggttgctcacttaaatagtgatgcttttacaaggattattggaagtcttgacttcgggctccgtaatcaggatagcgatgttgttgagaggtgcctggcagcagtaaatgctcttgcttcatacaatttcaaagaaagattaggagggagaggaagactgaactcgcagctcatggaatctgaaggatctaatggcaaactgcaggaaagcatatcaagtcacttcttgagacttctgttgcaaatacttctttttgaagatttcagatcggagttagcaggttatgctgccgatgctttgcttcctttattgttctgtgaacaggagctatatcagaggttggtccatgagttgttggataaacagcagaatccgaccgtaaaatcaaggctggcaactgcgttccataaccttacaagttcaaacaatctctcaagctcactcgaccggccaaacaggcagagattcaggaaaaacctccttagcttcatggcggatgtatcgggcttcatgcagatcaagtagatgcgatggcagggaacaggtgatgtttgaccggtcaattaaaccccgaggaagcactgcaccactgtggtaggggtgcatgtgggcaccacatgtctgtggattgatgagagcgaagactgccacgacaagtctagtagatcttgaagagctagtgtcaccagaaaagacagggagatgagctagtcttagggttggcattcatagcgcatttgctggacaagatggaggcgtccctggccacgagatcgtcgtgtaaatgcgtttgttagacgcacagaaacggtggggattttgtggtggcgactcgttttgttcaattcccacaggcagaaggtagagatgttaagttgatgtaaataccgtttgatttaaacatgccttattcgtaggagaaagcgacacggcttgctgtaacttagggtttattactctttctcgtggcataggatccccaaagaagtctttgctggggtatttgcagccaaacgatgaccagtatgattgcgagaggttttcaatcttttgtaccaaatttggcctgcagttatgatgacactgagtgccgatacaggcatgaggcattccaaaattggcgggcaccacatgtgtctgtctgctgtctcagtggg

SEQ ID NO: 33710 - DNA, 1389 bp, Zea Mays
ctgaattatcggctcgatagatctccgagccaacggcaacgtgtggtctcaaacattcgtggattcaaatagttatgggctagctagcaagccccaatctgggctagtttcggcccatctcaggcgaacagccatttcgaatacaagcaacggcccgtccaactattccgacatcacctcgctctgtcaaggaaaccctagggcccgccgccgccggccgccacacccgacacctctctgattctctccctctatataacctgacctgattttcagatcctgctcgaagctaccgccaccgccgccgattgctcgagctcgcttccttacgccggatctgcatctgcgtgctgatatcttcttttcctgttcgctcgttccgtgcttctctgttttttccctattcttctctcaactgtgcgagggattggttcgtagctcgggctgatgatgatttggatccgagaggatcttagcggatttcggtgaggcggatacttccgccgctgatcgccttatgttgttacacacactgaagcccccccttcgatgcgtctatcagatgggttcttttcccgtttcgtctctctcgctagatttctcactgggtggctgctgcaatgcgatgatgattcaatacatggttttggcagtggttaccccttgtggtcaccgtgagccgtcaaacctgaaaacgacttctctttccactgagcattgcgaaaaaaatgcagcgtattatcatcgggcaattgaatttatcatcaaatccacactgattctagcaaaaaaaaaacagataatttcacgtgagtctcaagtttttgaaaactcaatgcaggtttcatggaagtgactttacggcacctgccaattaccagtcgccccattttttaggaacgaacgcacctttcctcaacacgggtcgaatcggacatccaaggccaaacaaatccttgataaaacccgcattcagtatcgtctgacagcagagagcgccacccgttgcttcaccttgccgcctgaaaccacaacggcgccgtccctgaccagagcgttatccaccggccgatctgaatgtatcatgcctagcagttccgagtttctgcggcggggtatcattgtttgatcaagtcgtccttggccattatcagattcgggcatcatttctaggcatgcagttcattaccagcttcagcggtccacattgctgaggaaaagagcttcacagctcttcattcctggcaggatttaggttgccacttttctgatgttgagtaacattcgagatatgtgttccgagacttttgtggacacaccagaacatgctaaatgaataccctacattagttgatctgcaaggataaatcagttatttcattatttgtt

SEQ ID NO: 33711 - DNA, 4540 bp, Zea Mays
acgatttctgccctgttcttcggcgttttcgctactcacccccagcgagcccctgtacgaccagccctcccgccggcgccgccgctcgccgcgggccatgtacaagctcagtggccgtggtggtgggcgcggcggcagcggcgcggcaaagcgcccgctgcccccccacggccgcggccggggcggcgcctcctctatcggcgggatggccgggccgccccgcggtcgcgccggcgccggcgctgcaacgcagccggcggggcgcgacgaggcgttccgcctcgagtccagcgggccgccagcctttgcggctataatacggctgacgcccgacctcgtcgacgagatccggcgggcggaggaggccggtggaggcgcccgcatcaagttcaaccctaacatgtacaactcgtcggagaacgttatagatgttagtggaaaagaattcaaattcacctgggcatctgaacgtggcgaattgtgtgatatttatgaagaacgtcagagtggagaggatggaaatgggttgcttctggagtgtggctctgcttggcgcaaggtgaatgtgcaacgcattttggatgaatcaacaaagaaccttgtgaaaatgcgctcagaggaggctgaacgtctctcaaaatctcgaaaatcaatcgtgctggaccctgccaatccatctgtcaagagtcaggccaagtcaatggctgcagcagctgtagaaggcaatccacggaggatgcactggaagcagaagaatgaattttttaagaagaataaagctgctgttatcaccccaaccaaatcagtttcgaaggtcaagttatctaacaatattcccaaagggaatatctcgagttcacctgcaccttctcctgaacaacctggagcaagcaatccttcatttcctgttggatcagatgcaaataatgaagtcacaacaccttttgatttgaacaaaggggaaaacagtaaacatgagaaatcgactgcaagtaagatgtctaacaaaggtataaatcgccgtgcaagttctcatgctgcaaatgtggataataatacaaaagaagtgcgaagctacttgatatctgtgctctcaaaaaatccaaaaggaatgggcctaaaggccttggagaaagttgctgcagatgcatttccaaatgcatcaaagaaaatagagagcatcgtcaagaatattgcaaattaccaagggcctgagaggtatgttctcaaaccagggttggaggtagaaagctctaaaaggcatgcatctgaaggagtaagatccatcagcgagaatattgaggaatctgctccaagcctaaagattgatgatcctgatatatgtgagaggattgacattgtgggctccccacttgctgtaacagatggaaaactcagtaatgatagtgaaggtaaggctggaacttccagtgacagtggaagtgacagcgatagtgatagtgacagcagtgacagtggaagtgatagtgagagccaaagcagaagtgctgcggaaactggtagtgggagtagcagtgatagtgacagtgatgcctcatcaagcagcaaggaaggatctgatgcaattgttgatattacaagtgatgatgacaaagcaaatacagcacacacaaaagtagtagatgaccttaatttgtcttcatcaccaagagatttgacaagacttaatgttgacgatgaacaaattgacattggaacaaatctggactacaggagtgcatcaccccatattgatctgaacaattttaatactggcaatgatgatgcagcagcagagggctttagttctggcaacctgaacaagccatctgaaatgccgggaagcaagaacatgacaaacaccagaatggattctatcggagttgataacaagcacaatgaaatgtctttcgtggacaaccttttcgatgattccatgagagcagccagtgagaactcacccaagggggaagctggtcaattgacagtgcagcatggcaataagagaaaatcaacatctaaggatgaatcaaaactcgtcccagtgaatattgccaaacccaaattaaaaaggtcttctggtagtgagaactccacagcaaagcctgagagtgccaaaaaggccaaacctgacgtaacatcaccaataggttctttatcagaacacaaaagaagtttaccccctgaaaagcataccaatgataggttgaacaaggagacggggaatgttagccgtgatgcttcacgagatagcagtcctgccatgaaaggaagaccttcagctcctggaaatttacagaggatagatcagagcccaaatttacctatcccaacaatgcattctgagggaacaaaaggaaatgctgttaaatcaagttcaaagaaaaaatcagataagatgcagaaaccatggcatggtattgatggtgactttggctcatgttattcacatggtgtagatcaccatgccaattttgatggctctgatgattcttccacaagaaaaaggagtagacatgagaatcctcttattgatgataaaatgcttaagcattcgaaggacactaatgctaatataaattccatgaatttaaccaaaagttccagagaaattgttgtgcctgatgaggtaactgcttttcctgaatctaatgaaagtaatggtgagccatcaaattcacaaagagataatgttgagaaatcaccttatggtaaaaaaaagctccagagagagctttctgatcttgagttgggtgaacttcgcgagacttctttggaaaatgatgatggaaggataaggaagcaatttgagagaaatagttcctccaagtcgcttgatgctaaactaactggtgtaaataacttctaccccagtataaatgacaggaagactcctgtaaccgtctttcatgataagaggaaaccttcacctcaagaatatggaaatagaggccatgtaaaccaggaagggtttcagaggaaggcagcagtgtacgcgtttgatgataataggcctcaacaaagagagaattttccagagagcctgcatttgccaaagattgataattcagattctgagaacataatgtatccagataggtcaggagaaaaaacaagcaaaagggaaactaggatggcacatagtggaatgctagagtatgctgatatgcagaagaagaaagcaacctcaaggcttccacagaacggtactaataatgtcatagtgtctcgaatgcagaaatcaatatccacatcagataatgaggaaagaagtagaaacaactctttgattgagacaaagacaggtagaaagagaagagacagttcttcagatgatgataatttatttttctccaagtatgataaagatgcaccagaactcaaaggtccaataaaagatttctcacaattcgaagattatgtgcaggagtacaatgagaagtatggagtctattcttacttgagcagtcagatagacaaaactaaattttttaagggttcaggatgatctcaatgttgcgaaagaaagagacaaggaacagtattataacacggtggaaagactcagagacatgtatcatgaatcaggagcaaggcataaattgatgaagaaggtcttccttttgcttcatgaggaactgcagattattaagcaaagaattaaagatttttcagaggcctattgaaatgagtcactcataacatgtcacttgcaattgtgtttcggagactgtcgctcatcgtaaggctgataatgtctgggcatgagcattatgctttgcctttgtagaagtttgcttgtcttggaaagattcagtcaatggcgcatatcacaggaaacctgagagactccgtgatttctggaatcacatcgtgctgaatttgatagtaatcacggtgaagtggaggcaaggacagttcaaatatcaatggcgttgttggacacaggcaaggacagttcaaatatcaatgacgttgttggacacctccgcagccccgcacgggggagatagcagaagaaatgattcatcactcagggaagaggtaatgtcgggaagcgaggaggccttacctcagcagttttgcagctagtttggcactgaactgtaaccgggcggttctctttgtagatgttctgtatcttttacccccacccccagtgaagggcgcgatctctccttccctggcattgtacatcactttgtattagtgtgattcatgtcaaactgaagtaagttgctagctgtgtacatatatatagagccggtagagaagttttgaagcgaggagagacaaatctgggacaatttctttttaacgcgtacatcaattcttcgatgttgcagttcagtttctgaaatatgcatatgctctactgtatattggaccaagcctgaagaacaattccagagcatatgaaaatttggatctttaaactggctctcaaactatttagattctcaaaataggtaggtattcctcaacagatcctgtaaaccatgttctctgatttttatataaagatctgtagtttttaaaa

SEQ ID NO: 33712 - DNA, 3508 bp, Zea Mays
atgatgcagatgctaggcctccgcggctccgcgtccaaggaccgtggccgcgggggcgacgcgtccccgtcctctgctgtggcaggggccacgggaaccccgcgctcgccgtggactccggcgtcggcatcgtcgccgcgctcgccgttcgcggcggaggcgggcggcgagggagggggcggccggccgctgcggctggtatactgtgacgagcgcggtcggtttcggatggacccagaggccgtggccgcgctgcagctcgtcaagggacctgtcggggtcgtctctgtctgcggccgcgcgcgccaggggaagagcttcatccttaaccagcttctaggtagaagtagcgggtttcaagtggcaagtactcatcgtccctgcaccaagggcctttggatgtggagtgccccaataaagagaactgcctttgatggaactgaatatagtcttttgctacttgacagcgagggcattgatgcctatgatcagacgggcacttacagcattcagatattctcattggctgtcctactatcgagcatgttcatatataatcagatgggtggtatagatgaggcagcccttgatcgcctttcacttgttactgaaatgaccaagcatatccgtgtgagggcaaatggtgggaggtctactgcatctgaacttgcgcagttttcacctattttcatctggctactgagggatttctatctagatttagtggagaatggtagaaagataactccacgagattacctggaaatcgcactgaggcctcttgaaggcagaggaaaggacatatcttcaaagaatgagatccgtgagtccatccgtgcccttttccctgatcgagaatgtttcacactggtgcgcccattgaacaatgaaaatgaacttcaacgtcttgatcaaatccctctcgagaaattgcgccctgaatttcaagctggactggacgaattaacaaggtttatttttgagaggacaaggcctaagcaagttgctggtacaatcatgacaggaccagtactagctggtattacacagtccttcctggatgcaataaacaatggagctgtgcctaccatttcatcttcttggcaggattataaaaagaatgctttcttagaggctgacaagcagtgctcaaatgcgaagcacaacatggagaagaagatccgagcggcatgcactgctcctggtgtcaaagtttctgctgtgattcaggtcctggaaactgcacttgctgaatatgaaacatcttgtactggcccagccaaatggagaatgcttgctgcctttttaagacagtgtttggaaggacctatattggacctctgcttgaagttaataaatgaagtggaatcagagaagacttccttcactttaagatgccggtcaaatgaagaccaactagaacttctaaaaaagcaacttgaggccaatgaatcacacaagtctgaatatctaaaacgctacaaagctgctataaatgagaaacagaaagcctctgttgatcttagtagtaatcttgcaaacctgaggaccaagtgtagcacattagaagaacgatgtgtaagcatatctaaagaacttgatcatgtccgacatgaatgcactgattggagggtgaagtatgagcaatctgtttctcagcacaaggctgaacaagatagatttgtcgctcagttggcatctcttgagtctaggcatagctctgcagaaggaaagttgggagcagctcgggaacatgcagcatctgctcaagatgaggctgcagaatggaagaagaaatatgaaatggctgccgtgcaggctaaaactgcattggagagactagcatcagtgcaagaacaaattaacaaaattgcacaagaaagggaaagttctataagggcagaatttgcctcacatttggagggaaagaggaaataaggaaattagttgctaagattagagaagcggagagtgaagaaagtgtattgactgaacgcttgctggtagcgatgacttttctgttatttcaatcttcccttgaattgatgcattctgagatgcaagggtagttttataatgcttgaacattattcaggttgtggaatcaaaaacacaaggccacaacaaggaaactacaggcttgagggatgaaatcaaagaactaacaagcaagttagagtatctaagagatagagcagtatcatatgaaaagcaagctagaatgctcgagcaagaaaaaaaccatcttcaagagaagttcttatctgaatgtaagaaatatgatgaggcagaacaaagatacaagtctgcagaaagggatgcgaagaaagctgttgagttggctgatgcagctcgaacagaggctattgcataccagaaagagaaggacaaggcacagcagttatctattgaaaaggtagcagttatagagagggttcaaagacaggtagacagactagagcaggaaaaggttaatctattgggcgaagttcagaggatgcataattctgaatctgatgcctggtccaaggttactttgcttgagagtagggttgctgagagggagaaagaaatggatgatttactgagccgtagcaacgaacaaaggtctagcactgttcgtgtccttgagagtctgttggcaacggaacgtgcagctagagctgaagccaataagcgtgcagaggccttatctctacagctacaatctgcccaaggtaaacttgatatactccatcaggagctgacatcgattcgccttgttgagactgcacttgacagcaagctcaggaccactacctatggcaaaaggttgagagataatgaagtacgactgtattctatccaagatatggacattgatcctccagagaggagcagaaaaagaaccaaaagcaacactagccccttgaagcctgtccaaactgaggatggtggttctgttcacatgagagaagacagcgttacagttagcacggatgtaaaagatgacaatccagatggttacaaaaagttcaccatagctaaactgaaagaagagctaactaagcatggatttggcacgcagttgttagagctcaagaatccaaacaagaaagatatactcgcactttataagaagcatgttttgtgcgagtaaataatggccacgtgaagttccagtcttcaacacataatctatccaaactagggaaacaatagagtagtctgtcagtatttttaacaagctgatgcctcattgttctccaggcattcgtttctgctgattggtttgtattttggtgttaacatcgaattagttccggtttgtgtctaggctttgtatttcttagcttgctggttggctgggtgaagttcttaggacttctgagtgctaaatgacctcgaccaacgctagtcgtgggcaagtttgtggtacgtttgtatatggtatattgctgtgtaaagagtgctttatccaattcaaatatgatatactcttcaagtctgcatccagcataccagcaga

SEQ ID NO: 33713 - DNA, 2736 bp, Zea Mays
tcaagcaacaaaaaatatatatatactcagttcttgttcatatatggccgtggcggttggcgtgccgccctcttcatcatcgggacagtgtaaatataagaaggacgatacatcagcacctaaaggaggtcataaggaatgaagcactgttacttcttacttatttgactcgggatgcagaggaaattcaaaaaattgttgtatttgagggtgtgtttgagaagatatttagcattatcagagaggagggctattctgacggaggtgtagttgttcaggattgccttgaattgttaaataatttaattcgacacaacgcgtcaaatcagatgcttttgaaagagacaatgggctttgacccattgatatcaatactaaagattaggagaggcagtgcatttaattttacccaacagaagacagtaaatctcctcgctgctttaaatactgtggaattgcttttgatggtgggcccatccggtgaagcaggtaaagatgctaacaagaatgcaaatcaaactgcattggctcagaaaaacattctggaccatcttcttttgttgggtgttgagagtcagtgggcccctgtcgctctccgctgtatggcactgcgttgtattggcaatttggtgttaaggaatcctcagaatcttgattctcttgcaagaaagcaagttggagaagagcctcatgttcaacctgcactgaatgccatcttatctataatcttacggacatctatagcgcaggaatttgttgctgctgattatgtattcaagtgtttctgcgagagaaatcctaatggccaggcattattagcatcaactattgctccacatccaaaccaaggagatattcatgaacctgctagtgacatgccttttggaagtgtacttctgcaagctctggtttctagtgatgtcaatggagatatggaggcatgctgcagagcatctagcgttctttctcacattatcaaggacaacttgcaaagcaaggatcgtgtattgcaaattcagcttgagacatctacagcatccttggggcgtactgagccggtattgcatcgtattgttacatgtttgtccatcgcagcttcaatggagggagaaaatgaccaaaacaaccaactagaggaaccgtacattcaaccttttattcttcggctactcatcatatggcttgttgattgttcaaatgctgtcaactgccttttggaatcagcggtgcatctgaacttcataatagagcttgcttcgaataaacgttacgccgcttgtgtccgtggattggctgctgttgttctaggtgcttgcatcctgtacaatgctagccgtgagaagggtcgtgatgcctttgccgtggcagatgctataagtcaaaagattggcctcacaacatacttcttgaggtttgatgaactgaggaaaagcttggcacatccgttgtcagagcagcatcaccgcaaggagctttcccgatcaagtgcgaatagcatgtcagatttccaagagattgaagaggatgaaacaaataagggcgatcaacaccctgtgctttcagaaatatttgattcacagtttgttaatttacttactaagcttgaggctgatattagagaaaacataatggatatatttagtcggacaaaaactgcaacagcagtccttcctactgaattggagcagaagaacggggaggtcgatgaagagtatatcaagcgactaaagtcatttgtagaaaaacagtgcaatgagatgcaggacttgctggcacggaatgcaatgttagcagaagagttactgagaactggtggtggtacgaccacagatacttcacagaaaccgagcagtggccgagaaagggtccagattgaagctctcagacaagaactggagggggcaaaacgacagataggggcactcaaaagtgagaagtcccagattgaagctgaagctaacaaccaaagaaacctttcagtaaaactggagtctgatctcaagagcttgtcagaagcttacaacagcatagagcaggccaactaccgcttggatgccgaggtaaaagccttgcggcagggaggcagcgtgccatatcctgacgtggaagcaataaaagcgcaagctaaggaagaggctgagaaggacagtgaggcagaactgaatgatctactcgtctgccttgggcaggagcaaacgaaggtcgagaagctgagcacaaggctggcagagctcggggaagatgtggatacccttctgcagggtattggcgatgacactgccattccggatgatgacgatgaagatgatgaagagtgattggtttatgtaacctgcaggtctgctggtgtaatctaccttcatgttgggtcatgatattgcgatggtaactggaaaatgtacagtggatgacaaatgcaccgttccaagtttaagttatttctagagaatgtgactaaatagcctcttgttaaatttgattgtctgaataactttttatattacctttgataaatagccccttgttgaatgggcctcagattcatcatcatatatactaaaaagaacgggtctgatctggtgtggaactcggcaacgtccgtagcccctagagtgctgctgataactgttcgacccacctccctgcatatggatgtgagcgatcgaagatcctaagcttcaaacccataagaataaggccattggccctttccatctggacattgctttggggatg

SEQ ID NO: 33714 - DNA, 3817 bp, Zea Mays
ggtgttctgtgcagtggctaaatttctatagtaaaagctatgcaccatgccgtgtagtgagtttgccacgtcacttcttctcagtcgttggataccaaacggagtacacaaaattgtccacgtcgccttttaatagagtccattggatgccttttaaacggtgtgtactctgccttcttttttttcctctcacatcctcccgtaagttccagagaatgctggacattggacactccggccaataagaaaatgggcaaaagaaagaaaaaagaaggaaagcaacgggagaggcacgccctcgctcctggcagccgagaacgcgtctgccgctcctgacgactaggtttccatcctcctctcctcagtctctcgatcttgcacttctcaggtcctgtgacaacaaatctccctatctgcagctttcgcttctttgtgacagtaatcttcatatttttgtctgtcatccatgtcagcgaggtcctactttcatttacaaacaatgtggagtacaactgtttgattgtttcttcatgccagttctgttttatagccatcaattcatgaagaccaatgtcatgacatgctttctcaacatctggcattccaggaatttatctgatcttttcccaattgatccatttattgtcagcacattgcttctcgctatatatatatatattgttatatagattcatatgctcgttcgaccaaaaacggtcatcgattgcagttctatcttgtagatacaaatttacgcatttaaccgatgacttcttcctttttaattttttgtagctcacaggcatcacagctacagcctcagctagttggggcaaaccatcccgacgctttacaatgtacttaatgaggaccgcatgaagaagaaagctgataatggaaaaatgtcagaaatatttaagagcaaaattgtttcttcaaaacaatcaaaacaaaagatgcaagacttgtgttttgcactctctataagtctagttggttggaaaatcagaaattccacatcttagttattgatgaggcagcatacttaaaagaatgtgaatcattaatcccttttgcaactagtgggataaaacatgtggtgcttgttgggatgacaagcaactacaatcagtggtaaagagcacggtgtgtattcattataacttataagaccatttgaatgtatccttgattccttgtgttaccaataattatttatagactgctaatactttctctttactgataagattgctaaagagaacaggtttgggcgaagcctctttgagagattaagtggacttgatttcccaaagcacatgctaaatattcaatatagaatgcacccttccatcagcaagtttccaaatcaaaagttttatgaaggaaaaattatagatggtctcaacgttaaggactataacaatatttatctcgatggtcatatgtatggtccttattcattcatccatgttgaagttggtttcgaagaaaacaataaacagggcttaaaaatattgttgaagctgctgtggtagcaaatattgttggcagacttgctgaagtgacatccatgtttttttggtctataaccactacagcatgcgccgagcagaagaagaaaaccagcgttggtatagtatctccatatgcagcccaattagacaaaataatggtgggaatatatactttcttgattgtgttatgagaactaatgtggctttgacaagagcaaagcactccatgtggatccttggacatgaaacgactcaccttgacagtaattcaacatggtgacagacaatgtttcacgatggaacattgaatgccagtgtgctccagatgcacaactcacaggtgacaaccgtgccacaataccagacaaggcacaggttgtagagcctgcacatgcagagcaggtgaacaactaacagatgaaaaggttgtagagcctgcacatgcagagcaagtgcatcttgctcggctctcgcccagtccatcaagggagagggcccgtctcagtcagtttgctccaggtgctcaactcacagatgaagaagcggctacactagaggaagaagaccgtcctcaaattgaccttctagatggtttgccccaactagctgaggctgtagccaggacgcctgtcagatctgcaagcgatgggcgtttttggtccaacgagcatatggatctatacaacagtatttatagcaagaagaaatgtgctgacaacaaatggatcgattggaaaaatatcaaacgtttaccgaagatgccatatgttgagaaagcaagtcgtgacattagtcttcatgaattgatggctataaaacagaactggtatgaagagccgatcaaacagttctactccacattgtccataaatcaaagtaggacctcactgacttggatgacaggcataaataagaagattactgtcacaaagagattttgtcaaaaggttctccatgttccgtccgagcacaatattaagattaagcgccaattgactgatgcacaagaaaaagagctcatgagtgcagatggtaaccaagtttattcattaaaccggattattacaaagactatcaatcctttgattggagataaaagtaaggttcacgaatcaagtagggtcctactgtatcatattttgttcgggaagccttttgacatagtagacatgttggaggagatggaaaacaatcacatgcacacatctaagagaatgtcatatgccccatacatcatgttactaattaacagtgcgactaaggaaaaatttgtacccgggagtggagaaaataaatgtgtagagcacgaaaagtaaaaaatggagtcaaattcgaataaaaaaacgaaagaatcgaagaacttcaaagtccgaatcgcctgtaccattgaaaaagtccaaatcaatgtgtgtaccattgatgaagccatgatcacttcatctcgtttgttgcaagtgctcaggtgttaataaacgtaagttttgtaggtcaaaaatgatttcagctgtagtgtttgctcacacgcttgtttcaacatggggctgtggtcggcagtagcaaatcttatgaactgatgtaattgttttggtcagcaatggatagccaagcagtggtgaactgatgtaggtattttggtcagcagtggttatgaactgatgtagttcttttggtcagcaatggatagccaagcagtggtgaactgatgtaagtttggctatgtaattttcctgttgctgcaactggagttcctcaagggacagaaaatttggaagccctggtcgatttagcccctgcattagttgaagtagtggctaatagtgttaagttgtaaagaacattctaatagtgttaagttgtaaagaacttttctttgttgggtacgttctgcatgattggttgcgctgatgcatgcaaccaatggttttgttgatgaatttgacaattctgccaccactatcatgaacaactctccagatgcatgggatcttatgcagttcaaggtctgataatttagcacggggtcttaaagttgcaaatgttgaggaaaacatataggagttcaacctatatatggttccagaaaacatataggcattcaacctatatatggttccagaaaacatatagccgttcaacctataaatcggaaagcacacaataatcatacatcgtataaatatatataggcagaattacgcaccacaaatccacaaataagtttcaactctcaaccacacgatacataagtcttataagtcttaaccatacaatactacaccaccacaaatctgccataattt

SEQ ID NO: 33715 - DNA, 1634 bp, Zea Mays
gcgtgatgcagcagtacagtatttgtttccacagcacacggcaattgattaattaactaaaactcataatcgcgccactttcgggtcacagggacgcgggccccgtcgtcccccatccgtttcctcctccgcctcgcctcctctctacccagccccagcctctcccggtctcccctcctctcctctcctctcctctcctcctcttcctctgcttctctccccgatctctatttcccatttccgggcggctcccgttctccacctcaattattgcccacccatccccgctccctcctctcctctcctcccgtcccacccatcacctcgcaccagcgccgggggaatggcggccgcgctgtggacgctgctagtggcggtggccctgtcggcggcgctggcctcgaaccgccccgtggcggcgacggcgacggcggcggcggaggcggcgaacgaggtgctccgcgcgcaccagctgccggggggcctgctgccggcggggatcacggcgttccggcacgacgccgccacgggggcgttcgaggcccggctggacgcgccctgcacggcgcgcttcgaggtcggcctccgctacaacgccaccgtctccggggtcatcagccccggccagatcgccgacatctccggcgtcgccgcgcaggacctcttcatgtggttccccgtccacgacatcaaggtcgacatcccctcctccggcgtcatctacttcaacgtcggcgtcgtcaagaagcacctcccgctcgccgtcttcgacgcgccgccggcctgcacgcccgacccgctcctgcaggtcatttctcatcctagcctcactctctcgatggcacgagctctaattcatcgatcttgggaccagtgacctccttgacatcattcaatcctcaatgatcttgaatgttggcacaacctttatacccagtttctttactgaaagctgcaagtagcatgcgcgggagcttttcagcatgtcatattccacggggcagagagtcgtgaatacacaagaaacagggaaatattcccaactgagggcttgattagagggggatttaagagattgaattcttttctatttaattttgaatagcaagagatttaatccgctccaatctccttcaatctactcctaatcgaacaaggattaagggcttgttcgctttcctctcaatccatgtgaattggttggaattgagtgggtttaaatttcaaacaagtcaaaatcttttggacttgttcgttttgtacttaaaccatgtggatcttttggacttgttcgttttgtacttaaaccatgtggattgaggggtattggggtgtattaaggccttgttcggttatttccaatacatatggattggatgagattgaaaaaaattgagaagaagtttgacttgtttaggattcaaactcatctaatctcactcaatccacatggattgagagctaaccgatcaaggcgtaaggtaaattttgactagttgtggatttatttcctctcaatccacatggatttggaaaaaaatgaacatcataatatttttcaatcctatccaattgacttgggacagaaataaccgaactagagtctacagtgaggtgagacgtgttcgcctctt

SEQ ID NO: 33716 - DNA, 4617 bp, Zea Mays
taaaggttgctgaacaaggtcacaaaggatgggattgagaccactcgaggttccgagctcccgcaatcaccagtgaggactggggattcgctgatcagatgcggtgtgtggggccttgctcagcggcggggctgggaggtccgagcggaatagatgtcgatggcatggcggttgctccgcacaatccatttccggcatctgagcccaggtgtcaggcgagcatccaagattgtagaccaaggctttaccaataatgccccagagctgagtaccaacaaagggagtttgctgaggtgtagcagcatccgcttcggggagaagcggaactcaatttttgcttgcgctccagacaatttggagcagaaatctggacaaacgttcgaagctgatgcccattctgcgctaaaattgtgctctggtatcgggagtgtagttatagccaagtgttctcacatatttgagagaaatggggacacctttgatgggaactgcagtttgcaagatatcctcaagcctggtttatggctctcaccggagaccctccgccggttttggcgtgtctctgagctgaagcctaaggattttcttgacattttgaatggttttggactcagtgccgtaaaagtgagaaatgcaagatttctatggaatttgtacaggtggacatcgcggcagagcaaagagttccaacatctgccaaggtcaaatgagacaatggtatccatacttgcagatgctcatatgctcagtcaagcagaatcactactgctttcattgattgatcatatgactccagctgtttctagtgaactattcagtcagattatccaggtgtattcagaagcaggcaaccttgggaaatcagttgcactttatgattatgcaaggggcaagcatttgattccttcagcttcatgctatcaagtacttcttcattttctaaccagaaacagaaaggatgaattgattttgagagtatatctggacatgcttgaagttggatttggttcttgcaccgaaggaaatattcttgattctgttgtcatggctttaatcaggaaagggtattgcaggtataggcggtttgatgatattgaacaagtcttgaggcacatgaaaaccaatggtgtaaatgttcttctctctggaaactgtgtgctctccaaggccttatcattcttggggctagatcacctaggggtgaaaatcaagagagataatgtcactggtttcccaaaagctgagttttttgattcagttggcaatggattgtatttggacactgattccaaaatgtttgaggtttcattgtcacaagttttggatagcgcacttctcccagatattaactcagagctaatcagggcatctcagcaaggcgatgttgcaagtgctcttcttgtgaaagacaaagcttttcaatggggatatgacatttcaccagatagctgctctgagctattcaaggccttatgtgtgagccctgcttatgttatagatgtcattgaccttatggaggagatgccagatatactttacaaacttgatgctcaaaatctagatttggttgcccaaacattgagtaggaatggaatgtctgctcatgcaaaactggttttagaaaaaatgttgagagaagacttgtcaatcagtcacaatacatatacttatttaatgataggtttatgcgaagaaaggaacatagcagggttttgggaatgttggaatcttgcaacaaagtgcagatggtcacctgatagcaaggatatgatgggcctcatcagttacttgtgcaaatggggagtgattgaggaagccctgaaacttatgaactctttatttgactgctaccatgatctgttttttagtgcatattgtgcacttctcaaagagttgtgcaggacaggtcataccagcattggatgcgcaatgttggaggctctcaaagaaaagggtgtggctgtggatcgatcattattcttttatgtgatggagggcttcctaaaggagcaaagaactgctgaatcaattggaatgcatgacatgtggcttagcaaaagcaaagaacttgatgtttttacttaccgatctgtgttgccttcattaccatggctggacacagatcgagccaagaacttggtagaatctatgctgaccgtgaaacttactgaattctcatatcgcggttgcattgtgaatgaattaatgcaaacaaggaatataaaatgggccattccagtcttgcaagaatcagctcctgggaagctcagtgccactttgttaaattccttacttcaagcctatggttggctaaaaaattggagaaagttagatgcagttctttgcaagatgctaaagatgcatgccaccctttctatatctagctaccgctttcttgtgtgcagaatgtgtgagcaaagtcgtttttctagcgcttcaagccttagagcacttttccaacatactgacaagtcaagagaactgattgcatgcaacattctaatattttatctttttcaaagaagaaacagctcacagattcatgatttattgaaggacattgaaggtaatggtatttctcttgacaaaaccacatatgatttccttgtctatggatttcacaaatctggggatatcaatgattcagttaatgcgcttgatgcctgcattgctcagggaataaaaccaagcaaccgcagtctcagaatagtgttaagtcattactgcaggctaggaaaccatgagaaatcactagcattatttcacttgattgagcgcaatggatggaagcatggtttaatcattaagaccaccctagcttcatgtctcctttcatttgggagacaattggaagcaaaatcatgtctgaacaacctgagcaaaggtgagtttatcggatgttcaagcaattttgatgatctcatcaaggaattctgcattctaggagatttgaaaatgactctttatctgctaaatacaatgttaaagaaaggcacactgcctaatgaagccagttacagttctgttatatataaactttgtacattgaaggagttcgatcaggcacttgattttcttgctgaaatgcagctggcaagtctaaaatcaagtgaaatctcctgtgatgcacttgtacatggcctttgtgccatgggaagaccttctgatgctagaaaggttttggaaatgctaaccaccttgggatctgcaccatcctatggcatgtttagagttgtttttgataactattgcagaagtagcaatctacagaaagctgcggcacttctgcatgacatgcaacaagcaggacaagtgcccaactttgagatgcattggtctgttataagcaatttaagcagtaccaatgagaaaactgaaggacatggagagtgcattttgccaaacctttttctttctgcaaattccccttaaaggtcataaggcgatatatggcttccagaaaatggtgaactgatgattgttctcaagttgaaccctagtggaactgataaaactcgtgaaaccaaggttatgcaactctggaactcaaacgttctactcgaggattgatggttcacataaatgtgggaacacgtaggaaaaactatgcatcttcgatttaggttgcaaaagagggagcttgaactcattacctgagccatcacaactttcttctctgcaacttggttacaggttatgcccttgctaaagggataatgcaaagatccctacaacaccaattagaattggggaagacgaacctcctcctcagtctcctagcttgttcgttgctctcacctgggatctgccctgggatcacctttgcaacatcagttgaactaaagatttggactggacatggttcagttgtttttgaacggtgatctgtgatatgtaaactttgtgttgtttaaaacatatatcagttgtttttgaactgcgacctgagctatacaataagcctgacttttttacagagtacgcaaatgccaggtttttcctgtttgggcacaaatggaaacaaaaaagttggactcagcctatcgtgaagctacgaaggaagagcactgtcccattattctgttttttcgaatatattattgttgcactctcaaatggtgggttgctaacttgctatgtcatgggagtttgggtgaaggccagaaggatgtgatagacgtcgattcgatgcaggtccatgggatgctctgtacaggggtgggaatatcctagcgttcgccttggtttcggtcttctctggcagcaagtgtgctcccagttttcaagctgtcaaagctgtccaactcagttccttggggaaggcctcgattcgctcatctcctcggacccggaggactacaacaatatgaagcagtatgagaagctgaccgtcgcgtcaatttactttcttgtgatgagtgttgagcatcatcatatgattcatacaattgatatgcaactagaacccagattttaatgtgtacggttatgatttatcttttctcgttaaataatgtgagatattgaggtgtatgataaattatatgttcatctctatgtaatcattatacactaacattttaataacgagagcatagaacgataaatagtgcttct

SEQ ID NO: 33717 - DNA, 2957 bp, Zea Mays
cgggctgccacggcccgcacccccgcgcccgccgttggttggttggctgcctgcctgcctgccttctcccgcggagggcaccgcgcctcgccgcgatccggtcaccgccctcctccctggcacgggcggagctccacatcgcgtggcagccgcgcggtggcggcggcggcgtgttgaaactgggaagccattgacgatctggtgccgcgtggggaaaaagggaggcgggcgggcggtgtctttaccgcccgcgcgcgggcattaactccgggctgtggtacctgaccaccctggcttgcggataagcacaacgccatgggagcacagagctgacctcgaggaagctaggctgctgcggcgagatggtgcgggccggcgagaataggcatttcttcccgctcaccagcttgcaaatcggagatttacagtcatatcttgcagaactgacaatatttttgtgccctcataccaagaagttccttatattgctcgacaatcgcccatggttgctagatcaggatacaaaacctgctcatctatggcaattgatggttactaagtcaaggttttcccctttcgccaactctagggctaggagaaggagggatgaaactgatgaaaagcttgtgtactcaacaagctcagtatctgctccccatttacagaataaatcttccagatggtattccttgatcgacgacgctatgcgggaaaagaagcttcaagtaaataagttgaaggatgcccgcatactgaacagggagcttcatcagactttatatggttttatcatttttgaggtagactgggctgatgtgcgtggcatcaattatttgaatgaacttcagacggatacatcaatggttgtggagtctaaaataatgaagagatgggagtttgatagtgtcaaacaagcttcaacattgatcgcttcttggttctctggaaatccttttgaatgtcagctcctacaggattatttgaccaacatctcttctaacggagatatattttatgatgctcaaaatgatttcttaacacctgaatgggatagtgagaatttaccaagtgatagtgatgattctagccatgttcaaatcatcagagagtcatcaggtttcacagactcatcttacactacacctccttgctctggaccttacaagagaagaaaaataacaaaatcagatgatggaagtagttcgactgaagaatcatacacagaaattgtggcctcgccaaaacattcgtcatcttcgtgttcatcatgtgacagtgataatgagaatgctaagccgctattggagcctagcacgtataaggatgtactgatctgcttccgctttgatgatcatgaccttccattcggactgaaagaagtcatactatctgacgtcagactgttgacgctacttgagtatggccttccatcgtgggttatatttcttcagtcatatccggtgttttgcaagatatatcggccatggatgtgccctcttgccagagcattgtatgtcttgatgtcattaatcactgttcttataggattttatgacctctacaagaacgtgcccatgctgaaggcaactgcctcaagattgtttggccctttatttgattggatagaaacatgggaaatgatatcaagacttaagtatcttggaactatgcttttcctgcataattttcagcaggcttttacatggtcccttaagattgtgggtgctgctaagtctgctcttagtgttttgacaaagccaattgcgggaccaattctggaggtttttgaacttacgatgccaatttggaacctttgtgctgagacagtaggatatctgagttcagttgtcatgttatctgtagaagtgtcttggagtgtagttattgatacagtggagatgattgtctggccattttggtttgtcttcagtactatggttagcattgtgaattcaattctgtaccctataatttggctcctcggagagatactagctgcacctttccgactagtcattgggctatcaagttttgtagtggacctttttgttgatattatcaattttctaagggggagctggtcaacactaagtgccttatatcaagttggatctgttcccagatcacctgtgcttacatctgataataacatctgggcctcactgtggaaagatcttttgtatcagattttccgtgcactacggagcattttgtatggttttgttgccttcttttcaacatgtaataggcaccgactcagcatttacaatcacattcaagtgttcctccggcgcatatctcatgtcccagctggtgcacgatttaccgcctaccttgatgggactaggaagtatagcagccagaatcatcataagagaaggaaagccaagacgagataacagtgcagttggcaggtcactgagcaattaacaagctaactcggcgcaaatccgagctcaaaaaaagcaaagaaacaaaacaatgtaagccgaacgaaatatggagagcgaacaatcgataacaagagtttgattggagccttcggagaacataaaaaccaaggaagagtccagtacaggagttgtacattgacgctgaaagttccgttacattagctctaaccagtgaccagcagttcccttgtgtaccaaatacctggcgagcagtggaggaaaacctgcagctgtacatacgcggatcttgtagctgctgtttgttgtaaaatgagtaatagctagctttgtatagtaggcctgtgcatatcctgatatcctcttgtagttgccctccggacagcgattttgcaatgcatgtgtatgtcaagtgttgagttttcttcgcgaagaagtgtcatccttttgtcttactgatctcatttcagcagttatttctatggtcattgtccatgtgcacgccatgtaaacactacgtagtagcttacaatacatgtttaacca

SEQ ID NO: 33718 - DNA, 3390 bp, Zea Mays
cctcagtcagtcctcattccccatccgagcggaaatggaggagatggccaaggagctcgacgacctgcgtgccgaggtggaggcactcaccgcccagctccgcgccaagtctgacctcgctgacggcctcaagcgcgcgagcgcggaccacgccgcgcggctgcgggatgcccgggcggaggcggagcggaatgcggcggaggccgcggccaggggtgaggaggccgccgccgccggggagcggtgcgaagtgctagagtccaggctagccgagaaggagcaggcgctgaggcacctctgtgcggcgcacgaagcgctcaaggccacgctccgggagaagatcgagggcctcgagggcgacaagaggggtctcctcgcggcgctcgaggacgctgaggcgaggcgcggggagcacgaggccgccctgcgcgcccgcgacgtcgaggtcgcgcggcttagggggcttctgtcagagaaggacaggaggtgcggcgaggctgagaagagggcatcggcgccacgagatgtggtgatgagggacgacatgctggggaagctggaggaggagaaggccgctgtccagtgtaagctcaagtggaaggatgagcagttcaggcacctcgaggaggcactcaagaaggttcaggatgacttcagggctgccaagaaggagtggggctcagatagatcaactttggttgatcggattgacactcttgaggctgatttggattccaagatcagggttgcagaggatttccggtccaggctggatatgtgcagccaggcattagcccatgaggaaggccgcaggaagcgagtggaaacagagatgtctgagttgcgccacatgtatggcaatgtgatctctgaatatcaaggggccaaatcaatggtcgagtcgttgagctccaagacagatggggatattgcatatttgagaagctcactggctgagaaggccacaatgctcaaggaaatagaatacagtaaggcacgtattgaacaagaaaatgaggatttgcggtcaaagctcaaggagtatcaggaggcacagattggtggtgcagatgctgttgtatcattgaaaagtctgcgggagaagttccgagccctggagcagacacatagaagttgcaccgagaagctaagaggtaaggaagaagaatggagactgcagatgacaaagcttgtgaatgacttggatggatgcttatcgcagttagaatccaaagatattcttatcgtgcaactgcagaatgagttgctgggtagtcataggtcccttgagctacaaacagtggataattgggaagcattgataatacttactgttgtacagacaaaattttatgagtcctgctcatttgttgatactgctaaactgaatatgcagcatcactgtgaagaaattgagaaggaaatatcttctgccaagaaacagttagaagaacaatcttgcattattgcccagtctcaagctgaacagaaacaacaatctggggttataacaaaattgcatgcaagaattgaggagctagagcatatggaacaagaacataagaagatgcaaagacaacttgatgcatacaaagagatgagggacaacatgttaagagatgctcactgcctaaaagatgaaacttcaaagaaggaaagcaccctgcaggtgaaattgagggaggcattaagtgctcttgatgaagcaaactgtgcccttgctgacaggaagcgtgagctgagccagttagaaatcagtctccatcaccaaaaggaagcgattgagcatttggaaaaactgaaagttgatatggaagctgaagccaagagctatatgtgtgacaaccgtatcctgaagagagatctggatactgctcttactgccaaagtggaagctgaggagttgcttaggcaagaaaaaatgcagttaacatgtgctcttgatgaggcaaaatataccctttctgagaggaacagtgagctgacccaatttgagatcaattttcatcagcaaaagcaagcactggcgaacttagagaaggtgaaggttgatatgggaactgaactcaaaacatgtatggatgaaaattgtgtgctgaagagagatttgggtgttgctcttattgccaaaatggaggctgaggagtgtcatacaaaagaaaaggaggagttttgtggcataattaaagagaaaggaatgatgattgataaacttcagcaatacgtcgctgtgctagaagaagaaaacatggtcaagaaacttgatttgggaagtcttatcaagatggagtgtgacaagtccattcgtgaagtgaagaactggtattctgaaattgttgagatctctgacaaaaagcttttggagctggaagaaaggcttagattcgctgagcagaaattttcatgcagggagcaggagatcatgaatatgtttgatcaagaggaatcagattggtatacactaattgcagagaaagaaattgctatttctgatattcaacaaactgttgaatctgttcagcttgacatcaagcaccttcttgaggcagcagcagcaaaagtggcagaagttcagctagaggtgaatcaactttatggttttgctgaaactctgaattcacttaacatcatccaagagcatgatactgttttcaaggatatgctcattgcagagtgcgaaagagaacttgactccctgcaggtgaatttagtgcaagagaagcatcagtcaagaaatttgaagaatcttattgaacagctcgaagctcaaactgcttcagaaatgtcagaaaaggcagaggagcatctagaagttacgaataagctgaaatcattggaggggagaaatgaaacgttagatgagcatctgcgagagcttaagtctagaacaactgatatgtctaaagctgtactacaagagaggaatcagttggtcaatgagctgactggactaaccaataccatcggggaggtaatttatggaggtgaaagtatgatgtcaaatttgagaaggatcatgcagaaagttaatgaggaaccttgcaatgacaggcttacctcagaaaaaactaatggtagaagttcttcacctttgatcaggcacaaatcagggcatgtcctagatagaagatcgcctctgaaggagaacaactactagttagtataggtcagatcgtgtactgatattgctgtaacagttgtactcggttttctatgaatctaacatgccgcccctagagctgtgccttttcttctccttccccagtgccatccgtgttttgttatttaaacacagtggctgtgttagcgaacacttattttatggactgaatttgaataacatagtttcccaagtgttgaatgaaatgaagcctattgtgtttgctgcaa

SEQ ID NO: 33719 - DNA, 3325 bp, Zea Mays
cgactgctctctgccatcgctgtggcgaccccgacggagccaagcgacggttcatcttcttgcggcggcggcgacctcgagctgattgcagcgagaaggcggggacaaatcgatctcccctagctggctacacccgatggagccgagggttccttgcgttgacggcggcggcgacggcctcgagctgagggccgcgagaaggcatcgacgggagggcgggcgaatccacgtcctcgatgcgcaaatcctggagcctcagcgacagagatcgaatccattcaggaacatctttcatctattaactcaacgagaggtcttacctcgaacgaaacaccatgctaaaaggatatggaataactctccaaaatatgatcctcatttaattgagttaaggttttcagatgcagatgctaaacttggtattttatcttgggcagaatcactgtccctgcatcgctggtctgccaagtattgccctcttttgccacctcctaggtcaactattgcagctgctttcagtccagatggaaaatcacttgcgtccacacatggtgaccatactgtgaaaataatggactgccatacagggaaatgtgtgaaggttttgagtggacatcgacgcactccttgggtggtcaggtaccatcctttacattctgacattctggctagtggaagtttggatcatgaggttcgtctgtgggatgctaatacttcagactgtattggatcacaagacttccatcggccaattgcgtccattgcatttcatggaagaggagagattctggcagttgcatcaggtcacaaattgtacatatggaactacaataagagagatgatgcttctgtcccaaccatcatactaaggacccgccgttcgttgagagctgtgcattttcacccgcatggcgctccatatcttctaacagcagaggttaataatatagagtctgcagactcaccgctgactctggcaagatcatctggatattcaaactacccttcggccctgctggtgtcaaacactaattctagattctgtccacttcctgagtccaatgtgacgtcaccgtgcttactgtggcctgcgtacctcagagatgatgggattttacatgtgcttggcaatgccagtagttcaaccattgtgcagcagagatcatcattagttcaaccttccacatcagatactgcaaatctacagcttgaacagtttgctacccctatggatgtatgtcctggagagccaacttcatttaataacatatcagatgcagtaactgtgcctacttcaaatgcaattgaaatgcatggtgctggcggccagtctaacccaagactgcagggcagcagctctattagtaatcttgagaggttcagtgctagagatgctttgcaagtgtcttccctgagcagcattgagccaatcccatcaacagctgggtcttcgggatccaattcacgccgtgctatgccactgaatatgctcctcactggtggattagatgttcaaatgttccaaagaaatgtaggaagtggacaacaggatcattttctcttcggcgactcaagtaactgggaagtgccatttgtgcagggttttttgatgacccaaaaccatacaggtgcttcatcatcgattccccttacttctggcagttctaggagaccaaatcgacactatgcctcacgctctgtgcctggggttgggagtttgctcctagtaggtcctcaaattgacgaagctgaagctcatgctgcttcactaggtgctggttcagaaatcactgcgtcgatgcttgctcctggtactgaattgccttgtacagtgaagctcagaatatggcggcatgatatcaatgaaccatgtgttcctttagcacctgaggcatgccgtctgacgatttctcatgccgttctttgcagtgaaatgggtgcccatttttccccatgtggacgatttcttgtagcctgcgttgcatgtttgttgcctcaaacagaaggtggccgtggtagccaattgcctgtgccttatgaagaggctggatcatcaccaactcgtcatccacttccctctcaccgagttatttatgagcttcgggtttattcgcttgaggaggagacatttggggatattcttgcttctagagcaataagggcagcacattgcttaacttccattcagttctcacctacatccgaacacatacttttggcatatggtcgtcgtcatagctcgctgcttaggagcatagtcgtggagggagaaaatgggattcctgtatatactattttggagtgctggttctgcagttgcatgatactttttgatacatgggattcaaaatgatttgcttattatcctccacaactactcatattgctcatactttgtgtacaatgtaagccaaactatcaatctttttttttaatttattactttaggtatatagagtttcagatatggagcttgtgagagtgcttcctagtgccgaagatgaagtcaatgttgcatgctttcatcctttaccaggaggtggccttgtttatgggactaaggaagggaagctcaggatccttcaacacaatggcgcaaacatgataaacatggggtcgggttgcttcattgaggaaaatatggttgagatccagaggtatgcattggaatgctgaataagcttgaccacatcatgtgaattttaggcttacttccatggtctttgcaggggcggcaggagatgtaaatctacatggccaccgtcgtggctgccatcacgatgcttctttttgttgtatacttcacctatcctaacaagcggtcgatgatgcaagaaattacaaaggcgaatgggattctctgggtttgattttacacgtgataatcatgtatttttttcctgttctcgtctgggttgattaatcattaaacgtttggagtttctatatctgtatgaaatagcatctgttgcaacataagaatatggttgacactagacgtctacaagggctggtctagaatgccgtgctattgtcattattttttaagtttaccaagagctatctgaacgcgttccatttggattgaggtgtattgaagtggatggatgaggattttgattagtagtggatttattccctcttaatccttgtagatttaggagaaaacgaacatggcctaaattatttttttcatttcttccctggtggaatattattagacgccagttacatttaatgctcggtcgacaaagttgtcatgaaaatcatggaatcatttggtttctttgggatttttatttttaaccctcaaaaaaataaaaaa

SEQ ID NO: 33720 - DNA, 204 bp, Zea Mays
cgccaaccctggaatcggttcagctggaggtagggtccagcggccggaagagcaccgcacatcgcgcggtgtccggtgtgcccccggcggcccttgaaaatccggaggaccgaataccgtccacgcccggtcgtactaataaccgcatcaggtctccaaggtgaacagcatctggccaatggaacaatgtaggcaagggaagtc

SEQ ID NO: 33721 - DNA, 1618 bp, Zea Mays
ctcgcttcgggctcctttggaatgcaggctgcgtttcttgcttctcttgtggaacgtgatgatgctgtttcttcatgttgtagttcgttgagagctatatcagagatgtctcctgctctccaactggcaactgaacactgttttattcttccagatccaccaagtgacctcaaagatccggcttccactttcaggtaatgtaacttatcgtatgacacttgtttggtatagacctaaattttatactgattaaaaattggacttgtagcccttgcgcaggcggtgagagccaagaaggtgctgatactactcaaaatgtgaatgataccgataaaaacaacagcgaaagggaagatagtgatttagctctggagaaggagagtgctacattcacctcacagaagcagcacctggaagaattatctgacgcaaaggaaacatttattggaggtcctgaggcagaggccaaatccaacagcacaaaggattctgacaatccaattgctaaggtggggagcagtgtagcatctgacaagatgagagatgggtgcaatgctaatgccattccgtgtcctgctacttcaaatcatacaactgaacccagctccgtagcttcccaggaagccagtccagcaagtacaaaagacacagctatccctgaacaagttgaaagaccaagttctgaggaattactagctgatgtttcacttccacaagggaaggtagagccgaagaagactgaacctgcacctgctgcctcgtctagtatccaacagcatgggtgcaaacaagctggaaatggcaacactgaacctaaaagcaaggaaaacgctgcggccgatgatgaccccataacaaggctacagcgagcggccggtactgccatttcggcagctgcagtgaaggccaagttccttgtggagcaggaggagggttacattcggcagctagctgcacttgtgatcgaaaagcagtttcagaagatggaaacaaaaatgtcgtttctcaccgaagttggaaacctggtgttacgatcgagagatttgacagagaggatgcggaagaagcttttgttggagcggagcatgataatcgcttctcgaatgggtgcagcagcggcttccagaacaatccagcacggggctccggtgaccaccagactcccagtagggcatgtgcatgccttgaatccgcagctgaggcgcccttgaagctttttatagtatgtatatgatcagtaagactggcctatgtaggaggtgtgctaatccgcctctgtataaaatgcagtgtactgtagacgcgtctagggttctggagtcagtaggctttgatgctcaccacaccacacgacttggcttttcttttccttttcgtttaaccaagagttttcttctttgatgtcttacctcgccaccgccatacaatgacatgtgtttgaactcgttaactcgtggtcagtcaagctcaaacaatggataggaggtcagttaagcttaaacaatggacatacataaaaaggtttgatgctaagttacacaaaatattagggtaacattgtttttttcgtctcctgcaatggtgttgtacggtggtatttatagctaaccgagggtta

SEQ ID NO: 33722 - DNA, 3826 bp, Zea Mays
gttaattgatgatccaaatgctgagtttcagccaagtcctttttttacggaacaactgacggcttttgaagtgtggcttgatcatggctctgaggacaagaaacctcctgaacagttacccatagttcttcagtcagcctacaaaaaaaaaacgattgttatttgctctggtgcgcattgagattgggcatttgaaaatattatggctagatttgtcccaaaacatactccctccgattcgttttagtagtcgttttggacatcatttcacataccaaggtactgcttagtcagtcacacagatttagagcgcttgttctgcttggaagatttcttgacatggggccatgggcagttgatttggccctgtctgtcggaatatttccttatgtactcaaactgcttccaacaaatacaatagagttacgtcaaattttagtgtttatatggacaaaaattctctctcttgataagtcttgtcaggttgacttggttaaagatggaggacatacatattttattaggtttcttgacagtttggatgctttcccagaacagcgtgcaatggccgcttttgttatagcagtcatcgtggatgggcataggatgggtcaagaggcttgtatgaatgcagggcttatagatgtttgcctgagacatctgcaacctgagaatcttcatgcacaaacagaacctttgcttttgcagtggctttgtttatgccttgggaaactctgggaagatttccctgaggctcagttacttggtctgcaaacaaatgcaccagaaactgtaatatgcttattgtcggagcctcgacctgaggtcagagctgctgctgtttttgcacttgggaatcttactacattatcaaattgccctgatgatgattctgatgatgatgaaaaggtgaaagctgaaataaatgtagttcgaagccttctccagatatcttcagatggtagtccccttgttagatctgaggttgctatagcgcttactcactttgcgttgggtcacaacaaaaatctcaaatctgttgctgcggagtattggaaacctcaatccaaatcgttgctgaagtcattaccatcattggcaaatataaataatccaagcaatgtttacagtcccaataatattctccaaggcagcattggtcctgtgctgagggttggcagtgatagcggtgccgctggtcgtgatggacacatttctacaagtagcccaattgcagcaagtagcatcatgcatggctctccccagtcagatgattcttcccaacactctgattcaggcatattactgagggagaatgcaagtaatggtggtctcagctacactaggtgttgaacaagtggccatgaaaagtactcgatttaacagtggaggtctacaccgaggagagacatctgcgtcaacctttggaatggcacactcttcttcttggagagatatgaattctggaagcaactcgatgaaatttatgacccctcctgttagccctcctcagcatgattatcttctactaggattgcgccgagtgtgttctatggagtttggacagcatcctataaattcacctgatggctttgctaatctccttttaagctctgctacaggtcccagtaatgcagaactaaagaaacttcccgaatcaacaatttacaactggagttgtggtcacttctctaggccacttttaactgcctctgatgataatgaagaaaccaatgctagaagagaagagagagaacggattgcactagatttcatcactaagtgccagcgctcctgtacgtggatgtacatttgtctgcattacattattgttgttggttttcttgattgtttacctgctgtttttcttggtggttcaacctgggaatagcagcctgcaagattacaagccaaattgctagttgggatacaagatttgagttggggacaaaggcagctttattattgccattttctccgattgtcgtagcagctgatgaaaatgaaaaaataaggtgaaattattattgcaattaaaaatcctagtgcctgaatgcctaatacggactgctacaattgtgctgaagttctgtatcatgccagtgtgtggaactatgacgatgcacaaccagtgaactcttttcacaaccataagttgtccgacagagggctatctaaacttttgcttatcaacgagcttgatgagtgcttgcttttggctgcctcaaggagggcagaaacttgtaactgctttttcatcagttcagggacatcgagctgctggtcgcagtattgtgattgactggcagcagcaatcttgttatctgtacgcatctggtgacatgtcttccatcttggtatgggatcttgacaaggaacaacttctcaacaccattccgtcatccgctgatagtgccatttctgccctgtctgcatctcaggtccgctctggatactttgctgctggttttgctgatggttctgtcaggatatatgatgtttgctctcctgataggcctgtctatgtggccaggccgcatgccccaagaacagaaaaggttgtgggcatagggtttcagcctgggtttgatccatacgagattgtaagtgcatctcaagctggagacattcagtttcttgatgttagaatggcagcagaaccctacctgactattgaggcacacaggggttcacttacagcattagcggttcatcggcatgccccagttgttgctagttcagccaagcagatgattaaagtgtttagtcttgaaggagaacagttgaggataattcgctacctgccatcttttatgggccaaagaacaggcagtgtaaattgcctttcttttcacccatacaaatcactcctggctgccggtgctggtcataatgctcttgtctctatctatgctgaggaaaattacaagtaagatcgaggcctatatctcatgctcatgataatgcagacacagtgcgatcgacaggccttacatttttggccaagtgatgctccacagcatggtgcagcttcaagatccaagatgatggtaagctttgtcacagagaaggtgttgatggctccatggctttcggtgcatattgcctgttggacggcgtgtgcaatttgtatgatacagtcaagaactcaagattcattaggcctccttgcattgtgaaccctaccctgatcctgccgttgaacttggaggccccatcaacaaattaatcatacctaagttaaccaaaatgtaaatagccagtgcattcgggttgtactttgtcagcattaatccctttttcaagtgtaaaaaggtctgaaggtgcttgatatgataaacatggcttggtagtggctgctgactgggcaagtggggttgtgcatatgggcctggtcgcacatttctgctcacagatgatgttgaatagatagatgtctgctcacagatgaggttgaatagatagatgtctgctcacagatgttgttgaatagatagatgcatttgtccagctaatatagcgctagatgggggtagcgttggcctgcatgaatgaaggaaagttgtcgagtgaggagtgaccttcattgccattctgtgccgcaacaagtctccatgtgttatcagatggccctgtagataatacatatatttgtagatgtgttttgttcggtgaattgtgctgaccgctgagtaaaatgtattgtgaacgttgttgataaatgctattgtaatgaatttgcaacaagaaaaaattatatgctattgtagtgtatatcacaactctggttgctttttatttttatttttttaaaaaaagatctttc

SEQ ID NO: 33723 - DNA, 1336 bp, Zea Mays
ccggaaagagaccaaatatttcgcgctctgcccagccagcctatccactccagctccacttcttccccgcacaccacagtcacacgcgcagtgctagacgacgaacaccagagggcaggcagatgatgatggcgtccgttctcgccgtctcccggtggtcgtcgctgcttctccccctcctcctcctcctcctcctcctcctggtggcgacggcgtcgcaggccctcaacgtcggcgacctgctcgggacagcagcgccttcggggagccagggctgtagccggacgtgcgagtcgtcgttctgcataggtaataagcaagtcacaaccaatcaatccgtcttcttcctttttctctccagcagaagccggtcctgttcatctgttcttcatcaggtggggttgctttgctgagttcccatcgccatgagcggacagaacttgcgtagcatacaattcttcttcttctttctttctttttttttcttcttcttctggaggtcaagcgcttacctgaagccgactgctttccagcttccatcagtcgggtactctactcactcaccagcaaaagggtactgtactgacgcgcttgcttcttttttttttcccccttgtccaccgtgtcccttgaaaacgaaagtcccgccgctgctgaggtacggcaagtactgcgggatcctgtacagcggctgcccaggcgagaagccctgcgacgcgctcgacgcctgctgcatggtccacgaccactgcgtcgacacccacaacaatgactacctgaacacgcggtgcaacgagaacctgctgagctgcctcgacggggtgagcccggcggggccgacgttcccggggaacgagtgcgacgtcggccagacggcgtccgtcatacgtggggtcatcgagtcggcggtgctcgcgggcaagatccttcacaagcgcgacgacggccagtagccggcgtcctggcagtggcaggacaggagcgggccgacctgagtcagtgaggctagctcgcggttggtacagacagtataaagccgcttgtgctggatttcaaggttatgaacggccggaccacctgttggagttcgtttacgtattaggtttagttcatttactttaaaataaaatttagaataaatgtcaaagattcgtcatgaatctgaattcgtcttgtgcaacaaatttaaaactcaatccattaaactcaagtcagattttgtttttttaatctttttatgtgtggttatcctgaatataatctccctatataatagagttccctttaaatgtcaatgagaaacaatcaatctactgtaggttgaggttttagacaa

SEQ ID NO: 33724 - DNA, 3045 bp, Zea Mays
cctcccctggataaaagcaatcctcccgcagaagcagaacgattccggaaagtgtctcgaatcttccaaattctttcccgagacctaaaattctctcgacggattcgcctgatctgacacgcgatctctcggctcgccccaatggccgacaaggagaagttggagtctgaagaggagtacgagagcgacctcgacgacgcacccctctccgcgttgcggcgccgggacgctgcgagcgatgacgaggacgaggatgaggacggagggatgcccttgaggcggaggaaggctggatccgacgcagattccgacgggcagggcgccgccgaggtgtacgacgaggatggcgcgtacgaagaaagcgaggagtacgaggaatacgagtacggggggttcaaagcagggggcggcggagtgcgcggggtggctgtcgaggcggttgccggtgcgggccatgaggaaggcgaggcgggggatggggaagctgaaaaggcgggtgaggcagcgccaggaggcgaagaggaggacaagaaggggaacgaaccctactccgttccgacgaccggcgccttctacatgcacgacgaccgcttccaggagggccgggggcgggggcgggggcgccaaaggagaatggtgaacagtagaaggttatggagtcctaaagatgagcaagcctgggttcatgacagatttgatgagatggacctgcatgattttcatggtgacaatccaaaaagaaagcagggaggtgtctttagaggacgtggtggtggacaaggtggtagaactcgtggtattagccgtggtaacttcagaggcagcagaactcgaacatactatcatgatggtagcaagaactacagctatgttccaaaggaatctcatgcataccgtgataacaccaagaatgcccatcattcttcacacattaatggaaagaatagagttccaaaaccatctcgtgaccactatgatggtgctaaaagttatgacattgtcccaaatgaatctcacatttaccatggtgatgctaagagccaaaaaaatgcaccaagagtagttcgagggagaggctccaagcgttaccaaccacgcttgaaaagcacctctgatgtatcttcagtgcaaaataccaaatctcagagtcttgaaggcacttcgtcaaatgcaaacttggtaaaagatgaagctcaaggaccaaattcacgacttgagcaagtccttcctattaagcagactgttgcatcaaacttgaattcagcttcgccaccattttatcctgcgaggtcatccagtcaagagtttgcagttggtcaaggagagaatacacaagaacttagtactaacctagtaagaggaaaggcttttgtgccatcggggcatgttgaagctgctataaatggcatgaatagacctgcactgcttccacctgcatcgtcatcaaatggtccatttcctgtagccactaatcaagtcaatagagattatggccatcctgcacatccaattgttcaacaaaacccagttcaaccccctacacgatctgcacccaggatgcctgcccagatgtttggtgcaacattcagcaatggcagtaaaatatcacctgcacaacctacatcaactattttagatgatgacgctgaaatttcttcacctagtggatcaaacaaatatgattctcggttaacagttaaaggacaacctgatgaccaaggagaagagcgagcttcgtttctctatggtggggctcgtgttcttggggctacaagcgcaatgggaatcacacttggtgatcaaaattttcatggtaccccagcattgctgccaggtttgtatcatggctcagtaaaacatgagttcaataacatgctctgtgaagcgtatcaaagaaataaactactttgaagcttaccataaactagtgaagttatgcagtttggaggtcagcgaccagttggacgtggtgttccttcaattggtatggctctgccaggatttgtgtctcaacagcaacttggtatcaataattctgagatgacttggctaccaatattgactggtgcctctggagctctaggagcaccttatggttcaccttatatagccgtcgatggaagttattactctcgaccgcctgaacaaccatcttcatcagtttctaatagagaatctagtgcaaataatgcttcttctctgaagtcccaagaaattacagaggttgcaggcgacgcaagaactcaacaccaaaataaacctcgtcgatactcggagatgaactttggccagtgaacatagtgatgatagtaaatcagtgagggttcattggagctttggatccaagtaagacttgtgcaagagaccctggccttaccaagtgcttccagcatttcactgtctgatgtctagcactatcttgtgacccaaacgaggtttgacaggaggtgttcaaaccatcgctgtggtcatttgctgtgattattctgacgggctggtgttgttacaatcattaggtgagattttctggtactctacgtcaccacaataccagacggtcggtccgtaagtgtgaaggtcttgatggaaatcgtgaggacggaggtctcggtcgtactgcaaagctcgtgtccccgctgtacagtgtacatcacgtctctgactgtgtttgggtgtgcgctgcctctgcctacgaactcttcggtggttgtcgcatttttgaactgacaaataaaaaagaacgtgttgagcaccaaattgagaagggcggacggtccagcccggtccggacagtccgcgcctgtgggctgcacggtctgcgcaagcgcagaacagattagggttccaagttttgtgctacagttgttagctagattcgcaggattcgcttggaaattagtttgtaaatggttcagtccccctcctctataaataaagaggtatacggtcgatttgtaataatcaatcgaatcaataaaacttctatctcgcatttattttctgtgcaattaggagtggttctagtctatttctagtttagtctct

SEQ ID NO: 33725 - DNA, 1206 bp, Zea Mays
aaacaagcccgtgccacgggtcagataagcttttctctccccttcgcagctgcaaccgctcgccgcgtgctccctttgtactgaaccgcatcctccccgcgccgacctgctccggcgagttaaacatggccgtcctcctccgcagcacctccgccgccgcctcgactgctggcccctcctcggcgctgctcgccaccaccttccgccgctcccgcggctgccttctgccccgtgccgcgccgcagcgccgcttgtatgtggcccgcgcctcggcccagcccctcgaggtctgcgctaaggagtccatcaccatccctggccgcctcggagactgtcctttcacacagagggttttgttgactatagaggagaagcatctgccttatgatctgaagctagttgatctagctaataagccagattggttatttgaaatcaacccagaaggtaaagtgcctatcgtgaagctcgaggaaaaatggattggtgattctgatgttataacacaagcattagaggagaaataccctgaaccacccttggcaactccaccagaaaaagcttcagttggatcaaaaatattttccactttcattggtttcctcaaaagcaaagatccaagcgatggaacagaagaggcactacttaatgagcttacttcatttgatagttatctaaaagacaatggtccatttattaatggtggaataatttctgctgctgatctctctctgggtcctaaactatatcacatggagataactctgggccactacaagaattggtctgttccagattcactttcttatgtaaaaacatatatgaagtcgattttctcaatggattcttttgtcaaaactcaagctctgacagaggatgtaattgctggatggcgcccaaaagtcatgggttaaattcatttctaaagttagacgttaaggggcggatgtagtacaggtgcatggggatacaggtacaagcagaacagaacaggctcttgatcagttcattaaggataacaaagaagcaaaaaaactcatatgcttacggtgacattggcaatggctatacttgtggataaatgttggtgaattgtatccttatatccgcacacctaactatttaatgtcattcagtcgtcatattacattttgagtgaattgcatcgtttaggtctatgccccatgattgaaatcctgtatctgc

SEQ ID NO: 33726 - DNA, 1828 bp, Zea Mays
acgaccaaaccgctcacgtcacgtgcctgcccatcgcttcccaatcctaaccgcccgcagcgcagcggcgagatcgacatcgacctcaatcgctgacgagtgacgacctttccgtgtcgatcggtctccattactactagctcgcgggcgcggcatccctcaaccgaaactgatgaaggctgcggtctccagcgccggcgagtcggcgggcgagctgcttctccgcgcggcggcgctggtgccgtggacgcgctacttcctcgcggcgctagccctggccgccgtactcctgtacaggtacctgacgacgccgtggttagcgagtcctcatttgcagacgctgttcctgagcatatctggcagaccaccttcattcacctatcggaggcagttgtacactgttcgtgatggcggtaccattgccttagattggttactagcttctgatcttgaagatggagatattggcacttctgacggaaccatttctaaggatgattcaacaccccttcttgttgtgatacctggattaactagtgattctagtgctgcttatgtgaagcacttggtcttttctatggcaatcaaaggatggaatgttgttgtaagcaaccacaggggtcttggtggcatctccataacatctgattgcttttacaatgccgggtggacggcagatatgcgtgaagttgttagtttccttcatcaagagtatcctaaggctccactattcactgttgggacaagcataggtgccaatattgtggtcaagtatcttggagaagaaggtgaaaacacacctgtagctggtgctgcatctatttgttctccctgggatctgctggtgaccagcaaatttatttcacgcaagcttgtgcagcgatgttatgacagagcccttgcgattggtctaaaaggatatgcgaaactacatcaatcagtcttggcacgacttgcaaactgggaagctattacatcgtcacactctatccgggaattcgaccgccatgccacttgtgttgttgcaaaatacgagggcaaacaaaaacattgtattggcaactacacctaatggcggacatcttgctttctttgaaggcctaactgctggaaagctttggtgggtacgacctgtttccgagttcctctgtgctctgcatgatggcccctacatgcatcggcagaaggcacaagggcacgatttgcactcatcgttggaatcatcaattgacaagagcccatatgtgaatttcatggaagatggaatggtagctgcattaacagatgatggtcctaacaacggtgactccttgcttaacgaggttcttggtgaaattgaacctaatgatagcgtggttgtccaacacgtaaaacagaaccaaaacaccagagctatacaaaatgagagtgacagttggttggatgataaaaacagctccgaagggaatgttcaagcccatggaggaactcaagaacagagagaagtgccatatgcgaataaaatcagtgatgccattggtcctgttaagaaatcaataaaccaactcagtcgatcccagggtaagtcaatctggttgcttgcttacattgctcttgtaacctcttggccgttgcttggggccctaggttttttcttcaggaaaaggttgagtaattctctgttatctaggaagctgaagaaatcgtgaacactgtgctaacacagatttatttggtatgtaagagcatgtacagtgatgtttaatatagaggctcttgagattatctaaagagagcatttgcaaaaaaaaaattgtggagctgtctctatgtgaagagacgcctttag

SEQ ID NO: 33727 - DNA, 2138 bp, Zea Mays
ggcaaaccgtattgttggcttcgcctagggtctcccttctactgtcgccgcaacctgaccaacctcccttctactgcccgcctagggtctcccttctactgccgccgcaacggcgcaacctcccttctactgccgccgcaacctcccttcttcgagtcccatccgacctagccctgcaacccgccggacgacgagcagtgaggcccgcggccgagatggaccggtacctgacggtggagcggccacggaacgagtcaaccatcgaagagaacgggatccgcatcaccgcgcagggcctcatctgcaactatgtctcctacgctacctccctcctccaggtgcctgggcttgtcctcaccatcgccgtcgtatcgtattgtacttaggatgcgctgttctgttcgagtcccgtccctgtcgattcgaagagatccccagcaacgtgagggaggtgttcctgaccggccccacctccaagttcggcagggccatcgcgctctacctctgcaggaagaagatcagagtcctgatgttcacggtgtcgtcggagaggttcctgaagatccagagggaggcaccgccggagtaccagcagtacctcgtgcaggtgaccaagtaccaggccgcacagaactgcaaggctgccaggtcatggtgatttcacgtccgttaggctcgagaggtggactcaaacatccaagttttgcaagttttgatgttggatgttaaatttctatgctcacccctcgtttggttattgatgtactatttccatctcatgtcacaaatttggcataaggaatgggtattgatggctactgactgtgtttgtttccacgtattatacatgtacaatggaacagttgatcatagttttgcatgaactattggcgttggctatctaaaaggacagaaaggcagacatgagcaacagatcccgctccatgggctgaaactgggattcgtgatggcgcccctcttagtcgtgtgtagggcgagctgctgccatggtggctttttcttgcgggtgtgagctccgctcgccgccggtcttggacgccgtggctaggctcctaccacccctccctccacccgggactccacgctgccaccgccacacgacagtacgcatacactcttcttcctcccctcgctctggatggctggcgtccgctccctcagcgcctccgcccatgcccggctcccgcacttgccggctccccgatggagatgaatgaagaaaggaagatctgcaagaataaagtcgaggcggaggcttggtttactggtcttagtgccttgatatgtcgaagacagcatggatcccaggtccaacatatagatggaatccggattgctggacttcctattgatatggtggtgatgcatctgctgctgaagctgaaggaggctcagaaaaatctaccattgaaaaagagctagagcagcttactagcatattgcctgatcttgagaagaagcttgaggacctgtctgaagcaaacccaagcgctgacatggatgagatggtgaaggcaattgtgtccagggtaactgaagtgatgccaaaagctgcatcttttacttcttcccaaatagcaacctcaagcaatggattcgactcctcggttatgtctacgacagcgacaactggaagctctggaagcactgtgaactgaccttggggttgtaggcagaggcgtcaaacgagctagcatcaagccgatctctgccaaacctgttgctaagaaacctgcacttgattcaccatctctccaaggtgacaacagcatcaactctgaggttgtccctgcgacgcagactgatgaatccagctaaagctctacatttgaaacgaacgctttctgacgggggcacggcgataacacgccttctattctagtatgcttagatagattcaatgttagcgcaaacgactgatgataagtttttcagttagtattttaatttggatttagagtacacttatgtatgatttatttgacaatgcttatttatgagacattgaattgtacttatctatattacattaaatatgatgttattaaatatgtgtgtatgtatatttatcttttaaattattataatgtgacatctcaaaaatgattataaattga

SEQ ID NO: 33728 - DNA, 1319 bp, Zea Mays
ccttctcctgaattgttgcaagtcagctatatgtcttctctgtcttgaagccattggcagtctaccttttcaacactaaagcttctaagttgatgagtgatgaggccaggcaagcaaagattgtcaaattctcggagtccatttggaaacttacatactatgcttctgttcaagcatgggtcctcatgataataaagcaagaaccatggtcgttggatatggtgcagtactttgatggctggccaaatcaacccatcgtgtcctcgttgatgcttttctatatgtgccagtgtggattttatatctacagcattggtgctcttgttgcttgggaaacccgcagaaaagattttgctgtaatgatgtctcatcatgtaataacatctactcttattggagtttcatatctgacaggattttttcgaattgggaccatcgttcttgctcttcatgatacaagtgatgtgtttcttgagactgccaaattgtgcaagtacacagaaaaggagttgggggctagcttgtttttcggtctcttcgctatctcctggcttctattgcgtttgatttacttcccgttttggataatcaaagcctctagctatcattccatcacattctggaggaagctggatgaattccctacagctttgtactatatcttcaatacaatgcttctcacattgcttgtattccatatgtactggtggaaactcatatgtttgatgataatgagacaattgaataataaaggacaggttacagatgatgttcgatctgattctgaggatgacgagtaatgggggagattcattctttgacatctgcaatgtgtcatttcttcgccaatacttatctacgcctgcttccagaattgattgttttgatcgtggcaagtctcgggcatggataggaaagtttatcctctgtatattgccttgtgatatcaaacatggctagaacgagaatggagcaggtcctatacattacgggtatagctagcaagcttacttgaaggttccttcaaaaaattttggttcaccttttctgatatatggggaaagatatgagagggcgtacagcttttttcctgaaacttacagaacccctctgtaccatgttcagtatacttcactcgtgagtagatttagttctaattgacggtaataaactgattctttttgactgggagtaaatctcacctgtatcttaatgatctcatgtgatgcgcattgagcttcatgcagctatattttttttaatagtgttatccctattctacacaatatgatggatatagttgagatccaatttggtta

SEQ ID NO: 33729 - DNA, 461 bp, Zea Mays
aacgacgatcctatggacgatgactcggatttgaagggcgatgcggcaaaattattggaatggcggagtcgatgacgcgatgagaattaaggccaagcgagctgaggggacgcactggtgagcagggaaactgcgcgaacacagcatggaacgatgccccgcctggccgaactaaaggaagcgcggaccagagacagagtggacactaggggcgagttcacggcaacagacatgcttgataactacagatgcggccgggataactaaaaatactacgacggccaagaatcggctcggagacgacaaccggcacggaagagataagcttgacgcggaagctcgacacgttgtggcgagcaaagaactccgcgatgggtagcgaaactcgacggcgaacggtgcgacgacgaatgatgacaactggcgaagtcgacgacgagccgatcgaactaaaactatac

SEQ ID NO: 33730 - DNA, 2869 bp, Zea Mays
ctcgcgttcggatcagcctctctgtcatgtcgccaatacagcgcagcgctccgcatccacccaaatcggagtagggtcgtcagtacagcgcgacgccctgccagtagccgccgcaaccggccgccggtcccgcgcgaggggaggaggagatcactgcggcggcgtcttctgccggtttgaggattcggggcatcactgcagcagctggcgccaggctccagcatggacacggcgtttctgagtcctccgcttgcccgtaatctggtttatgacgagtttgccgttcttcaccccactagctacccttttcatactcttcggtatttgagatgcaatccaatgtattcgagaccgctgctaacaatagcaccagcctcaccatcaaggggcttgattcagagagtggccgcactacctgatgttgatgatttcttctgggagaaggatcctactccaatacttgacacaattgatgcacccattcatttgaaaaatctatctagtaaggagctcaagcagttagccgatgaagttcgttcagaaatagctttcataatgtccagaaaatgccaaccgtgtggtgctgatcgctcagttgtggagctgacaattgctatacattatgtgttcaatgccccaatggataagatactatgggatgctggtcaacatgcatatgcgcacaagattctcacaggaaggcgctctctcttccatactattacacagaaaaatggcctttctgggttcacgtcgcgttttgagagcgagtatgatccctttggtgctggacatggatgcaatagtctatccgctggccttgggatggcggttgcaagggatataaatgggagaaaaaatcgaatagtgacagttataagtaattggacaaccatggctggccaggtgtacgaggcaatgggtcatgctggcttcctcgattccaacatggtggttattctaaatgatagctgtcataccttgcttcctaaagcagatggcggggcaaagatgtcagtcaatgccttttctagtgctctaagcaagattcaatccagcaaaggatttaggaggtttagagaggctgctaagggacttgccaaatggtttggcaaaggaatgcacgaatttgctgccaaagttgatgagtatgctcgtggtatgataggtcctcatggtgcaactctttttgaagaacttggattatattatattggtcctattgatggacgtaacattgatgatctcatctgtgtacttaaggaagttgcgagcttagattcaactggcccagtacttgtacatgtaattactgggactgaaaatgacactggtggaattattggaagtgaaataaatgcagttgaggaaggaactggactttctaggacatataatgactgctttgtagaagcactaacagcagaagcagagaatgacaagcgcattgtggtagttcatggcggcatgggaatcgatcgatcactccgcttattccagtccaggttcccagacagattttttgacttgggcatcgctgagcaacatgctgttaccttttctgctggtttggcatgcggaggtctaaagcctttctgcataattccatccacatttcttcagcgagcatatgatcagataattgaagatgtggacatgcaaaagataccagttcgatttgctatcacaaatgctggtctggtaggatctgagggtccaactaattcaggaccatttgatattacattcatgtcatgcttgccaaacatgattgtcatgtcaccatctaatgaggatgaacttattgacatggtggcaacagctgcaatgattgaggacagacctatttgcttccgctatcctaggggtgccattgttgggactagtggaagtgtaacatatgggaatccatttgagattggtaaaggagagattcttgtcgagggaaaagagatagcttttcttggctatggcgaggtggtccagagatgcttgattgctcgatctcttttatccaactttggcattcaggcgacagttgcaaatgcgaggttttgcaagccgcttgacatcgacctaatcagaacgctgtgccagcagcatagttttcttatcacagtggaagaaggaacggttggtggctttggatcacatgtctcacagtttatttctctcgatggtctacttgacggtcgaacaaagtggcgacccattgtgctgccagacaggtacattgagcatgcatcgctcgcagagcaacttgacctggctggcctaactgctcatcacatagctgcaactgcattgaccctcctagggcgtcatcgtgatgcccttctgttgatgaagtaggggaaggaaccaccaagaagaatggaattggatagataaaaggcaatatgtgcaaaagttgattcggaggacgctcatcatgctgttttacgattgtgttgtctggatagaactgaagcgtgccgtgggaggtggccaaatgcacaaatcccaaagagggacgacaaagcctatagcaccatagattaatagtcacggtgtatatactaaaaagaatttacagagcaccgatgtaacgttgttactgtgcatgttaatactgaaattgtggtacgacgccaactaggagaatgagctggagctgacatgtttcagttaatgtaataaagctacttagttttgtatgtaccaattcattccttaatattggaattcataaccctagcgttcacctcattcggtcgtctctcagtagtttcagagttcagttcagttttcggtgtcgaaacttttagtttctgtcacacttttttatttcagttaggagcaaagggatgtgcagcgctttgaccacgag

SEQ ID NO: 33731 - DNA, 2226 bp, Zea Mays
ctccctcgtctacatcctgtctctcctcgcactctccgttctcccgccgcttctggtctcggaggtcgcagcatctgatgcttatggagccccaaaatcttggaaacacagacgatcagtttgtctggccttggatgggtgttctagttaatgtgcctactgagtggaagaatgggcgccaagttggagagagtggaaatcggcttaaagagcaactttcacgcttctgccctcagaaggttattcctttatggagttatagaggtcacaccggcaatgctattgttgagtttgcaaaagactggactggcttcaaaaatgcgcttgcctttgaaaatcattttgaggccgagggatatggcaaaagggattggaagctgaagtacagtgggtcagagatgtttggatgggttgcaagagctgatgatcatagatgccaagggcctataggagactatttgcgaaaaaatggtgatctgaaaactgttggtgatcttgaaactgaagggacccgtaaaactgacaagcttgtggcaaatttagctagtcagattgaagtaaagaacaagcatgtgcaagaactggaatccaagtgcaatgagacgaccgcatcacttgacaggatgatggagcaaagggagcagatactccagaagtataatgaagaaattcgcaagatgcagcaaattgctcgtaggcattcgcagatgatcattgatgataataaaaaactccacaaagagttggagtccaagatgcaggaacttgacttaagatccaaggagcttgatgacatagctctgcaaagggattgtgacagaagaaatcttcagcaagagaaggaaaagaacaaaattaaaactaagcatctcatgatggcaacaatggagcaacagaaggccgacgagaatgtgcttaagcttgtcgaagaacataagagagagaaacaagctgctctagggaagattctcaggttacaacaacaattggacgccaaacagaagcttgaactggaagtacaaacgctggaaagcaagatgaaagttatgatgcatatgccaggtgatcaggattctgagtcaaagaagaagatggatgaacttgctgaggagctgaaggaaaaggtcgatgaattggaagcaatggagtctctgaaccaaactctgattatcaaggaaaggaagagcaacgatgagttgcaacacgctcggaaggagctgatagatggctttatggagcttgctgttgttggccgagctaacataggtataaagagaatgggtgagcttgatctcaaagcattcggaattgcttgcaagaaaaggttaccaaaggaggatgcagaagtcatttctgctaccctttgttcaaagtggcaagaagaaattagaaacccaagctggtacccttttaaggttaaggtggtggatgggaaagaaatggaaattctcaaagaggacgatgagatgctccaggagctgaaagaagagcacggtgaagaaatttatgggttggtaacaaaggccctgcttgagatcaatgagtacaaccctagtggccgctatcctgtaccagagctgtggaactacaaggagggccgtaaagcaacactgaaggaagccgtccagcacgtcatgaggcagtggaagtctcacaagagaaagcgctgagcaaattggttgctgggttcttctgcctgccccctattaactcgatagtcgatactgggtagcattaggtcgtagcttttaattaactcctaatgatgagtgggtaacagtggctggctaatattaacgttaagttgccggaggttcggtctggattcttttgttggtagtgtatacgaatgctgttagtcggtctggattctcctgtcgttgcatgggcatttgtatgtccaggatattgaccgcttcatggatcagccgtcaaactttggcaaaggagaggcatgaacgaccttccagttcctccatgatacgtagacgtgatgggcaattcttggttgatatttggccgtgcagcaccattgagcggctataacttgtacctgatgactctgggtatggattactactaaacttccatgtgcctaaaatgtgttgcagttataaattatgattttgtcaagtagaatctaatattttacaataccgatcattatgatcttgcagtctgatataagcgctattttttaaaagtgtctaactcaaggctccgatg

SEQ ID NO: 33732 - DNA, 2352 bp, Zea Mays
ccgagacgagactactatcattgcgagtagttgtcatgtggatttatgcccaatcctgtgatgaaagtggggaatttgtgccgtcccttaaccctcatggcagccctgatttcatattgtcaagtcaccattgtctttgggcagctcaagcaagagaggggaggagacctgagccatggcttttggtcacaacttatcctacacatcgtagctccgcgacctgttcggcaaaatgaggccttcagatggcaggacgcagctttcaggctttgcacaatcagatgaatcaacacttgatgtggaggggcattgctaccaccagcagtcattcccttcctctccatcgatgcaaccgattgcttctggctgcacacacacagagaacagcgctgcgtacttcttatggccaacatcaaacctgcagcattgtgcagccgagggacgcgcaaactacttcgccaacctttcaaagggactgttgcccaagtctggccggttgcccaagggccagcaagcaaatagcttgcttgacttgatgactataagagctttccatagcaaggtgttgcgttgctttagccttggaacggcggtgggcttccgcatcaggaaaggggctctgacagatatccccgcgattctttgctttgttgctcgcaaagttcacaagaagtggcttaatccggaccaatgccttcctgccattgttgagggtccaggaggtatttggtgtgatgttgacgttgttgagttctcgtactacggtgcaccagctcaaaatccaaaagtgcaaatgttcactgagcttgttgataagttgtgtggcagtgatgaatgtattggctctggctctcaggttgcaagtcaggacacttttggaactttgggcgccattgtaaaacggcgaactggcaacaagcagataggtttcctcaccaaccgacatgttgctgttgacttggactacccaaaccagaagatgtatcacccattgccacccaaccttgggcctggtgtttatcttggagctgtcgaaagggcaacatctttcatcacagatgatgtttggtatggaatctatgctggaacaaacccagagacatttgtacgcgccgacggggcattcatcccatttgctcacgacttcgacatctccacagtcacaactacagttaggggtgttggtgacattggggatgttaaggttatagatctgcagagtccacttaatagcctcatagggaggcaagtatgcaaaatcggcagaagttctggtcacacaactggaactgtggtggcttatgcccttgagtacaatgacgagaaaggaataagcttcttcactgacctccttgttgtcggcgaaaaccgccaaacttttgatctagaaggtgatagtggaagccttattatcctgactggccaggataatgagaagccgtgtcccattgggataatatggggtggcacagcaaaccgtgggaggctaaagcttaggtgtgaccatggccctgaaaattggaccagtggagttgatcttggccgccttctggatcgtcttgaacttgaccttatcataaccaatgaatcactcaaagatgccgtgcagcagcaaaggctcgcgttggtggctgcagctaactctgctgttggggagtcgtcgacagcagctgttcctgccccagaagaaaaggtggagatcttcgagcctctggggatcaaaatcgagcagctgcctcggcacgacgtttcggcgacgacggaaggggatgaggcagctgtgatcaatgtggaagagcgccagttcatctcaaactttgtcggcatgtcccctgtacgcgacgaccaggatgctccgaggcaaatcgcgaacctgaacaatccgtcagaggaagaactcgccatgtcgcttcacctaggtgaccgggaggccaagcggcttcgcactgacacagaatccgagcttgacctggagaagtgacgcactcatttcagcgtctccgcattgagtcataaagtagtccgaagaaggtgacctgtggttcagcagactgaacctgcagccgtagctgcagtttcctggcacaagccttatcatgtactatggtaaaacttgattcagcaattgtaggatgttaggtggtatcccctgcagttttgttgtgagacttgatatgcacaagcacaatgctgaatccccctatatcaaaacaatgcaggtagcgataaagtggtcttgatcagttttctctgtccaaccattaacggagttgtttcaagatcactagatcagcttccgggaaaccttgtgttttcaccttttgaattattcttacggaacgtttggatgca

SEQ ID NO: 33733 - DNA, 2443 bp, Zea Mays
cgaggctcgcgggaaacgcaaacgccaggctacgggcaccgatttgcacgtgctgcatccaacgaacctggtttgatgcccttgtcggcatcggggggcttcgcctacccgcatcacccaccctctccccgcttccctatccctcacgcagtcaggagatccccaattccccattcaccaatccccagtattgtagtagggggaaaaacgagagaaaagaaacagcagtagcggaggcaagacgaaatggtggccgccgtcgcgtcgccttcgtcggcggcaccctccgccggccgtccccatcgccacctacatcgccgaccacttctccggcctccactcgcgccacgatgccctcctctccgtccatctccgcagcctcaagtcccatggccaacttcgcctcgtctctggcaactacttcgtctccaccgccgctcagcggcaggggcgaggctccaacatcccgcccaaccccaaccctgctccggggcagaagcgtggtcgggggcggcctcgcaagtacgcagattcagccccttccgcttcgatcccggcgtttcaggacgccaagcgagggcgtggacgcccacgcaaacgcaagagcgcccaggacccggtggcttcctccccctccccttcgccgctacagggagcaagtgttccgccgcctccatctggggtcaagagggggcgtggacgccctcggaaggacgcccttgtccctccgccttcctcttcttcgccactgctgggagggattgatccaccgcctccatctgggatcaagacgggccgtgcacgtcctcggaaggcccttgtccctgtgcgttcctccttttccgagctgctgggagctgttgttctaccacctccgtctggggtcaagcgtggccgcggacgcccgcgcaagagtgcctaccccgctgtggcgccgttggtgggagctgagaagggacctgctggtggacaaccacagaggaataccactcctctctcaccgacacctgctaccatgtcccacagtgtttggttggtgcgaagcggggaagagggcgcccacctaaggttgtggttgctgggaaagagaagatgcaacctgaatctgtgcagtccgtggatgcttcattgactaagagagggcgtgggaggcccagaaaggagaaggcattggaaagtggccgcatgaaagcctcgcagatgactgagggtcaacgtgaagctctgactgcagaccaagctggggctgtccaaaatgaagtagaagatagggatttgcaatccttgggtactcctttgacagagaagagaggccgcggtcgtcctagaaagaggccgttggaaatcgaaactgcaaaagcaggggctgctaagcgtgggaggccaagaaaggagaagacatctgaaactggggacttgaaagttgcacagatgactgagggtcggcatgaagctctgcctgcacaagctgtagaccaaactgggcctgtgcaaaatgaagttgaagctatgattttgcaatcccttgctactactcctttgatggagaagaggagtcgtgggcgacctagaaagaggccattggaaactgaaactgcagaaacccaagttgctgcatcggtggagaagcgagggcgtgggaggccaagaaagaagaatccatcggcagggtggtctgcaggaaccagggatactgcattaaaggggattaagagagggcctgggaggccaaggaaggccaggccttttgaaactgagtctgtgaaaactgcacttgaggtgtctagggacttgacagaagatgggcctcaaaaggatggggatcttgtgtcagggaagaaagcagatactcatggtgtggtttggtagtgtcaactgaggaggtagccattgctcccatggatgctgggtgcgcagacgccaagggttgatctgatggatgtgggcaccaagagtcactagtgctctgatggtgcgaacaagaacaaaaaagaaataatgatagtacctgaaaggctaaacagaacatgcagctaataagtgtgttcatggatataattaatagccatactgcaagtattgctatatgtttgcaccagtttgattactcgtatgtttttgagcagttccattggaaactgcgtttgatgggtttcacttttgggggttggatttaaatatctaacccacatcctctttctttgtcaaggactataacatttttgtaattttgttgcttgtactggaaactagccatcataaggttcattttgttttccagtttcaacatcttttagtgatatgttcacataatatctctgttttgtgctttatttggtgtgtctattgggtgtttggttggaggaatgggacgagttggtccactattgcttcattcagtcattcctcatactaataagcacagagtattcagtataaaaac

SEQ ID NO: 33734 - DNA, 3117 bp, Zea Mays
cacggttctgcctccagtccgccgcccgcgcgactgctccaacgaaggaaagtctgatcccgccatggcgccatctccacccccgcttacctctctcggccgccatcatggaaggtccgaccccgccatcgctgtccccacgcggttgctccaaggaaggaaactctgatcccgctatccccgcccccgctctctctcgccatctccgtgcggctgctccaaggaaggaaggtccgaccccgccatcgccatccccgcgtggctgccttcccctctcgccatccccgcgcggctgctccaaggaaggaaggtccgaccccgccatcgccatccccgcgcgcccggtcgagcgccaccagccgcataagtctgggctagcgccgccggccaccattggctcggtcgagcacctcatgcccacgacggtcagtcgccgccttcatggctcagagtcgtcggtccctgcccaccaaggtcaccatgggctcgacgacgatggcaacaaggtcaaggtcgtcatcacaacccaagaaaaaatcatcttctacgattcagagaaattatgtgaagcttcaatttgactccatgcaacaggtttagctattgacaacctcgattacattttcacagtgggagctccttcgattattaaccacagttgtgtaccaaatgcagttttgatatttgatggtaggacagcatatgttcgtgcattgcaaccgataaataaagatgaagaggtatctataagctacattgagactgcggcagtcaccaagaagagaaacaatgatctgaaacagtacttcttcacctgcacatgtccacgctgtgtaaagggttttgatgaggatgcactacttgaggggttcaggtgcaagagccaagcatgtgatggctttctgctgcccaactcaggtaaaaaggcttatacatgccaaaaatgtggtgcttctagagatgtggaagagataaaaaatatgagaagcaaaatactacagttatcggataaagcatcttcatttctttcatcaggaaataaggctgaagcaggttctatctacaagataatcaaacagttagagagaaatctgtaccatgctttctcaactactttgctgcacacgtgcgaaacactattgaagatatatctggaattacaagattggtggactgcgttgacatactgtagattgacaattcctgtttatgaaagagtttatccaccttttcatccgatgattggattacaattctatacttgtggaaagcttgaatgggactggttcggagggagacggcccctcactctctgccctcctgctgcctgcctactgctatactgttctcttgtgttcatgttcatataaaattcagtttcatgttcatattttcataactgtatatgttcatcttatcatacagtttgggtccttgaactttggaacactgaatccctactactctccccccataaagataggaaggaacacaaaagggtcaaatcaatacccttatgtctccccttctggaccaggctccgccgccggtgccgtggcctgcatcgcatgcccgacgctctacgcctacctgaagaagacagaccccggagtgcccgcgcagctgctggagtacgacgagcggttcgggcagtacggctgcgacttcaccttctacgactacaaccgaccggaggagctgccggcggcgatgaagcacgcctaccgagtcatcgttgccgaccctccctatctggtactgtttctaccctaccagagattgcctattaaaaagtgtttgatcagttcttaacatttgagatgagaggaaatatcgaggagaaatggctattattcattggttgatgatgtagagtaaggagtgcttggaaaaggttgccaaaacagtatctttcctcgcacgacctgaaggttcattcctgctgctgctcacaggggaagttcggatggaccgggcattggagctgctgaatgttcgtccctgcggtttcaggcctcgccactcgaacaaactaggcaacgagttccggctgttcacgaattaagatcctgctgacagacttggtggttgggagcaaagtgatggtgcccccatttaactataaactaatacaatttttgttctagagctgttccatctttatgaacatgttgcatctttgatccacagctcactgatccctccaatttaaattgtagtgacaattatttgaggaatctgtgtgctatgatgtatgattaatcaaacatttacactgttagtgtacctcattttaatttcattttaaaatacactgttagtgtatgtttcattttaatttcatcagtattctttagaatgtctcgttggcttattcagatttatagccaaaatgacattatcttggggatagttcatcagtattttttaatttcattatctcgttcggcggcggcatcccggacgggcacagcctgcacactggcgggcaggtcgtgaaggcacccaccatcgagcagaacctgtcgtgcaaccttgagtagctgtacaagggcatcaccaagaagttgaatatttctagggaaattgttgacgcaagtgggcgacgcttctccttcagacgctcaaccagtcaagaaggagtccgagagccaggcatggctcggattaggaccgaatgccgtcaagtccaacctgaacctgagctagcacacaacgacacagccaaataagacagcacagcaacctcaccaaagcctttgcaggacgatctgaaaatatgctttgccactagagtaccgaaaccataaatatcctctcgttatcgtgttttagtgttctgtttaggccgtggtcctacgccctcttgtcacatagtctggatgtaaagataagtagccagccatgactgagagaagttttttgggggggggggtgttaacacacggccactctgaattggccatgctaaggaaaatgatagtagtgcaaagagaagtatatgtcttttttctttttctttttctgaaagccagatcgtttggctctagccttgatgtatgcagaacaagtgattgtaatggattctgagtatcctcatcgtcttgctgttgcttc

SEQ ID NO: 33735 - DNA, 1787 bp, Zea Mays
ccgaaaaacaagaaccatcgtacgggtgacgtggccaacacttccgtttttgttccggccaggcggctcgtgtccccgcagtcggcaggagcgcggacgcagatccgacggcctaggggcactccggggaggccacgcaacgcgcgcggcggcaggcaagaactccgaagtcggcacggccgcacggccgctacgatacggcgccctcacaattgggccgttataaaacgtcacaggaggaggagataggcacacggcgtgccgcggccgcagctgctcccgcccgccgcgcaagcggccaagcgccgccggttcttctcgagcaagagtacatgacttttgagctaagtgtttttcgtgagttctcataaatcattgtcctcataacttgtaatgggtggaagccagtatgatgatgactgggtgttgcccagtgccgatatcactcttgttctggttgggaaacttggctatggcaagagtgcaactggaaatagcatccttggacgggaagcatttgtatcagaatattcacatgccagtgttactaatacttgtcagttgggaagcactaccctgaaggacggccgcaccatcaatgttattgatacaccagggttatttgatatgagcattacatcggacgaggctggtaaagagattgttaaatgcatgaacatggctaaagatgggatacatgcagttctgatggttttttctgccacatctcggttttctcgagaggacgcaagtacagttgagaccattaaagtcttctttggtgaaaggattgtcgaccacatgattttagtcttcacttatggagatttagttggtgaatctaagttgaagaaaatgttaaataatgcgccagagtatttgcagaatgttgttgagctatgccaaaacagagtggttgtcttcgataacgtgactgaagaccgaaggctccaagcgcagcaacttgacaaattgctcgatgtagtggattcagtttgtgcaaaaaatggaggaaaaccattttcagatcaaatgttcactagcatcaaggaggtgcatgatagagaaaaagaggtgcatacctcgggatattcagatgagcagatatctgaattgaaaaaggagattcatagaactagggatgaacagcttgcgcacataaccaacatggtcgaggaaaagttaaactgcactgtggagaagttgcaacagcagctcatggaagaacagaacgcaaggctggaagctgagaaggtggcgtacgaagctaggctgaaatcagaagcggagatccagaagctcaaggagagcctcaagaaagctcaaatggaaaatgatgagttccggaggatggcgcagagccagggcagtaaatgtgctatcctataggcattagtacttgctagaaattggtggagctatcgtgctgacgcgtctcttgtacgtagtactttctctgttccaaaaatatatagttcaatacaccttagtagagatgactacgagagtatccaaacaagacctcgtcggacatgttagcctgaagcttgcttatggacatattggatatagtttttgggtgagaacttttgaacaacttccttgtttttttctctcatgttctaatgcatcttttctctagctgtatgcgcacaacattggagttgttccccaccaaatagaagcattagggatcatccgacaaagaaaacgagtatcctctttctcactagaattatcatgacgaacagcaaaaggatgaataacaccgtcttcgtcttcattgc

SEQ ID NO: 33736 - DNA, 3520 bp, Zea Mays
atccccatgcccgcagcgcctcgcctcggctgctctacctctatcccgcgacccgcgagattggaatcgcggagccccgccgccctcctccaaaacggcatcgtctctgctcggggtcacctttcctccctctcacttcctcttcttcatttaggtgtgttagttaagcagaggaggtggctttgcttgttgctcgtgtttctgcgtggatgcgtccaggggtttagcaagtcgctggccatgacggtgctcttcgagatcagggacaagaccttcttcgccgtcgcgattctggctatgcgccatcctaggaaactcgtattggcaggctgtttaactgcactaagaaggctgtttaactacactaagagtcatgacagctctatcgacttatctaggttgggttgcaccaaatctgagctgtcatgacaaaaatcatgatgcaatacaagcagaatatgcttcctgaaagacaaagtaatcacaaagttgaggcagataaaatggttgagcaaaccaatcaatctgaagttagctttgtgaaggctgagcatctgaatggaagtaaaattcggcagacaggcattgaggattactcctatgacaaggatgttgtagagatcaaactgccagacacagatctttcttctgattatggtgttcattttgtcaaggatgtctgcattgatgaaggagttcttcctgatcaaaagatttcatcagaaaagcaagtagaccaaaaagtgtctataagctttgattccagggaagagataagtgctgactctacaaaaactgcacatgagttgaaatcgaaaatagttgtcctacctgtcaagtgtgatactcatgacaatattgtggaacagaactcctcatgcaaaaagcgtgatcttgaagataacaatactacagatgtatctaccgagtctaatgatgagggattaaatcccaaacaattaccatttcatgaagttgcacaagattaccaggaggttgatagtgtcatttcggagagcaatgaaaatcaggaccgacttttcactggagatgcaacccatcagggacttgagaaatatgttatgacaaagctgtttaatcgggtattcgcatcagtcccagaagatgtgaagagtgatgaagaactttttgagaattaacttgtacgagaatgaaacatcatggctggtatgagaattaacttccctcgttttttggcatttttttgcttgatgtattgcatctctggcaagctgcacacatgaataggtttctggcagaaactgaaccaggattgaattgtacttgtgtcttgcgttgggttggtcttttggatctttctatgtattatgtctatactttgtagactactggccagccactacattcgcgtattactcttccattgtgagtttttgctcttcactatccgatgcccaccaatctaagcagccaaggcatgcatacctaaccttctcgaggacaattcaggaggtttgcttttttcctccctgttttatactggcatactactatatacttcattgatttttttagcagggtaaaaaatataaagatagatttttagaaaataacaaatagttcataaaattatttcagctgatgaaccttttagagttcttttattatataatgccattaattgctaacagggtgcacgtcttctatttctaggtatggtgcataaaaaagtaggaaccacaatgagattgtgatgctgctcagggcacatgccttttgtgtgatgtctgaatgttcatagcccttgtgctcctcatccacccattttaagaatatgctcacgtctcatgattgtgtctttcttcagaatctcagctgttcctcatgtggagaacctccagaggctcacatgtattcctacactcaccgcaacgagaatctgattgttcttgtgaggcacttgctgcctaaatattgtttacctggtgaatcagaaggaaagatttggatgtggacttgatgcttaaggtgtgaacgtgaaagtggggtccccagatcatcacgaagggtgataatgtcagctgaagcacactacctttcatttgggaagttccttgaacttagtttttcaagccactcaaccgctagaaggctgccaatatgcgggcattcactcaatacggattgtctgcgctttttttgggttgggctccaaagttgcaatgttcccgtattcctcagtcgaaatttacaatgcctgcaaaccacagcctactcttgagattcacaaccccgatatgcacaaagatgccccaaggttgctgccctcgtgtttcgtgctctgattgttgagtcttcaatgagagctgattccagttatatagaggtgaacaagcttttgattatttcttttgttaatttggtgcaacatatagaggtgaacaagcttattaaaggaagatccttgtacaatcaagagttcatacaatagatgaaacgatattgtgattctctcaatggtggcttcatgagcaagcaatcattcaccttgttcactaaaatttcagactgtagctcagataaggctttgagcattccttggtagtattatatttcctttgtcgccaccaactttaagtagtattaaaagaatttttcttaactcttacatttcattttccctgttcttttttgcgtaatagctacaatgcttccgagagaagggaaaccggcaaaggggaaaagagacgaatagaagggcattggtgccctctcacacacaggccaagtatacatccacatgccacaaggctgaagcttccacatgaacaagagaatggatcgtgatagctattgcaagatgatgcacaagtacataggatcagatgttacataacttgtgacacttccagtcataatttttgagccaatgacaatgcttcagaaaatggctgagctttgttaggtgttccattttagttatctgtctacttcctttaaactggttctggttatatgcgcgcgtatctattattatgtataagcattgttgctactggtccttatcgagaatcgcataaggagacaacttcatgggctaggaggcttaactgacggtttcgaccttgggatgaacatgctgttgggaggagacaaggaagatgatggcggttcaagcaagtcgcatggcaagagcggaaaccgaaagaagcacctgaagaacaacaagaggaagaggcattagccctggactcacactcctgtatcacttcaacatacttgagtgtgtgacatgtcagttattttacagatatgttagttttaccatagtattgttcgatgtgatcctagcatgcccgtgaatgctttggttccctatagagctgttgatgtcttacacaaatgtattacaaaacttttttcataacaatataacacacatttgtacataaattaccgtggtattatacgttcccgttgcaacgcacgggcacacacctagtgtagtctcaaggttaccaatttaaaccaatggcgg

SEQ ID NO: 33737 - DNA, 3302 bp, Zea Mays
tttacctgttgacactccagaagtcagaacccaccttcggcttcctctgtcgtccggcctccaactccatcgaaggggctagggagaggagggaacccgaaccacagcaggccggcgcaatggcggcgccgccaaaggcgtggaaggcggagtatgccaagtctgggcgggcctcgtgcaagtcatgccggtcccctatcgccaaggaccagctccgtcttggcaagatggttcaggcgtcacagttcgacggcttcatgccgatgtggaaccatgccaggtgcatcttcagcaagaagaaccagataaaatccgttgacgatgttgaagggatagatgcacttagatgggatgatcaagagaagatacgaaactacgttgggagtgcctcagctggtacaagttctacagctgctcctcctgagaaatgtacaattgagattgctccatctgcccgtacttcatgtagacgatgcagtgaaaagattacaaaaggatcgctaagcttgagagtgaaggtcccaagggtataccatggtatcatgccaactgtttctttgaggtatccccgtctgcaactgttgagaagttctcaggctgggatactttgtccgatgaggataagagaaccatgctcgatcttgttaaaaaagatgttggcaacaatgaacaaaataagggttccaagcgcaagaaaagtgaaaatgatattgatagctacaaatccgccaggttagatgaaagtacatctgaaggtacagtgcgaaacaaagggcaacttgtagacccacgtggttccaatactagttcagctgatatccaactaaagcttaaggagcaaagtgacacactttggaagttaaaggatggacttaagactcatgtatcggctgctgaattaagggatatgcttgaggctaatgggcaggatacatcaggaccagaaaggcacctattggatcgctgtgcggatggaatgctatttggagcgctgggtccttgcccagtctgtgctaatggcatgtactattataatggtcagtaccaatgcagtggtaatgtgtcagagtggtccaagtgtacatactctgccacagaacctgtccgcgttaagaagaagtggcaaattccacatggaacaaagaatgattaccttatgaagtggttcaaatctcaaaaggttaagaaaccagagagggttcttccaccaatgtcacctgagaaatctggaagtaaagcaactcagagaacatcattgctgtcttctaaagggttggataaattaaggttttctgttgtaggacaatcaaaagaagcagcaaatgagtggattgagaagctcaaacttgctggtgccaacttctatgccagggttgtcaaagatattgattgtttaattgcatgtggtgagctcgacaatgaaaatgctgaagtcaggaaagcaaggaggctgaagataccaattgtaagggagggttacattggagaatgtgttaaaaagaacaaaatgctgccatttgatttgtataaactagagaatgccttagagtcctcaaaaggcagtactgtcactgttaaagttaagggccgaagtgctgttcatgagtcctctggtttgcaagatactgctcacattcttgaagatgggaaaagcatatacaatgcaaccttaaacatgtctgacctggcactaggtgtgaacagctactatgtactccagatcattgaacaggatgatgggtctgagtgctacgtatttcgtaagtggggacgggttgggagtgagaaaattggagggcaaaaactggaggagatgtcaaaaactgaggcaatcaaggaattcaaaagattatttcttgagaagactggaaactcatgggaagcttgggaatgtaaaaccaattttcggaagcagcctgggagattttacccacttgatgttgattatggtgttaagaaagcaccaaaacggaaagatatcagtgaaatgaaaagttctcttgctcctcaattgctagaactcatgaagatgcttttcaatgtggagacatatagagctgctatgatggaatttgaaattaatatgtcagaaatgcctcttgggaagctaagcaaggaaaatattgagaaaggatttgaagcattaactgagatacagaatttattgaaggacaccgctgatcaagcactggctgttagagaaagcttaattgttgctgcgagcaatcgctttttcactcttatcccttctattcatcctcatattatacgggatgaggatgatttgatgatcaaagcgaaaatgcttgaagctctgcaggatattgaaattgcttcaaagatagttggcttcgatagcgacagtgatgaatctcttgatgataaatatatgaaacttcactgtgacatcaccccgctggctcacgatagtgaagattacaagttaattgagcagtatctcctcaacacacatgctcctactcacaaggactggtcgctggaactggaggaagttttttcacttgatcgagatggagaacttaataagtactcaagatataaaaataatctgcataacaagatgctattatggcacggttcaaggttgacgaattttgtgggaattcttagtcaagggctaagaattgcacctcctgaggcacctgttactggctatatgttcggcaaaggcctctactttgcagatctagtaagcaagagcgcacaatactgttatgtggataggaataatcctgtaggtttgatgcttctttctgaggttgctttaggagacatgtatgaactaaagaaagccacgtccatggacaaacctccaagagggaagcattcgaccaagggattaggcaaaaccgtgccactggagtcagagtttgtgaagtggagggatgatgtcgtagttccctgcggcaagccggtgccatcatcaattaggagctctgaactcatgtacaatgagtacatcgtctacaacacatcccaggtgaagatgcagttcttgctgaaggtgcgtttccatcacaagaggtagctgggagactaggcaagtagagttggaaggtagagaagcagagttaggcgatgcctcttttggtattattagtaagcctggcatgtatttatgggtgctcgcgcttgatccattttggtaagtgttgcttgggcatcagcgcgaatagcaccaatcacacacttttacctaatgacgttttactgtataaatctaccaggagtgagtaatttatatattagcgggactggacctcttggtcgcgtgctatttt

SEQ ID NO: 33738 - DNA, 3096 bp, Zea Mays
agaaaagctactcacaccaataagccaaagccaaacagcccttccttcgcagcgatggcggcggcggcgccgccggtggccaagaaggtcccgcggcagctcgttgagcacggcgacgtccgcgtcgacaactactactggctccgcgacgactctcgatccgacccggacgtcctcgcgcacctccgcgccgagaacgactacaccgccgccgtcatgtccgatgtcaagcaacttgaggatgaaatatatgctgaaatcagaggaagaataaaggaagatgatatagatgcgcctcttcgcaaagggcggtactactactatgaaaggacattgactggcaaggagtatgtgcaacactgtaggcgtcccgtatcgactgatgctcctattacagtccacgatgtgatgcccacaggacctgatgcccctgatgagcatattatcctggatgagaatgttaaggctgagggccacgactactacagcatcggagctttcaaggtcagtcccaacaacaagctagttgcttacgctgaagacactaaaggtgatgaaatctacacggtctatgtcattgacacggagagtggagaatacgttgggcaaccacttaaaggaattacttctgacattgagtgggctggtgacgaccacctcgtttacattacaatggatagtatacttcggccagataaagtatggctacataagttagggtctgaccaatcaagtgatgcttgtttgtatcatgagaaagatgatacattttctctaggccttcaagcttctgaaagcaagagatatttatttgttgaatctggaagcaaaaacacaagctttatattctacctggacatacccaaacagaacaaggaacttgctgttttgacacctcgtgtgtatggcattgatacaacagctagtcatcgtggaaatcatttctttattaagaggcgaagtgatgaattctacaattctgaattggttgcttgtccactggataatgtagctgagaccactatactgctaccacatagagaaagtgtgaaaatacaagacttccagctctttgacaaccatattgctgtatatgagcgtgagaatggccttcccaaagtgatcgtatatcggctacctgctattggagagtcaattggacaactccagggaggtcgagcgattgattttattgatccaacatatgctgtggaccctgaggagtctcagtttcattcatctgttctacgatttcattatagctcaatgcggactccaccctctgtttatgactatgatatggattcaggggtgtctgtgctgaagaagatccatactattttaggcggattcaatgcatcaaattatgtaacagaaagaaaatgggctgctgctgctgatggcactcaggtccccatgtccattctatacagaaatgatcttgtgaagcttgatggctcagaccctatgctactctatggctatggctcctatgaggtacgttctgtttgtttattttcttttttgctatttggtaaactgtaataaggaatctttctgcaatttttaacacttcgaagtttgaacaaatttcaagattggcatgtacactgcgctagctgcagttataaatgcaggcttgtactgtagcatggcttgctgcagctgcaaccgcagcaagcactgctgagcaggctgatagtgatagtttatgtcaacttcctttggttcgtttgaaagtttgtgttcttctttatatgtgcatcatgtacagactatacttatttgctaatgtgctatcatgcattcattagctgttttattcatcattgttttcaaatgacaacaattctttagcattcagttattctagtgtttcctcgctgagaaagattccttggcaggaaccagcaatgtctaactagtagtaactgcatgtgacaacttggcatcgagactatgagatggttccaggtttcaggaataaatataatagaagttattgtgataaaaccgtgctcttgttttctttgttcttatggctacagatatgcatagatccgagttttagagggtcacgattctctctggtagataggggctttatatatgtgatagctcatatccgcggtggtggtgaaatgggccggaagtggtacgaggatgggaaactgttgaagaagaaaaacactttcactgatttcattgattgtgctgagcacttgataaaaagcaagtactgctccagggaaaagctttgcattaatggcagaagcgcaggtggcttattgatgggtgctgtcctaaatatgaggcctgacttattcagggcagctgttgctggagtgccttttgttgatgttgtcacaactatgcttgatccaactatcccactgacaacagctgaatgggaggagtggggtgatccaagaaaagaagaattctattattacatgaaatcgtattctcctgttgacaatgtgatggcgcaagagtatcccaacattcttgtcactgcaggcttaaacgatccacgcgtgatgtactctgagcctgcgaaatacgtggcgaagctgagggagctgaagagagatgacaatcttgtgctgttcaagtgcgagctgggagctggacacttctccaaatcgggaaggttcgagaaattacaggaggatgcgtttacttatgcgttcatcctaaaggcgctgggcatgactcggaagctggcatcactgtgaattcgattggtgtgaggcacctggactggatttgtatcatggcctgccctcttggttgggggatggatggattctgatggaatatgcatttagatttgaatagggacacagatgttatgcaaaagagattgtttgaaactttgaattctgatttgcatttggatatctgtcctagaataattgtgcttctattattcaatatttgccccatttttaacctatggaccatataaattttgctattttctcctttcaaagtactacaatcattacatgttggtactagtattattttacaggagcatgtatgtaattttatagtgactggtttatgcacatcatataaatacgtttattt

SEQ ID NO: 33739 - DNA, 812 bp, Zea Mays
cgttcctcaagttagtgtgggccaacaagggggctccatgtttgacgctggctcaagagctagccttgccgatcactgagggcctgacctcctccggggctcaccggttttgtgcccgcatgagaccctccatagtctaggcgaccaatggccgggcagcacccacacccagcctgggtggcgcccaaagatcaagcgggagatttagactatgaagttgatcaaacatcccaatatggtccaactgcatgaggttatggcgagcagaacgaagatatacatggtccttgaatttgttgatggaggtcaattctggaaggctaggagaggatgaatctaggatatattttcatcaacttataaatgcaattgattattgccatagccgaggagtgtaccatagagacctgaagccacagaatttgcttctggattcaaatggagctcttaaagtttcaaacttcggcctaagtgcatttgcaccacaaacaaatgtatgatctctagtcagtaactagaaacaaatgtactatctaggcactctgtgtcacgcatgtgacccggtcccggattcatgacccatagtcatacgagtgtaccctctttctaaccatccaagcactccatgtcatgtatgttgtacccagaatgcacgatccatagtcatatgagttagaacaacccacatagtactggatgatgagatgtgtcttattatgactatggatgagacttttgtgatgtaattaatgagactatggatttaaatactgttatgtgattgtgtgtgagatgttttatgtgaaaatatg

SEQ ID NO: 33740 - DNA, 3904 bp, Zea Mays
cccatgtgtaagcttttctcgcactcgtactccctcctccgctccggctaggaggctgctccctccgccgctccgccttcgtcgcgcggccatcgtttccggctctgtccccggatatctcttcgccaccgcttcctgcgccgcggcgccgccacaaccgaaggcgacccagtcgccttcaacactatggtgactcctcccactgtcgagcaggaggacgaggagatgctcgtgccccgccaggaggcggtcgacaccgacgcagcgcagcccatggaagtggtggcacagactgaggtggtgagcacggcggagagccagcctgtggaagatccgcagacatcacggttcacttggacaattgagaacttcaccaggttcagtgagaagaagcactatttagaggtttttgttgttggcggattcaaatggagtgtgctgattttccccaaggggaacaatgtggaccacttctcaatgtacttggatgttgctgactcaaccagccttccgtatggttggagccgctatgctcagtttagtcttgctgttgtaaaccaaatccagccagagtttacgatacgcaaagagacccaacatcaatttaatgctcgtgagagtgattggggtttcacatcttttatgcctttgagtgagctctatgatgcaagtagaggttacctcgtgaatgatactgttgttgtggaggccgaggttgctgtccgcagaattgttgactattggacatatgactcaaaaaaggaaactggttatgtgggcctgaaaaaccaaggagctacctgttatatgaactcccttctacagacactataccatataccctacttcaggaaggctgtatatcatatgccaaccactgaaaatgacataccatcaggaagcattcccttggcgctgcagagccttttctacaagctccagtacagtgacagtagtgtagctacaaaagagctgacaaaatcttttggttgggacacatatgattctttcatgcagcatgatgtacaagagctcaacagagttctgtctgagaaacttgaggacaaaatgaagggaactgtcgtagaaggaacaattgagcaattatttgaaggtcaccacatcaattacattgagtgtataaacgttgagcataaatctaaccgcaaggaatccttttatgatcttcagcttgacgtcaaaggctgtcgtgacatttattcgtcgtttgataaatatgttgaagttgaacgtctagagggtgataacaagtatcacgcagagaatcatggtctacaggatgcaaaaaagggcgttcttttccttgatttcccccctgttttgcaactccagctgaagcgctttgagtatgattatatgagagatagcatggttaagattaatgatcgctatgagttccctctgcaacttgatctggatagagatggtggcaaatacattgctccaaatgcagatcgaagtacacgaaacctttacactcttcacagtgttcttgttcatagtggtggggtacatggtggtcactactatgcattcatacggccaactttatctgagcaatggtataaatttgatgatgaacgtgtaacaaaagaagatgctaagaaggctcttgaagaacaatatgggggtgatgaagagttaccccaaataaaccctggtttcaacaacgctccatttaaattcacgaagtattcaaacgcgtatatgcttgtttatattcgtgaaagtgccaaggagaaaattatgtgtactgttgatgaaaaagacattgctgagcatttaagggtaaggttgaaaaaagaacaagaagagaaagaacacaaaaagaaagaaaaagctgaagctcatctttataccataattaaggtagctcgagatgaggatttgaaggaacaaattggaaagggtatatattttgatttggtggaccatgaaaaggtccataatttccgtatacagaaacaaatgccttttagttgtttcaaggaggaagtagccaaggaatatggcatccctgttcagtttcagcgcttctggttgtgggcaaagaggcaaaaccatacataccgccctaatcgtccattgaccgttcatgaggaaacacaatctgatttgcggcctctccctcctcctgagaagggcaaggaagatattcttcttttcttcaaattctacaacccagaaaaggaagaactctgtttcatggggaggctctttgtgaaggccttgggaaaaccttcagaaatcctggcaaaactaaacgaaatggctggatttccccctgatcaagaaattgagctttttgaggaaattaagtttgagccaaacgtgatgtgtgaaactatagacaagaaactcacttttcattatagtcagcttgaagatggggacattatttgtttccaaaaatcaccaggagcagaatatgatgcacccgtgcgatatccggatgttccttcatttttggagtatgtccataataggcaggttgtacatttccggtctttggagaaaccaaaggatgatgatttttctttggaattgtcaaagcttcatacctatgatgatgttgttgagagagttgctcgccaacttgaattggacgatccagcgaaaattcggcttacaccccacaattgctactctcagcaacctaaaccacagcccgtcaaatatcgaggagtggtgcatctgtcggacatgctcatccactacaatcagacgtctgacatcttgtattatgaagtgttggatataccactgccagaattgcagttcctaaaaaccctgaaagttgcatttcaccatcctacgaaggatgaggttgttattcatagcatcaggcttccaaaaaatagcaccattgctgatgtaatatatgacttgaaaactaaggttgaactgtccagtcctaatgctgaactacgtgtactagaagtcttctaccacaagatctataagatctttccactacatgagaagatagagaatataaacgaccaatattggacactacgtgctgaggagattccagaagaggaaaaaaatataggcccaaatgatcggctaattcatgtttatcacttcaagaaagatattaatcagactcagcagattcagaactttggagaccctttcgttttggtcgttcatgaaggtgagactttagcagaagtcaagaagcgcatacagagtaaactgcaagtctctgctgatgaattttccaagtggaaatttgcatttatatcaatgaatcggccagactacctccaggattcagatgttgtacctactggctttcagaggagagaggtctacggagcttgggagcaatatcttgggatagagcacgctgatactgcaccaaaaagggtctatacagtgaatcagaaccgtcacgcatacgaaaagccggtcaaaatttacaattgagatttctaactaacatggccgcacggtgaaggcctccatacgagaggagcggccagaaaagggaggacagggaatttatactgtcagggggaaaacctcatagttagcgagccattcggtgtggcacggccatgtattccagcgctagaggccagccactgttatttcatctgtagcagccagcagctcctatagcaatgattttctttttgtacaagattttccttctttgccttagggtgatggcgcgagcgcattggtgtccgtttcggttgggcaattgcttcattcttagagcaaagctgggtacataagattttggtaggaagcgtgtatacaggcaggctgtatagttgtggctctctcggcttgatccctcgtatcttgtcttgtgctattgttaatgcagtgacaggggctgactgtaaatcgtggttccaattttcag

SEQ ID NO: 33741 - DNA, 1361 bp, Zea Mays
agacacactttaaaagtttcatggaccggtcacccacgcctaaaaaaaccgtaatagcaaaaacgactccacacggtccacggcgtcttctccggcgaaccttcgcgagccctcggctcccctctaccaccgctgccgcgaccccgcctccggagcatcctcgggtagcgctctggcttcccgtgccgccggacgtcctgcaggaggcggcggcctccgtggcatgttgatgagggccgccgctgccctccctcgccgatcgtcgcggccctcggagccggggtcctcctcctcccgggctcccgcccctggggcctcctccagccgggctcctgcccctggggcctccttcgaccccttcgatgtcgataccgacccgccatcacggcctgagctgacgcccgagcagatcgggctttgcgtcgacgcgctcgcgcatttcgagtacaaggggaagcgccgggatgacttgtccgacgagttcagaagcctctcggtatcggatattagacatatgaaaacgatcagtgtagctcattatcctgttaatagagagaagaaccgatatattgatgtcttaccatttgacgataccagagtacagctaaaatcctcagcacggcctccaaacaacgattacatcaatgcaagctttataaaggctactgagaacaacagagttgcaacatttatttctacacaaggtccactagtgaagacatttggagatttttgggaaatggtctttgaatatcagtgccctgcaattgtcatgctcacccactttgacagtattaagatggtactcttgagcgctacaaggcgcggtgggtatgccaaggtttcatttagcgtccgggcgtggactatgatgtgactttcagtcctgtggttaaactcgccacaagttgcacagttctcactttggctctctctcaggactggcctattcaccaacttgatgtgaagaatgcctttcttcatggtacactctctgagacagtatattgcagtcaaccagtaggctttgttgattcagctcatcctgattatgtttgtcgtcttaactagtctctttatggtctgaagcaagcaccacatgcttggtatagtcgatttgcatctcatgtgaagtctccggggtttgttgaagccaaagctgatacttctctgttcacatggcacagaaacagtctacttactttatgttgatgatatcatcttcaccacctccaacatggtcctcttacagcgagtgattgcagctcttcagaaagattttcctatgaaggttctggggcctcttcatcatttccttggcattgcagtagagcgcagatcgaatggtctttttcttcagc

SEQ ID NO: 33742 - DNA, 5376 bp, Zea Mays
gcacaagcttcctccttcccacatgggcaccgtctcctccttccccaattgcaagctccattcgcgctcctcgtcctccgctgcctccagcctagtcccatctctgctcgattggagaggtttgggccatgcttcctcctcgcgcgccacgttctcgacggaatttctcgtctacacaggagccaaggaacgctagaattagacgcttcccggggtcccttttagttcccctctaacgaatcataggtttgcagtttggtgtggacgtatcctgtgatttgtggatggttttggtgtagagtttagagagatcaagaacttccaacttggggtttcctgtagccttttttagctgttctggggcttttatgggagtgcccgtcgcgcagaagtccgattcttgggtgactgtgcttgcgatgacggacagcggcggcctcggcgttcggcctattaacggaggccgagggagtgccgtggagcagcgtgggctcggactcggagacaacgggcctccagtgtccccaccagagcgtgtttctacgccgcctgcgccgagactagctgcttggtggcgcatgtcgtcgcctggtcctctccggtgctcaaccccgaggagcgttggatgtgaagatggtgatgattcggataggtacttttccccacagagtgagttttctcaagacacttctgatacagattcgatgagcacaagtattagtaggatgtataccttcaggttagggacttcgagcccattagatagtcctatcaaacaattgggagtaggagacacaagtcctccctcaaggaagggttgccattctcctagatatccttggaattcttgccggggatcagatgatgttgattctagctttatgagttcacctcggcatgatgatgaagagaggaaatatgatgtgcaaccaattgattttgagagtagacacatctggtatcctccaccacctcaggatgaaaatggtacttttcaatatgatgaggatgatgacaatgatgtttgtgatgggaaggtctttggacatattaaccatgattattgtgacggcgaagatgatgatgatgtgttagggatcaaaggaaaacatagtatatctcacaaagagttcttgaggagtgctttacatgggcatttcagggctctcgtctcacaattgctcgaaggacatggcattgatcctgtggatggctggccagacatagtatcctcattagcttggcaagcagctacctttgtcaggccagacacgagcaaaggtggtagcatggatcccacagactatgtcaaagtcaaatgcgtagcatcaggaaatccaaatgataggaaaaggagtatcttaagaatgctgttgcaaagatagaggctcaacgcccacaagtcttgctagttgagaaaagtgtgccattgcatgcacaacagcttcttgcaaaagatatctctttagtattgaacgtcaagagatcacttctggaaagaatttctcgctgcacaggtgctcaaattgcatcttctgttgaaaatatcacttctacaggagttggacaatgccaaacattctggattgagagagttacagaatgttcatcaccgaaggtctcaaacaaaaacacagtcaagacactgatgttttttgatggttgtccaagacgcttggggtgcacggttcttctaagaggaaaatcatatgaagagttaaagaaagtcaaacttgctgtacagtatgctttatttgcagcataccacctgtcacttgaaacctcatatcttgctgacgagggtgcaacacttccaaaagtcccttcagaccttcaacttgagaagccgaattcttcctcaagatactatcagcagaatttgattgaatttcaaaccattgaaggggaaacttatggagctggatgcatcacaccttgccttaatggctctgcaaatcaatctcattcaagagatgacataattcatgaggaacatgcacactgtcattcaagatctgacttaagttgggaagaatatactggtggaaccattgatgtatacccttattccacagaagcttcaatgtatagtagctgtatgccacctgtatgcatgactgttcagacacctaaaagttcacttgccagtgcgagaaaaagtacaccaggaaatttgtttttttccaataatgttcacatagatgaagcaggtggtggaatgtcaaaggttgataatgacgtccttgacttggataatggttggaatcatatctcagatgaagattctgtagcaatacatgatcacaacggtaatcacaatgaatattttccaacatctgacagtccacagagcattttggtttccttgtcaattgcatgccctctgagaggaattgtatgtaagcagtctcagctatttcgtataaagttctatggtacttttgataagccgcttggaacgtattttcgtgaagatttatttgttcagacatcatgctgtgaatcctgcaaggagcctgcagaatctcatgtgcgatgttacactcatcaacaaggcagtctcacaatcagtgtcaaaactcttccatctgtgaagctacccggggagcttgatgggaaggtatggatgtggcacaggtgtctcaggtgcaaaccaaaagatggaattcctccagccacacaaaggatagtcatgtcagatgcagcacgtggattatcttttgggaagtttctggaacttagtttttcaaatcacacaacagccaatcgaattgcctgctgtggacactccctccaaagggactgccttcgtttctatgggcttgggagcatggttgctgtcttccgttattcaccagtagacattctttctgtcaacttgccatcctcagtactggactttgcttgtccaaaagctcaagattggatcatcaaagaagctgttgatgtatgcgctaggaaggaacatctgtatagggaaatcgttgctaaacttgactgcatcgaaaagatagttaaagaccagaacattggtatgaagtcaggcttgcataaacatgttgctgatcttaaggagttggttaaagttgagtggaagaagtatgacgttgtatcagcgttttctatcgtagataacttgcagacatttgaaccgtatatagatgttctagagctcaatctcctgaggagagagcttgtacatgatattcacgtatgggatcgcagactgtacatgatgcactccctcacgaaagagaactgtcgtactatgccaaatgacgcacaattttctgagaagtttactgaaagctcattagaacaatcaaaggatgtgacatctggtaaacatttgaatgctgagagttctctagaacagaatcaaccaagtacgttggaagtggctgcagtttcagtgaaatcatcccctatgacggaacaaaccaacactagcatttcacatttggcattggaaaccaccattatgggtgatgcatccatgcattctgtctcaactgttatcagctttgccccaggctcgtatgaaatgcagagtgaaggagtgctggctgaactagaagctggaaagactttgcagaaatcacaatcttctgcctccaatctttctgatagaattgacttagcatggactggttctggtcagcttgttaacgattcatcaagtagcatggaggcagtttcattcatacctgctagtctgaaggataatcctgcataccagaaggttatagcacccattagaatcaaatcgtttgattctgctataagttccagaaatgttgatgattcaaatgctagtataagaagatcttattctcaaaggcccccaaaggctattgagagaactggtaagggtctgtcaccaacattcttgaacaagctctcacttcctggtatgattcatggcgagagtcggttgctgctgtcacaaaatgattcaggtgttattgttccaatttatgatgatgaaccatctagcatgatagcccatgccatgactgttccagaatatcacagcttcttgttgccacttctgtatcagaataatgaatctaatttattgaattatggttctgatcagcctcaacctataactagaaatgattctaagtataaccatttcactatttcttttgaggatgaagactcaaattccgttgataaagcaaaattttctgtgacatgttattttgcaaagcagtttgatgcaatcaggagaaagtgctgtccagatgaactagactatatccgctccttaagtcgctgcaagcgatggagtgctcaaggtggcaagagtaatgtctactttgccaaaacactagatgacagatttgtgataaagcaagtgacccggacagaattagattcatttgaggattatgctgctgattatttcaaatatttgatagactctgtatcatctggaagcccaacttgcctcactaaagtccttggtctttatcagatcattgccaagaatttgagagatgggaaagagctgaagatggatgtaatggtcatggaaaacctatttttcaagagaaaggtatcaagaatatatgacctaaagggttctttgcgttcccgctacaaccctgatacttcagggaacaacaaggttctcttggatcttaatctgttagagacacttcacacaaagcccatttttcttggaagcaaagcaaaaagaaggctagaacgagctgtctggaatgatacttcttttctggcatcggtggatgtgatggactactctctcctagtcggcattgatgaagaaaggaaagagcttgtgatggggattatcgactatcttcggcaatacacttgggacaaacaactagagacttgggtgaaggcgacaggatttcttggtggctccaaggatgttctgccgaccattatatctcctgaccagtacaagaagaggttcaggaaggccatgtccaagtacttcttggctcttcctgaccaatggtcaccgtaacgccaacaatgcatccaggccattccaagcgcggcgacagggaagaccactccggttttctttttctttttctctcccttctgtttcttttaggacgatctatccatctgtgcctattgtatgctgtttttgttcacaacaggcaggatgaactctgtggaagattgtggcgattgttgtccagccaagcagaggttaggcgtcaatacgtgtacataccctacactgtaacatgaaattgcaaaggaaatgaaaatacgcgaactcgcgagttccttaccagtgatatgatttgagaagcttgcccattgttgctttgtgaggtctaaaacaattattcactccgcttctttctacgttttatattttat

SEQ ID NO: 33743 - DNA, 1375 bp, Zea Mays
acaaacaaaagcttaggcttgtgtatggtttgcagccaatgcaatttaagaggaagttgtgatagggcatatgtgaaggctcggaaagaggacgttggaagaactgtggatgttatgcgcatccttttgacttacggtcttgatgttattaccggcaatgtagataatagagcatgcctgaacaaatctgtcaaggaatcaataaagatcctactaagcgaggttgttgaggtggattctaggggacctggttccagcactgtgaaagctgcacagcgcaaaggtcaatctgctgtacccatgaagcagggtgattggaattgtcccaaatgtgactttctgaactttgcaaagaatatcaaatgtttgcgctgcgatggagaattccaagagaggtatcagttgttgcatgaagaccgagagcatctgcctctcaaaaagggtgactggatatgcaaaaggtgagcctgcttatagctctagttatgataaatgtttactgcaagtgatgttctctctctctctctcatactgaccttatttcaggtgcaactttttgaattttgctaagaatacaagatgcttgcaatgtcatgagaaaccaacaaaccgtttactcaacccaggagaatgggagtgtgtctcgtgtaactatgtgaacttcaagaggaatgggttctgcttgaaatgtggctggaaaagaccaaagtctctaaacaatcaagatagtgtcaaattgtgtcatgatttagagcatagtaagaatccacgtatttcatttgttcaagatggtgtccagatgaaggggtggcaaagtctgcaaaagaagggttcaccatccgacacagatttggatttctggagtgcagacgacgaagagggtggtagcagggataatgatacgctgctgcgacagaaggactacagatttcttgagagttttcccattgtcggtggcaggactgctaattcccaagatcttcttgcaagggagaagtggaaggatgaaatgtccaggagaaataaaggccttcaaactacggaatcgcaagaaagcaatcggccttctagccactgccgtcttccaagaagcatggagctggttgactctgatgatgatattgcttcttggttttcgggtggggataataataataggaacctggataaggtataaccagatcttgtaagtggatgcagctcatcaataaaagttgcatcctttggaattattgaaattcaggcaaaaagaattattaaagctcactggagaactgtacaatttaatgtttcggaactttgtttatgggctgctcagagatgatatgattttttgcaaggggtttgtgcctgctctcatgcaattaagttttgg

SEQ ID NO: 33744 - DNA, 2543 bp, Zea Mays
cacgcttggcggtccccgtagaccaagtccactcgccgatccctctccgagatctccacccacttatttcccctcccaccgcggccaggcctcagtcctctctgtcgcggagccgccgcaacccagcgtcccccgaagtctaaccctagatccggaccggccatggcgtcccgccgggtcgtctcctcgctcctccgctccgcgtcccgcctgcgggccgcctcgcccgctgctccacgaccgcgcgcgccaccgcaccgcccgtccccggccgggtacctcttcaaccgcgctgccgcctacgcctcttccgccgcggcccaggcggcacctgccaccccgccgccggccaccgggaagaccgggggcggcaagatcaccgacgagttcaccggcgctggcgccatcggccaggtgtgccaggtgatcggcgccgtcgttgacgtgcgcttcgatgagggcctcccgcccatcctcacggcgctcgaggtgctcgacaacaacatccgcctcgtgctcgaggtggcgcagcaccttggcgagaacatggtgcgcaccatcgctatggacggcacggaggggctcgtccgcggccagcgcgtcctcaacactggctcccccatcaccgtgcctgttggcagggctacccttggacgcatcataaatgttattggtgaaccgattgatgagaagggtgacataaagacaaaccacttcctccctattcatcgtgaagcccctgcttttgttgagcaggccactgagcagcaaattcttgttactggaatcaaggtcgtggatcttcttgcaccctaccaaaggggtggaaagattggtctcttcggtggtgcaggagtgggtaaaactgtgctcattatggagttgatcaacaatgttgctaaggcccatggtggtttctctgtgtttgctggtgttggagaacgtacccgtgaaggtaatgatctgtacagggaaatgattgaaagtggtgtcattaagctagatgacaagcagagcgaaagcaagtgtgctcttgtttacgggcagatgaatgagcccccgggtgctcgtgctcgtgttgggttgactggtttgactgttgctgaacatttccgtgatgctgaaggacaagatgtgcttctgtttattgacaacattttccgttttactcaggcaaactctgaggtgtctgctcttcttggacgtatcccatctgctgtgggataccagccaacccttgccactgatcttggaggactgcaagagcgtattacgacaacaaagaagggttctattacatctgtgcaggccatctacgtgcctgccgatgacttgacggatcctgctcctgctactacctttgcccatcttgatgctacaactgtgttgtcacgacagatctctgagcttggtatttatcctgctgttgatccactggattccacatcaagaatgctttctccccacgtgctgggtgaggatcactacaacactgctcgtggtgtgcagaaggttcttcagaactacaaaaatcttcaggatattattgctatcttgggtatggatgagctcagtgaggatgacaagctgacagtcgcccgtgcaagaaagattcagcgtttcctgagccagcctttccatgtcgctgaagttttcacgggtgctccaggaaagtatgtggagctgaaggaaagcgtgaagagtttccaggtacagtttgaactgtttttttttttgctcagaaactgctgcttggaaatattgtattccttactatgctttctcataatgtttagatatgcatctgtagacatcactgggtccttgctttgctttaccatttttgttgtttgaggccctcatgtttagttttgtcagacaacactcgtgcattctatacatgttgcagtatgatgtttctgtttcacgatctgcttttctatggaatcttatattgtgcagggtgttttggatgggaagtatgatgacctccctgagcagtcattctacatggttggtggcattgaggaagtcattgctaaggctgagaaaattgccaaggagtctgcttcataaggaggcttcttgcttgttcaaccctgtacaagttccatttttggattttaagcgtttatttatgcttttcccagttaggcatgacgagctggagagtccatctcctgctgagagatgtttgttttacccttctttgcttcctccaccttacacccaaataagcaactgcagtgacgttggttttggctgcacccaaactacatgactgaagaaacttgtggcctgtgtaacgcgaatccatcagaacgccaaagttatggcttctggttgtggcaaattatggttcctccctgttcggttgagtggttgcattctggaggtatcttgttctggactcaggctaatgattgtgcgtgcaactgtttcggagtcatttcaaaggttatccactttcgttggagttgatttcataacttatggtgtgtttggttgaggagcggagaggaatggaatggtttcattcttat

SEQ ID NO: 33745 - DNA, 1679 bp, Zea Mays
ccacgaaccaaacatggagaaaaacgccgaactttacagtcaagtagcgcactttggcttgtgggcagctgtgcccctatcacggtatccatacactcccggcatcccttccatccgcgacccgccgcgtccgtacaccggaccatgctctccacacccgccgcaggctggcgcttccgccggggaggtctgccctggaggcttcatacgtgctcctgcctggcgtcgccgctgtcttccagcggcggcgagcctgaaaaggcgaggcctttgctcgcggagaggtaccgggacggtgtcgtcaagagatatatttcggatggcagttctaagctgcaacttcgtttggagaagcatgaatctccagtgaacggtgtggaagatgagaatgcagattctttgatcccacaggctattttggactttgtgcttccagctgggtttccagggtctgtttcagcggactacctggactacatgttgttgcagttcccaacaaatgtgacaggttggatctgtcatgtattggttacatcaagtcttttgaaggctgtaggtgttgggtcctttacaggaacttctgcagctgcatctgctgctgctatcagatgggtatcaaaggatggcattggggcctttggacgtcttctcattggtggacgctttggagcacttttcgatgatgacccaaagaagtggaggatgtatgcagatttcattggaagtgctggaagcatatttgagcttagcactacattatatccaggttactttctcccacttgcatcattagggaaccttgcaaaggccatagcaagaggatttaaagatccttcatttcgcgttatccaaaatcactttgcagaatctggaaatcttggagaggttgctgcaaaggaggaagtatgggaagtaggagctcagcttttaggcctttcaatcggtgtactcattatggataagacaggtgtaaagtcatcatacttaactcttgttttaacttggctgagtgttcgtcttctacatctttggttgcgctatcagtccatatcagttctcaagttccgcacagtaagataaacctaaaacgtggccggattcttgtgaaatcacatgttgcacaacatactgttcctggttatgttgcttgcaatgaggaagaaaacattttaacatgggaaagatacttgcgtccacaagtttctttcggtgtgcccatggaaagaatgcttggtggtgacaaatccagtgacatggaagcgaaagcctaggaaaaattcaactaaaggctggttccccaaagatgtacctgagtcatcacagccagttgaccacgagaatgaagacgtggttgcaatgataccagctattgaagatgttgttgaaagaccttcttcgccaccagaagaacgtgtagttcgagtcctagttaaaaagatcacacctaggaagaagaatgtttgagtactatggtgaacttgtttgttcttatggtagtatggtgtgtgtatggaactatggcatttgtgtgacatttgtatgtaactttggcatctgtatgacatttgtatgcacctatggcatttgtatggtacttgtatgacactatggcatttgtatgaactctctttcataattgtcatgaactctcttaaaattagagaacacacaatagaacg

SEQ ID NO: 33746 - DNA, 2936 bp, Zea Mays
ccaatcggacgcgaacccctagcgcgatcatcaccattattgtgatgtgcccggctcacctgtgccaggaacccggtggccccactacgaacaattgctcgagtcaatccggtaggtgtagccgtgtctgcgtagccgttccggggagccaagggctcggcaccaccgcggcatcggtgcacaaggacggcgcacgtacgcgccacgtccttgggccccggcgcagttgtaccctccatctctgtcctctttacttgccccatccatcccacgccgatcgccaggcgccagcagcaggctagctctgctccgccgctcactgctcgctagctactggaccgcgcttccctctctccatcgcgccggcgcgcacggctagctctagctcccggagccgccctttcatggtccccgccgtggtcgggacgagatgcctccgctcgcattcctccgccgctacctccccgcgaggcttctcgcgcgagcgtgcgatggtggagtccgggggagcccgggcgtggcgcgggacgaggaggccggaggcagcggcggactgagcggccggtcggcgggggcgccgtccggggagtgctacgcgtgcacgcagcccggggtgccggcgttccactccacggcctgcgaccaggtgcactcgccggactgggacgccgacgcggggtcctcgctggtgccggtccaggcgcagcagcaggcccagccggcggcggcggcggcgcagcacgcggcgcggtggctgttcgggcccgtgctggacccgcgcagcaagcgcgtgcagcgctggaaccgctggatcctgctcggccgcgccgccgcgctggcgctggacccgctcttcttctacgcgctctccatcggccgcgccggccggccctgcctctacttggacgccggcctcgccgccgcggtcaccgcgctccggacctgcgccgacgtcgcgcacctcgcgcacgtgctcctgcagttccgcctcgcctacgtctcccgcgagtccctcgtcgtcgggtgcggcaagctcgtctgggacgcccgcgccatcgccgcgcactacgcccgctccgtcaagggcctctgcttcgacctcttcgtcatcctccccatcccgcaggtcatcttctggttggttataccaaagttaattagggaagaacgtgttaggcttatcatgacgatactgctactcatgttcatatttcaatttctccccaaggtctaccatagtatacacatcatgaggaaaatgcagaaggtgacgggttacatctttggatcgatatggtggggatttggtttaaatctatttgcctatttcattgcttctcatattgcaggtgggtgctggtatgttcttgcaatccagcgcattgcttcctgcctccaggaagaatgcaagaaaaacaatagttgtgatctaatatcactagcttgttcgaaggagatatgctttcaccctccttggtcttcgaatgttaatgggttcgcatgtgatacgaacatgacctcctttagtcaacgaaatgtgtctacttgtttaagtggtaaagggtcgtttgcttatggaatctatttgggggctcttcctgttatatcgagcaattcgcttgctgtcaaaattctctatcctatattttggggactcatgacactcagtacttttggtaacgatcttgccccaacaagcaatggtattgaggtgatattcagcataatcaatgtcctcagtggcctgatgctcttcacattgctgatcggaaacatacaggtatttctgcacgcggtcctggcaaggaagcggaagatgcagctgcggttccgagacatggaatggtggatgagacggaggcagctgccgtctcggctgaggcagagggtgcgcaaatatgagcgcgaacgctgggccgccgtcacgggagacgaggagatggagatgatcaaggatctgcctgaaggactgaggcgggacatcaagcgctacctctgcctcgagctggttaagcaggttccgctgttccatggcatggacgatctgatcctggataacatctgcgaccggctgcggccactggtgttctccagcggggagaaggtgatccgagagggcgaccccgtgcagcgcatggtgttcatcctgcagggcaagctccggagcacgcagccgctgaccaagggcgtggtggcaacgtgcatgctaggggcgggcaacttcctaggcgacgagctgctgtcgtggtgcctgcgccgccccttcgtggaccggctccccgcgtcgtcggccacgttcgagtgcgtggaggcggcgcaggcgttctgcctcgacgcgccggacctgcggttcatcaccgagcacttccgctacaagttcgccaacgagaagctcaggcgcacggcgcggtactactcgtccaactggcggacgtgggccgccgtcaacatccagctcgcgtggcgcaggtatagggcccgggcatcgacggacctggcggcgatggccgcgccgccgttggcgggcggacccgacgacggggaccggcggctcagacactacgcggccatgttcatgtcgctccggccgcatgaccacctagagtgatcaggaggggggacgggaccatcctagctgtgccggccgggtcatggtgtctgtacagtgtacactagtggtatgttgttgtcatcttctgcgtgagtgaactggtggttcgggatttgtcatttaaagaaggtcaataatggagaaatagtttcttagcccgattcaattgtcttcctttcaccaagaataaaaattacttctgccggactgcctctccgcgttggtctggattgcttttaccaagaataaaaattgcagccccggctgcagcggctgatggcaggacagattcagacgcgcagagaatacgtacaagtcgccgaag

SEQ ID NO: 33747 - DNA, 4051 bp, Zea Mays
ctcgaattttgctgtgagtatattatgaaaaaaaatactaaatggaaatatgacgactggcgagagctagctagcacaaaggtcgtcgtcgaccatgtctgtggcgtctataaagcaaagctacatacatggcgcgtactgcaccaccgtaccttgcgtaccggctggaagaagcaaacaagccaagctataggctctagctagctccggcggacctcagcggccgggatcagatcggaatcggatgggcagcgtgggcgtggaggcggatgacgacggcagcatcgtcaaggagttcctgcagcggtgcgagccctccggcgacgccgcctacggcgagctcagggctctgctggcgcgcctccacgacccggccaccaggcgcgacgcgcgcctcttcctcgccgcgctccaccgccaccagcagcgcagctcgtcggccgccggcggactaacgcacgagcaattctttcgacgcttcggcttccgcatgcaggagctgctgctccaggataccgccaccgacataaccgcctccagcttcatcgccaccaagcccgccgcagccgcaggtttccaacaaatgaagaagttgacaatgatggagataccaagcatcttcattcctgaagattggtcattcactttctatgagggcctcaaccgtcatccagactccattttcagggataagacagtagctgagctgggatgtggcaacggttggatatctattgctcttgcagagaagtggtgcccttcaaaggtctatggcctggatataaacccaagagctgtgaagattgcatggataaacctgtacttgaacgcattagatgacgacggtctcccgatctatgacggggaggggaaaacattgctcgatagagttgaattctatgaatctgatctcctttcttactgtagagacaacaagatagagctcgatcgtattgttggatgcataccacagattctcaacccaaatccagaggcgatgtcaaagattgtaacagagaattcaagtgaggagttcttgtacgccttgagtaactactgtgctcttcagggttttgtcgaggaccaatttggccttgggttgattgctcgtgcggtggaagaagggatatctgtcataaagccttcaggtattatggtattcaacatgggaggtcgaccaggacagggtgtctgtgaacgtctatttcgacggcgtgggtttcgcattactaagctctggcaaaccaaaattatgcaggctgctgacacagatatttcagctttggttgaaattgagaaaaacagcagacatcgattcgagttcttcatggatcttgttggggatcagcctatctgtgctcgcacagcctgggcatacatgaaatctggtggtcacatttcacatgctttgtctgtgtatagctgtcaacttcgccagcccaaccaggtgaagaaaatatttgagtttcttaaagatggattccatgaagtcagcagttcccttgatttatcctttgacgatgattctgtagctgaggaaaaaattcccttcctagcttaccttgctagttttctgaaagagaacaagtcaaatccctgtgagccaccagctggatgtctaaactttaggaaacttgttgctggatttatgaagagctaccatcacattcctctaactcctgataatgtcgttgtgttcccttctcgctctgtggcaatagagaatgctcttcaattgttctcaccggcgcttgcaattgttgatgaacatttaaccagacacttgcccaagcaatggttaacatctttagcaattgagggaagagcagattgtaatcacgccgatggtacagttactgtaattgaggcaccacgccaatcagatttactgattgagttgatcaggaagctgcagcctcaggtggttgttactggcatggctcaatttgaggctatcaccagtgctgcttttgagaacctactaaacgtaacaaaagatgttggctcccggctgttcctggatatttctgagcatctggagttgtctagcctgccaagctctaatggtgtattgaaatatcttgctggaaagacattaccgtcacatgcagctatactgtgtggtttagtaaagaatcaggtgtactctgatctggaggttgcttttgccatttccgaagatgcagctgtatataaagcattatcacaaactattgagctattggaaggccacacttctctgatcagccagcactattatggttgccttttccacgagcttctggcatttcagattgctgaccgtcatccacagcaagagagacaacctgcggaagtgatacctcagcagatgataggattttctgacccagctgtgtctaccctaaaggctactgaatttttcgttcctggttcagctgaatccagcattattcatatggatttagatcgcagcttcctgccagtaccttcagcagtgaatgcgtctgtttttgaaagttttgtcaggcagaacatcactgattctgaaaccgatgtccgttccagcatccaacagctggtgaaagacagctatggtttatccgcagctggttgtgcagaaattatctacggaaacacctccgtagcactcttcaacaagctcgtcctttgttgcatgcaagaacagggcaccttgcttttccccttgggcaccaatggccactacgtctccgcagcaaagtttgtgaacgctagcaccgtgactataccgacaaatcccagttcagggttcaggatcgagcccaaggttctagctgacactcttaagaatgtatctcggccgtgggtgtatgtttgcggccccacgatcaaccctactggctttctgtacagtgacagtgacatccgagagctgctctccgtatgcgctgaatatggagccagggtagtgatagatacatccttctctggcctggagtacgagaccgatggatggaggcagtggaatctggcaggatgcctttcctctttgaagcgttcagagccatcgttctctgtggtcctgctcggagagctgtcctttgcgctgactgcaggtgggcatgactttgggtttgtgatattgggtgactcgtcgttggctgagacgttccatagtttttctagcttgagtcgaccgcacaccacattgaagtacactttcaagaagctgctggggcttaagaaccagaaggaccagcatttctcggatctgatagtggagcagaaggaggagctgaagaatcgcgccaaccagttgatacagacactggagagctgtggctgggaagctgccatcggttgcggtggcatctcgatgctggcgaagcccaccgcgtacatggggaaggccttcaaagctgctggcttcgacggcgagctggacgcgagcaacatccgggaagccatcctgagggccactgggctgtgcataaacagcagctcctggacggggatccctggctactgccggttcagctttgctctggagaggggggaattcgagcgtgcgatgggatgcatagctcggttcaaggagctggttctgggaggcgctcagatgaatggtgcctgatggagcaatccatgttatacgtaaccttggtgctgtgtagtagcgatgatattgttccaggtgatggagatatcaaggaataacaagagcctacctgctgtgaagtcaatgtactactaggatggatagggcgcttcgatgcgccctttctgtcttcgaattgctgtgctgtgcacggagaataaacatatactattatatatatacatacaatttgctaagatatactcctatttgttgtcgttccatgcataaccgtaacccattaattccaaagaaacctggggggtcatgatcttgtgaaccgttgggatcatgattagagggaaatttttgtttttagaatggattgcgcagcttgatttaactggaaatactgatttgatggatggaatggaacaagtgtacataaattgttggaggttacaatgtaggcctgcatcaggccttaggtgc

SEQ ID NO: 33748 - DNA, 1968 bp, Zea Mays
tagagaatctttgatcttgggctgttttctgccaaataattaatactaaaattagttcccctttctacatacaacaagtacattatataacagaatatcattttatataaaactataaacacctggaaaatattgttaagtacaatttgttcgtcgtctttgttttcctctataatattttttagcacagttgtgctcaccctcaggagttgtgaaattttggttgtacagattgtaaatggctggggaacactgcacagagccccaatttcaccaaatatttcgccagcgtacattactccctggacctgcattttctagtgatgcatttcagattctgaaatatcatttttttatcaatatgcatgagcatatgactcacgttttcaaccccatcaatcacgaatcgttcttcctgcggaaatacatttcagaatgatagcatatatgcttggatgttagaacctgtagaaaaattatgaatactaaaattatagatgcactaaccactgctccggaaactaatatgtaaacatctgtcggtgcttcattttgtagtatcacaagttctctcggtggaaagtactctgcttccattgcagtgacctgcgaagatagatcacttcattagcattgagttgtttttggtatttattgtatacattcttcaactgtcatagcagagaactatttttcttgttcataccagttggagcatgcaagtataagaaacaccacgaaaaagcatttcatcccttatgtattcaggtaactgatttcttgaggcaaactgggaagctgcatggattgtgtccctctgcatcatgcaagaaaggaaagatcacataattctctgaacaaagagctatacaaacattagctgcgggtatttggaagagaacttacgaaatttctggtacggcaacttccctggacaaccagatttgtcatgtttcctatgaggtatgccaggaaaaaggttaggatgatatctatagcaaagaagctgttgacaatgttctcaaccagaaaaagcacccatgagagatgtctcagaaatgctagctcaaatggacagatccatgctgagtaaacaacaagcacaagcaagaacgtctcccaggttctgataaggcatgacaaacaagcaaggtaaatacttatattttctttcgcagtatttgaaagcaaatactatgaattttacctgtaacacgaatcataaggagaaatgatgaatttcctcaacttgattgactcgtttgcttttgctcctagagatgggagcaggtcattgtgaaatatattgctaatatcttccattggtgtgtttgactagaacaatgatagtaccaaacttgatatcattgtatgcgctcctataaatgttttcggtgtatggagagctttctggattgtttggcagtgaatctttgcatgcctttgatgggcaaaggatggttgtgtttctgttccaaaatgacggctgcggatgctgcataaataagagtttggtttggttccaagaaggattggaagaggatcaatgagacatgaaagcatacagcaggaaccctccaaaaggcttcgccaatgaagttgtatggacagatatataaataaaaaggagtttacttaatccgttgtgaagaaatataaatattccgattgcggggttcagcttggcctttcttacaatgcattcgttgccttccagatgctgaacttttgtcacatgctgcctgtgagtttgcaccttcgctagaactagaagcctgtatactgggccgccaacatctgttctagtaccttttagcttcatcacatgtatccatttggttgcttttgatccctgcatcactctcagctttgctaactcgtgacccttgttcgagagtctgagcacctggaaatatatacgttgattcatgaagagtggagataactcacggggtacttgccttgtta

SEQ ID NO: 33749 - DNA, 1950 bp, Zea Mays
atgggagatgggggcaagctcacggccggcatggtggagtccgaggcgagcaccgacatgaaggagaggccacggcgagcgcagatgccgaagcaagacgtggctatggattggctggaccagggagagcgtgcggtgaagctcgacgtggccaagcccacgcgatttgcgacagggacaggaccagcgtcccggattgtccctactcttgtgagagtcgcgaggacgagctttccccctcttgagatccggtgtctaatccatttttcaagcatgcggttcctaaaacctccctccaatcaagtacatgcaaaagttcgtgaagataaccgattttacccttactttaagaattgtctgggttcaatagatggaacccacgttccaatatcgatgtcacctaatcaagctgcaccattcaggaatagaaaagggacacttagtcaaaatgtgatgttcgtttgtgattttgatctcagagtcacttatttgtcagctggatgggaaggatcagcaacagattcaatggttctcagatctgcaatgaccaattctataggaaaggttgaagtaccttccagaaagttctacctagtagatggtggttatgccaatacagcttcctttcttgcgccttatcgtggggttaggtaccacttgaaagagtttggtcgtggccaccgaagacctcaaaatcataaggagttatataatcatcgcccatgccattttaagaaatcatgtagagagggctttgggtgtcataaagaagagatttccaatcctcaaagttgctacctttcacaaaatagaaaaccaagccaaaatacctttagctactgcagtctttcataacttgattcggtcactaaatggtgatgagaggtggctagagaatgatcaaggaaatatcaatccataaacttttatcaacctacatgatgataagatgtttagaggttctcctaagataatagctttatctaaagctgctcaaaagaaggcttctcctaaagctgcaaaatcaaagaaatgtggcggtggtgttgagagagctgcatggaatgttgaattagagaagagtcttgttgacttgttatttgaacacaatatgcctgcatatagggctcaaaatggatggagtccagatgcttggaataaaatagtttctgaattccacaagaagcatgaatatgttacattcaacaagatccaaattcaagaaaaggagagagaatttaaaagggaatacaaggtattgaaggaggcaagaaaacaaagtggagtttcttggaatgaaaaaagatgcatgatcattgctgaaccaacgatatggggcaacattatcactacatttcctagagctaagaagttccgcaagaagtcttttcctctctttgatgccttgagtgaattatatgatggtcacattgcacaagggacttggaacattacatctactcaaccactacaaaattctgatgaaggagagaaatttaaaaccatagaagtggaagatgaagatactaatgaaccacaagtagatgcgagaatagaacaagatgaagatatagtaattgttgaaagggttgaacagaggttacctaaaaggtcaggtgcaccaactgttaatcaagagaaggagacaaagagagtgaggaaagatgcactagaagggctgatagggaggtaccttgatgtaaaaacaaagcaagttgcaaatgaggctgcacaatcaacaaaagagaaggaagttgctcaagataatgatttttctatcaagaggtgtatttctgttcttaagactatggatatcacaagagatgagaagatcaaagcagctgaggtgtttaacacaccaaattacagagaaacatttatttgtttcaatgatgatgagccagaagtcgctctcctttggctaagggggaagatggataaactctaaag

SEQ ID NO: 33750 - DNA, 650 bp, Zea Mays
gtgggcttcgatgctcggcccggctctctggcgtcgtgcactggcagaacaatgtgatcattgaggaggtgaacaagggcctgaacccaggaatggtggttctgcttgtggttgcaagcttcctgctgctcttctttgtggggaactatgcgatgtatgtgtatgcgcagaagacgctcccgccaaagaagaagaagccggtgtcgaagaagaagctgaagagggaaaagctgaagcagggggtctctgcgccgggagagtaaacggccatgctgccgatcctcccgtccagagctcctattcacatgattattaaagaaaaaaatttatatatatataccagctggagccgtagtgttggagtaactttgttctgtagatgctctgtctttaatggtacatctgtattggagactttaatggcctgagccgagctagtatgcttcctgtttcgtacaagttcttgaaatgctggtgatggcgcatggctctagagaaaaactcaagggagctgagccagcgaaacatgatctacctctacctctagagttaccaactatatgcagttttaagagctgcagtagtattatttttggagtaactcttatgttactttgaaatccttaaaaaacaaacaatttagacatgga

SEQ ID NO: 33751 - DNA, 2832 bp, Zea Mays
cgcatctttactaactattaagagcctattgtagaccgcccccgcctcctacgcccgcccgcaagcccgcaaatcacgccgcgaaccgccgcagactgaccccgactccctacgcccgcccccaatccagccgcaatccaccctgcgaatgcggcgaccgtcgcgttccggccggccgcccgtccgcccgccgctatggcactatccactaaccagacacagcgtccagccaagcttttgccgccgcccacttctctcccacctcccctccactcttttgcttgtcgcggggttagaatcccatggcgctatcggccgagatccgcttcggccaccagatcccctatcccactacgacactgactcctacgaggaggaggaagaagaggaagaggaagacgaggaggagttcgagggggtggagggcggaggagatggatgaggtgacggtttcgtctccgctgatgctgccggcaacggaggccaggggaggggtgtccgtggtcgagatggtgatgggggcgcttcggaggtcgctcatgttgtgcagcagcagcgccggcgccggcgccggcgtgcgcgagccggagcaggaggaggacggggtgactcccccgggtggtatgcaaataggggggccaacggatgtgcggcacgtctcacacgtcaccttcgaccgcttcattggcttcctcgacctccccgctgacctcgagcccgacgtgcctcgccccgtgccgagcgcaaggatacgcgggaagaaagccaaggtcaatttccgggatgaagcggcggcagcaggtgctcagaagccagccgcaaccgcaactactccaactgcttgtgccagcgcagcgaggctaggtcctccaccgccgaagttccgtgctgacgaggttttcgggaacatgaacggtggcagcaacgatctgttcgcgattatgttcgcgttcagtgacagtagtagtcaggtcgttcgtgtggagccaggtgagggcgccgccggtttcctccccgcagtggaagtgttggacgacgagcctctgttgcccggcagtaagaggtctgcggctaacatgctgctgctctccggccagagcagcgactcgtatggctcttgtgacttggggtgggactgggacgatgacaccatgacctcagactacgcctcagtctttgctcctgctgctcccagtaacgttgtgccagcatggtacacgcaaggtggaccggcgtcgaagagaacgaggagcagctatggctacggtgtggcgatgctccagcagggagatggcgcgcaggccatgccgggcggctttgaccctgagacgaactaccagtaccagctgttgccttacgtcgtcgagagcagcccgtcggacggcgcgtcgacgcacgacatggactgccttcaaatgatgcgagctggtgatgttccacaggatggggcgagcagtggtggtggtggtggtggcggcggcgatatctggagccttgacgagctgctcatggccgctggcgcttactgagaaaagctatgtgcatcgcatgtactagacggttacttgttgtgccgtgaatggagtgtttctcagtttcgttttgcttttaaatttttttattattccaggtctcctgcttgtggtgatgatgcaggagagccatggtgggtaggtactatgcttttgctgccagtggaactgtgaaagcatacctcgatcgcaagtcactggcaaattctctgaacgacataaagaccgtagttatgcaacttcacgacctcatcagtgttatagacttatagtcatcattgttacactactatttatgggcattgcgacaaccaagattcttgttgtcatctcgtcccagcttctggttgcgggattcatatttgggaatgcatgcaagactgtatttgaggcccttatatttgtattcatcatgcatccatttgaggttgctaaccgctgtgttatcgacgaaacacagatgatcgtcgaggaaattaatatattaaccactgttctcttcaagaatgacaaccagtttaggcagctttgaggtccaaaattaaagggtacctggagagcaaaccaacgcattggcaccctacccacactgtaaatctcaaggacatcttggatgtgaacaagattaacatgtctctctcagtccagcacaccatgaactttcaaaacatccgggagaagaacatcaggaggtctgagctcgttatggagttgaagaaaatattcgaggagatgtccattcggtaccaccttctaccccagaaagttgaactcacctacgtcgactcgaacccactgcccatgggtccttctcatacaagatagaagatgggtgaagacttttaagtctcatactgacaacttgatccgtttcatgggatctgacaactgatggctagctgtgcagtctgttctgaagttactaaaactctgcatagtagatattagctcgtagaataatttgtcagataatgcatttgtaagcggtgatggtactggtgatcaatgctttgggattggccattacaccatttgattatctacaccgtttggtgcatcacaatcgaaaatgttgcgaaatagccactactaaagaaattcagctgggagattgaagtgggcctgtcgaaatgttattcttcacaatagtaccatgtaattcagctgtgagactggtagtcactcttgtgcatattttttgttggcaaaaatctacttcatgtccggtgttcaagaggttcctgagcttcaagaagaagcatagggggagggaggtcactgtaatcgactgcatgtcgcc

SEQ ID NO: 33752 - DNA, 3014 bp, Zea Mays
gggccgggcctacggactcggagtcacgaggcagcccacaatcagaatataacccaaccggctcctccctcgcttctcacctcaccccgtccggattgcggatctgacgcgcgagcacgaagcctcgacctagccaggcttcccttgccctactttgcgccgccgccgccgccgatccagccggcctctccccgcccgccggccgcgatgtacaacggcatcgggctgcagaccgcgcgggggtcgggcaccaacgggtacgtccagaccaacaagttcttcatcaagccccgctccacatccggcgggggcccgggcggaccccacaggccgccgctccccgacgccaccggcgcggatggcggcgggctcggcgggatgcgcaagcccaacaaggagatcctcgagcacgaccgcaagcgccaggtcgagctcaatctgctcgtgctcagggacgcgctcgaggagcagggctacaccgaagacgagatcgaggagcgcgtagaggaggcgcgcaaggctgctgaggcagaggcggccgcggtcgcggcagcggaggaagcagggagcgttagcggcgccggtcgaccgcctctacccggcagagggtttacagacacacagagccaccatgttgcagcacggaaggagaaacaacttgagactctaagggctgctttagggctgaacgtggaggatgcaaagaagggggatgtagaaagtgatgtagaatctggggagcttgttcctggtaagtactatgaggaactggttactgttggggaaaataatagtaaggattcaaagaatgcaaagaagagcaagaagaaaaaagagaatgacaaaaggcgtcaacccaaaagttcgagaaagagcaagtatgactcagacttggatcacgatcataacacaaaaacgaagaagagttctcaccatgattcagatgatgattcagagactgattatgatgagaaaaaggaaaagaaatacaacaagaaacatcgtcttggttctgatgatgattctgaaaatgatcgaaagaaggcaaagcgtggaaagaactctggttctgagtctgatacagatagtggccatggcaaaaagaaaactaaacatgtaaagagtgatcagggtgggagaaagaagatacaagtgaagaactctcatcacgattccgagtctgacacagatagtagctatggcaagaaaacagaacatgcaaggaatgataggggtgagagaaagaagataccggtaaataattctcgtcatgatttcaaatctgatatagatagtggatatggcaagaaaacagaagatgcaaagagtgaacactatgagagaaagaagttattggtgaagagctctcgtcatgattctgagtctgatacagacagtggttatggcaagaagaaaatggaacatataaagaatgaacgcgatgagagaaagaaggtgctggtgaagaactctcgtcatgattctgagtctgatacagatagtggctatggcaagaagaaaatggaacatgcaaaaattgaacgtgatgagagaaggaaggtaccggtgaagagttctcgttatgattctgagtctgatactgatagtggctatggcaagaagaaaatggagcaaacaaagaatgtacgtgatgagaaaaggaaggtaccattgaagagttctcatcatgattctgagtctgatgcagatattgactataggaagaagaaaatagaacatacagagggtattcgtgatgagagaaagaagataccagcgagaagctctcgccatgattctgactctggtgcagataataatgggaaaaacaagagaccattgcaaagctctcgtcatgatttggaggatgagaagcctagatcgagaaattataattatggctctcgggcttccgagcatgagaaacatatgttgaaaaaggatgtgcaagagaaaagaaaagtagctacctcaagtgatagttcagattacagcagcagcctcagcagtagtgattctgacacgagtgcagatagctatgaggaacagaaaaggagtcaagctggagggagaagaaatgagctgactacacaaaggcagaaagaggaggaaagaaaagagcttgaaaagcaacagaagagagaggtagagaagaaagagctggataagcaaaagcaaagggaggaagagaggatggagatggagaaggagaagaaaaggcagcgagagagggaggaagagagacagagggagagagagcaatacgaaaggaaaggtggaaatgatgtggagagggacaacaaaaggaaactgatagatgatcggtatgatccaaattcaagtagagatagagaagagggatacagagactctcagaacagagatgacaatagaaggcaggaagagcatggtcaacacaatagatatatggatagtcatgattccaagaggtcaaggcatgactcgcattaccattcaaggagggattttgaacaacgctattctagagacgaacatagagacagaaggcgtcactaaatcttggaagaatgccgctctaggtggacaacttattctcagctatcacccataagttccagtcccagatcttttctgcggcagcaagaccaacccatcagtacctccgctgcagcattaatatctgcttttgtttgtatcatactttggattttactatgcaaagagcgaagtctgcaatatgtaatatgttgtggaacagacatgaacggtaggattttttttgttggaatttgtggtgcgcatgttgctgatcataattatgataagttttcttaagcttatatttgatgagctccaggtttttcaaaatttggtgcgcatgttagggttcttttcatgtttcatgtgtactgctcaagcctttagataagccttgatgtttgcaggccactttagattagaaaaacagcaccaagtttaatacgtgctactctttcaagtggtaaccaagcataaaaaaacctgaaaaagag

SEQ ID NO: 33753 - DNA, 2912 bp, Zea Mays
tgcgcctcggcccccacgaaatctggaaagcctggacgccattgctcacctttttccgtccagcgcaaagacaccgcgcgccagagagggtgagggattgccgtgaccgattcgaaagccgcttcgggcgcgggtgggatcggcccgtggccggcggagatgtccggattcgtcggtgtcgtcgtgtccgacccctcgctgcaggggcagttcacgcaggtcgagctccgatcgctcaaggccaagttcgtgtctctgaagagagattccggccatgtcaccactaagaatctcccggtgatgatgaagaagctgagggggctcaatgaggtggtctctgtggaggagatcgcggccttcctgtccgagtcgtaccccgacagcgatcaggagattgaattcgaatccttcctccgggagtatctgaatctgcaggcgcgggtgagtgccaaggagggtggtgccggcggtggccggggtggcaagtcgtcgttcctcaagtccagcaccactacgctgctgcacaacctcaatcaggcagagaaatcttcgtatgtggcgcacatcaatacttacctccgtgaagacccattcctgaagaagtacttgcccatggacccgtctggaaaccagctgttcgatctcatccgggatggtgttctgctctgctgtacctgggaccattgatgagagggcaataaataagaaaagagttcttaacccatgggagagaaatgaaaatcacacgctctgcctcaattccgccaaggccattggatgcactgttgtcaacattggcacacaggatttggtggagggaaggcctcatttagttcttggattgatatcacaaatcataaagattcaacttttagctgatcttaacctcaagaagacaccacagctggtggagctatttgatgacagcaaggatatagacgaggttttgagtttgtcgccagaaaagatgctacttcggtggatgaaccatcatctgaaaaaagctggctacaagaaaactgttaacaatttctcttcagatgtgaaggatggtgaagcgtatgcttaccttctgaaagctcttgctccagagcattcccctgaaactacattggacaccaaggatccgaatgagagggcaaaactagtacttgaacaagcggcgaagttggactgtaagagatacttgaccccgaaggatatcactgagggatctgccaatttaaatcttgcatttgttgcacaaatattccagcataggaatggtctcaccagtgacaccaaacaagttactctcacacagaccgcaacacctgatgatgttctagtatctagagaagaaagagcctttcggatgtggatcaacagccttggggttgaatcatatgtaaacaatgtctttgaagatgttcgcaatgggtaataagacatgcgatagattctgtctctaaatgatttggttattaatgtccattttgatgcagatgggtacttcttgaagtgcttgacaaggtgtctcctggatctgtcaattggaagctggcaacaaaacctccaattaaattgccatttagaaaactggagaattgcaatcaagttgtaaaaattgggaagcagttgaagttttctttagtaaatctggctggaaacgatattgttcagggaaataagaaattgattgttgcacttctgtggcaattgatgagattcaatatcctccagctgttaaacaaactgagattccactcccaaggagggtcccaaggaaaagaaatttctgatgctgatattctagactgggccaacagcaaagtgaaagcgtccggaagaacatctcgaatggaaagtttcaaggacaagagcttatcaaatggattgttcttcctcgagcttcttagcacagtacagccaagggttgtgaactggaaagttgttactaaaggggaaactgatgaggacaagaagctgaatgctacgtacatcattagtgttgcaaggaagattggatgctctgtgttcctgttgccagaggacatcgtcgaggtgaatcagaagatgattctaacacttaccgctagcattatgtattggagcctacagaatcagcatcagtcacagtctgaaatgccagagcaatcagaaccatctagcatggcttcagacgcagcctctgacattgcctcggaggacggtgcttcaacgacagcaccatctgagttggatgaggtgaactcgctgtctgatagcgtatccaatttgacaacggatgatgctacttcaaacgccccatccactgaaaacggaaatggtgtggcagggtcctgatggttatagttatgcagacccagttctttttcccacacacagtgctgttttttttatacagggaacagtgcttttcatggtgctcaaagtcgtcgctaccagaagtggtttttttaatacttctgcttcatgagtatggtagcttgatagatacagcaagtgcagatagatatagatgccctttgttcatggaatctgcttagactatagggggcggggcgggaaagatagtatatgtcgctggccgggtagtttctgtatttgtggcacacgcacccatgcaaggttttacctctttatgtatcttgtcggtcaattcgttcatatgtttattggactggtcatcgcttgtaatgctgttgctgctctgaaccgtgcctgtacataacatacactcaaaagtgtttttgccttgtccctaagtttctgtttatactgcttttttattttccttctttacattggatgtgttatcatgaggtttcaatttgatttgattgccttccctccctgacggcatttcaaatcccatccaatccccgtttcatatcattccagattatcaggagccaaaacgataaaaaaaa

SEQ ID NO: 33754 - DNA, 1712 bp, Zea Mays
tagaatttttttctcgaacgcgcaggagagctgcacatctttatatattagagaagagggtcttacaagacaggactttgctgagcaaggtccaaagccaaacagaaaagataaaagtacatttcagtaacaatacccgacccaaacactctaagagcttcagttatccctaagctgctaagatagcgggcaccagccaagatccagcaggtgcacatttctctagctggagaaaagcacatgagaataacatgggttaccaatgataactctgtcccatctgtggtggactatggaactaaagaaagtacatacacaatgaaatctcaaggagaaagcacatcctacagctacttattgtatagttcaggaaaaattcatcatgttgtcatcggacctcttgaagataacactatttattactaccgatgtggagggcagggtccagaattccaatttaagaccccgccctcccaatttcctttgtcattggctgttgttggtgatcttggtcagactagttggacaacatcaaccctgaatcacattaagcagtgtgagcatgatatgcttttactccctggtgatctatcttatgctgattatatgcaacacttgtgggattccttcggcacattggtggagccacttgctagcaaccggccttggatggtgacagaaggcaaccatgagaaggagcacattccattttttgagtcaggatttcaatcttataatgcacgatggaaaatgccttatgaagagagcggatctagatcaaatttgtactactcttttgaagttgctggtgcacacatcataatgctaggttcatacacagattatgatgatagctcagatcagtatgcttggctaaaggctgatcttgccaaggttgatagaaagaggacaccctggctcattgtgttgttgcacgtaccatggtacaatagcaattgggctcatcagggtgaaggcgacagtatgatggcttcaatggagcctttgctgtacgctgctcatgtggatatggtaatagcaggtcatgtccatgcttatgaacgtgcggagcgagtctacaattccagacctgatccttgtggcgctgtccacataactatcggcgacggtgggaaccgtgaaggcttggcccgcaggtaccgtaacccgaagccagcgtggtcggtcttcagggaagcgagctttgggcacggcgagctaaagatcgtgaactccacccatgcccactggacctggcacagaaacgacgacgaagagccggtgagaaccgatgacgtgtggataaactctcttgctggttcagggtgcatccaggagggcagccgtgaccgtgagtcgaggaagatcctgatgtctccttgatgcttagcagtatagcttgggcctgcgatgtactgtgtatataatgcgtgctacttgataatctaacacctagtaaaagttaatgcgtcgtgctgcttgcctgcgtgtatactggagactggtttgatctggcgcgtttgctgctcttgttgtgttgtaccactatggatgtttgtagcaaagtgacatacgacggtgttgtaatggactgaagatgaatagatgatgttccagtaaggagtgttttgccgtgtctaggaagatacatcaaaatataaatcactccctccttatcaaaatacagttttttcttgctttcttttttttct

SEQ ID NO: 33755 - DNA, 788 bp, Zea Mays
ctgggggcagggagagatatataggttttggcccaacaacaagagcagaatgtatctgctggagaacacaggggaatttgttcgttccaacgagcttcaggagggggatttcatagtgatctactccgatgtcaagtcgggcaaatatctgatacggggcgtgaaggtaaggcccccgccggcgcaagagcaaggcagtggttccagcgggggaggcaagcacaggcccctctgtccagcaggtccagggagagccgcagccgccggtgctcctgaagacgccgtcgtcgacggggtcagcggcgcctgcaaggggaggtctccggaaggcgtgcggcgggttcggcagcagggagccggcgccatgagccagatggcggtgagcatctgaaagagcagcagactccgccatatattgatcgatcgaccaatcgatcgttagttctccaagttactattagctagctatagctcgaaacagctgaactgatgatgacgatggtaacctccgtcgtgtgtgctaagcatgtagcgtgctaggagatgatatattaaatataatcgagtagtagagccacccgctgtgtgacgctaaatttgtgtgcatggtttggtttgtgagttgggcccgtgcgtggctgtgtcatgtcgtggttaattagctatactagtcctgtctgtacatgcatggacatacctgatctctcggccattggtgtcggcgacgtgccattcggctaacaagacgacagctgcagcctgcagcaaaagctagaacattctacaca

SEQ ID NO: 33756 - DNA, 1442 bp, Zea Mays
ccggcggtgggcgcgtccgggggaggtccgccatgggcagagagcgcggcggcgggcagcagggggctgcaggcggcgacggcgaaggggggaggagggcgcgcaggctggagcgcgaccggcaggggaggagaggcgggcgcgcgcggatctggcgaagggggaagagggcgcgacgggggaggagggcgcgcaggctggtgcacgccggagatggggaggaccggtgagaggaccggcggctgcgcaggggcgggcgcgcacggatccggcgggtggtgcacgccggagatggggggcgcaacagggagggagggggaggagaggccggcgcaggggagctccggcggctgggcagggagaagcccctggcggcggctgggggccggcggcggctgggcagggagaagcccctggcggctgtagctgataagacctaaacctaaacctaatttgataccatgttggaatacgaaccccttgccctaaccagggatggggagtggtattaatagacttggtaactgggccaggcccattacagtgaggggtgagacggtaattacatggggaacaccccaaaccctagaatcctagacgggtagtctaacattgacacctctttcctggttggggatccaacaatttttgctgatttgggatgctgttagcaatattgtgttaactctggagacagatattcacacctggatgcatacttcctctggtcagttttcttctaggtcttgttacagggctttatttatgggagctattatgtttgaaccttggaagaggctttggaaatcttgggctccccctaagtgcaagtttttcttatggctggccattcggaacaaatgttggacttcagatagattggagaagagaggtctggaccacccagtgtcttgcctactctgtgatcaagagcaggaaaccatacaacatattttgtgtacatgtgtctttgcaagacagttctggcattccattctgtttggattgaatgttggtaatctctctccatttggggatgagagctcctttgctgattggtggcgaaaaacaagtaagaagatacataaaagcaagagaaagggcatgaacaacatcattattctaggggcctggtgtttatggatccaccgcaacaaagttgtctttgatggggagaccccttcgctaagctctatcagatgcgtctttcttgatgagattgggtgttggattacggctggtgccaagcatcttcagagctttggcttagagcttgcgcgtaacctttacagggtctagggagtggtgtgtgttttttgttttgagtaagcctgcttagggctttgtaccttggtccattttggacttctttttcttctctaattaaaatgatgcgcagttctcctgcgctttcgaaaaaaaaagtgctgacatgaatcttt

SEQ ID NO: 33757 - DNA, 2022 bp, Zea Mays
ctctcgcttctgttcccctatcgtcggcctccacaagcgccacgtctcgcgccctcgtccgctccccgccgatgagctgccgcgcggcgccgtggagtcgcccgtcgcacattgctggtccgcgtgtgcccaccccggcgcggccgcgcttcgcacttggaagtaggaatctgtggaagaactcatggacaattggtgctggtgtttcaaatatgtttgcgctgccatcaacactgtttagagaccacgagtgtgcattttaggtggtgggtttggtggcctgtacaccgctttaagacttgaatctcttgtgtggcccaatgataagaggcctcaggttcttctggttgatcaatctgataaatttgtatttaaacccatgttgtacgagctattgtcaggagaagtggatatctgggagatagctccatcttttacagagttgctgaaaaacactagtgttcaatttgtgagagacagtgtaaagcttctgcgcccttctgatcacttaagaagaaaacctggagaaccatgcactggtggagttgttcatctggaaagtggcactgtcattgaatatgattggctcgttctagctttaggggctgaagctaaaattgatgttgttcccggttctgctgaatatgcgcttcctttcacgacattagaggatgccttgagggttgaaagcaagttgaaaatgctagagaggaaaaggtttggtaagagttcccctactattgaggtggcaattgtgggattgggctattccggtgttgaattagctgcgactatatctgagagattaaaaaacactgggactgtaaaggcaataaatgttcaaacaaccgtatgtcccactgctccacaaggaaatcgtgacgctgctctgaaggttcttgagtctcggaatattcagcttttcttgggatattttgtgagctgcatcaaagaggctcctacatctgatgagtcaagtagcacagttacatactctgaagttgacggtgatcataggaaactaattttggaccttcaacctgctgaaagaggcctcaaagggcagaccctcgatgccgatttggtgctgtggacagtgggttcaacatctcagattccacggttacagcctcctgatgctccctatgttattcctctgaatggtcgaggacaggtggagacagaggaaacccttcaagtaaaaggccatccccggacatttgcgattggcgattcagcagctctaagggatccatcaggcaaactcctcccggccactgcacaggttgccttccaacaagcagattttgctggatggaatctctgggcggcaataaatgaccggcctctcctgccgttcaggttccagaacctcggcgagatgatgacgctcggtagaaatgatgccgcggtaacagcaagtttcattgaagggctgaccttggaaggacctctcggacatgccgctcggaagctcgtgtactgcctcagaatgcccacggatgagcaccgggtgaaggttgggatcagctggttcacaaaggctgcgatcgattcgcttgcctccgtgcaaaacgcggtaagtaacacgctcacaggctcatcatgactgtacgggttcttaggtgtatattgcctgcctgaacggaatgaaatggaggacaaatcgatgtccatcttatgtacgtaatcgaggttcttctcgactagtgtgtaccatactttttaatcatgctgctatgttcctacggtacaagagcagtgatgatttatgtaaaaacacgtgtggctatgctgatgactggcgtgaagggcttctagttgggttggttacgtgttttaagtccgggttcagtccgggttcggctttccgtgggatcaaattctatgtcgtggtaaaaaaatctctcatttattctatgccaaagcacaagtttaaagtccgatcgtggtcctgggttacggtgtgctatggtgtcgttgtgtatgaatgaaacaatgatttaggggttttcttggttt

SEQ ID NO: 33758 - DNA, 2322 bp, Zea Mays
gcgcggcgcccaccgtttccgcccgcgtcctcgcctcttctttcttcgcctcttctgcaccgcgctctcgctcgcccctccgccgcttggcctccaccctcccgctgccggctccgccgactggacttccgcccgtcgctggccgtcggcgcgcccgttcctcgcaggctgaattgatcggtggaagctgtgcattgactatttttttatctcagaatcaaagagataaattgaactgggaggctgggaatcgcgagagaagtgatgtctttcgttaggcaagcagacccatcagcatcctgtgcggagaccacttacatccacaaatttgtgccaccaggatcagttttcccagcacagagatttgtctctggcaccgacttgcttcaccacgggcctcaaccatataatgctgagggctacaagcagtctggtttcaatggcacagcgcctcatgcatttcagagcttttacaatactgatagctatgctgaatctcactttaatgaagcaccatattctcctgcaatcttcgatatatctcagcagaactctcaatctttatcggataaccaggcctctgatcttgtagagttcgatgaggatgagatgagagtaaagcttcaggagcttgagcatgctttactcgacgatggtgatgagatcttttttgacttgtcagggagcattaacgatgagtggaatgataacattaagacaaacaatgaatgggtcaatacaatgaagaatattgtgagccccgactctccaaaagaggcatcacctgagtcaagcatctgctgtcttgacaacaatgttggagaagcacggaacccgaaacagttgctttttgactgcgcagaagcgatatccgaaaatagcatcgatgaagcacagtcaatcatagcagaactacggcagaaggtggcaattcaaggagacccttctcagagacttgcggcctatctcgtggagggccttgctgccacactacagtcttcaggaaagggcatctacagggccctgaggtgcaaggaggcccctactttgtaccagctttcagccatgcagatcctctttgaaatctgcccatgcttcaggctaggcttcatggctgctaactatgctattctcgaagcctgcaaaggcgaagatgtcgtgcacatcattgactttgacatcaaccagggtagccagtacataactcttatccagttcctaaagaataacagtaacaagccacgccttttgaggataactggtgtcgatgatccagagtcagtgcacagagctgttggaggactgaatgttgttgggcagcgactagagaagcttgcagaggactgtgaggtacggtttgagttcagggcagtggctgctaacattgaagatttgactgctggaatgctaggtcgccgtcccggagaggccctcattgttaactttgcattcctgctgcaccaccttcctgatgaaagtgtctcaattatgaaccaaagggatcggcttctccgtatggtgaagggtctccgaccaaaactagtgacgttggtggagcaggacgcaaatactaacactaccccattcccttccaggttccgggaggtctatgactactattcggcactttttgattcactggatgccacccttccaagggaaagcccagatagaatgaacgtggagcgccagtgcctcgcacgggaaatcgtcaacatcttagcttgtgaaggccctgaccgtgtggaaaggtatgaagtggctgggaaatggagagctaggatggcaatggcgggctttgtgccgtccccatttaacagcggcgcggttgatggcataagatctctactgaaatcgtactgcgataagtacaggttcgagaaggtccaggacggcctccactttggctggggcgacaagacgctcgtcttctcttcggcgtggcaatagaagcttgcttgtagtattgccgatctgagcactttccagcgttttaggagcatctggtgcaagggctgtaaagagatttctgtcgccgtattgttgaagtacactcgtagctaaccttagcgtgttgcctgcctgtaggcttgtgaggtctacggtttacctagtttcttagatgaagtatgttgtgcattgtacacctactgaactacatgtagactgtagagtcgcgggtgtatttaattttgcccttcttttggaggggcagaatcacaatatgtcgacattgtttcgtgtataaagtactggatgatgatgatgctcttttgtactggtcatgagatgggataaaataacaaaaaaaatcgccaatcc

SEQ ID NO: 33759 - DNA, 4161 bp, Zea Mays
cgcggccgaaggcttcctgttccaaaccatgcgtgcctgccagcacgctggcacgcagcactgcagcagcgcaaactcccgatcagatccacagcgattcggccaagtccccagcccttctcccgccgcatcaccaccaccacctcttctctgccccctcgatctccagatcgccttcgcaattcctccgtgtagcgcccctgtcctgggcgagcacgagcgcgcgtgcgcgcccagatctgcgcggtctcgccggcgatggcgtgcattaagagcgcgcatcgggcggcgctaacggcgctggcgccggacgcgccgtacctcgccgcgggcaccatgaccggcgccgtcgacttgagcttctccgcatccgccaacatcgagatcttccgcctcgacttccagtccgactccacggacttgccgatcctcgcctccgcgccctccccggaccgcttcaaccgcctctcctggtcgcgcccaggcgccgtcgagggcgactccttcgcgctcggactcctcgctgggggcctcagcgacggctccgttgccgtgtggaacccactgagcatgatcagctccgaggggaaagcggaggacgccatggtcgcgcgccttgagaagcacaccggaccggtgtgtggactggagttcagcgagctcacgccgaatcggctcgcttctggggctgagcagggggagctttgcatctgggatctcaagaatcccgttgagccaatcgtgtacccgccactcaagagtgttgggtcccatgcccaagctgaaatctcttgtttatcctggaatcccaagtttcaacatatagttgcctcaacttcgagtaatgggatgacagttgtttgggatttaaggaaccagaaaccactgactagtttttcagattcaaatagaaggaaatgctctgtgcttcaatggaatccagatatgtccacccagctgattgttgcatcagacgatgacaactctccctcactgagagtttgggatgtgaggaagaccatttcaccagtaagagaatttgttggccattcaaaaggtgtaatcgctatgtcgtggtgcccctatgatagttcattcttgcttacatgttcaaaagacaataggacaatttgttgggacactgttagtggagagattattagtgaactacccgcaagtgctaattggaactttgaccttcactggtaccggaaaataccaggtgtcattgcagcatcctcatttgatgggaaaattggcatatacaacctagagttctctggtctttatgcgactggtgatgctgttggtgccccagtgcgtccaagggctccagctccaaaatggttgaaatgccccaccggtgcatcttttggtttcggtggtaaacttgtttctttccatccggtggcacccacccaaggtgcacaaacatctacatctgaggtgcatgtgcacaatttggtgattgagcaaagtctggtgagccgatcaactgaatttgaagctgctattcagaatggtgacaaaagttcgctgcgtgctctgtgtgaaaaaaaatcacaagaatctttatctgacgaggagagagaaacctggggcttcttaagggttatgtttgaggacggggattttgcaaggacaaaattgcttgctcatcttggcttcgaaccacctcaggcaccgcctgcaagttcaactgatgaattgagccaaacattggcagatacacttaatattgatcatgctgcagtaaccgataatgcggatgcccagtttcttattgataatggggatgattttttcaacaatcctcgaccttcagaggctagcttggctgaagaatcagtttctacaaatggtcaacagatagaacaggaagtttctggagattctgtgccatcagatccatcaattgacaaaagcattcaacatgcgttggtggttggagactacaaaggggcagttaaccagtgtcttgcttctaatcgtatggctgatgctttggttatagcccatgccggtggttctgctctctgggaaagcacaagaaaccattatctcaagaacagtatctcgccctacttaaaggttgtctctgctatggtgggcaatgatttaatgagttttgtgagtacctggccactaagttcatggaaggaaactcttgctctgctttgcacatttgcacagaaagaggagtggcatattttgtgtgacacacttgcgtctaggcttctgaatgtcggtgatacactagctgcgaccctctgttatatttgtgctggaaatattgacaaagctgttgaaatatggtcccgcaccttgaaatctgaagatggtgggaagacttatgttgatcttctccaggatttgatggaaaaaaccattacgcttgcccttgctacgggccagaagagatttagcgcgtcactgtctaagcttattgagaactacgctgaattgctggctagtcaaggtcttcttaaaactgcaatggagtatttaaaactgttgggatcagatgaacactcgcatgagctggcaattttgagagatcgaattgcatgttctacagaagagaatgataatgttagttctgtttctgaaagcacgggcactccttccccctatgtcacaaatcaaccttataccaccccagaccattctcagaatgtttaccaggtacctcaaccatacaatgtgccaagcaatacatattcagaagcttacccacaacaaggtacaggagcctatggatacaacaatgcatatcaacctcagcaaccagccaatatgtttgttccacctagcacacctcccaacactcagccaggcccttcacatgtaccagtgcctcagcaaacagtaaagacatttactcctgcgaacccagctggtctaaaaaacccgggacaatatcagcaacctaataccttaggttcccagctttacacgggcgctacgaatcaaccgtattcttctggaccatctgctccttatccaagcggacctccaacaacatttcatcagcctgtagcacctgttcaatatcagagtgctgctccaccagtatcttcttttggtccaaccacccctgtaccaggaacagtccctaaccagatgtttccccattctgctgctactaactcgacttccaggtttatgccatcgaacaatcaaagctttgctccaaggccaggtttaagtcctgtgcagccctcaagtccaacacaggtgcaggcacagccagctcctcctgcacctcccgcgactgtgcagacagctgatacgacaaaagtgtctgctgagctgagacctgttattggtacactaaccagactattcgacgagacgaccaaagccttgggaggatcacaagctactcaagcaaaaaaacgtgaaattgaggacaattcgaggaaaataggggcattattttcaaaactaaatagtggtgacatatctccaaacgtttcatcaaaactcattcagctgtgcagtgcgattgatgctagcgattttgtcaccgcgatgcacctccaggtactcttaacgacaagcgactgggacgagtgcaacttctggcttgcggcattgaagcggatgatcaagacaaggcagaatttcagaatgtaaaccttgtgtggccttctcctgcacccagttatgtacacaccttttcccgctgcttgccagaaatgatagcgtttgcggttcagaggattctccagcacagcggttgttatcatgcagcttttgctctgggcctttgattctgcctgcgagttggtgaaatcgccctgatacttccgtgctcttatatacatttcgataatagttttggtttttctgacatctactgtaaggtgacctgttgctgggttgttggttatctgaatattaattgtaagaggccacttagtctgttatagctggtggatcgcctttatcaaacaatattttttttttttgcactgagaattctgtcagttcggacattcgaagaactctagatggttaatacgagtgacagtggcttgtttttttattggtactgtcaaaaagaaatcaataaacctgtggatttttgaggtccgtattgcctgttggacgtgccgcttgtgctcttcgcagccgttgacttccggctaggatgcc

SEQ ID NO: 33760 - DNA, 947 bp, Zea Mays
atcgcccgtccacttcaatttccatctctctgggcactccggcggaacgaagaacgcccacggatccgaggaacaagccgtctttgtgggctttagatcttcgtgaggagccccagcggcaagatgatttgcctcagggtccaacctgacgataccttgcatacagttaagaaaaagattttagaaaaataccaccttgtctttgaaggagtgcagatggaggataacctcacactggctgattataacatccagcatcaatccacgcttgacctccaagaaaagatgcaaatctatgtgaaggagacgctaaaaggcctaaccatcactcttgatgttgatagcttagatactattgacatcataaaggacaagattgaatacaacgagggatttcccaagggtcggcaatgcctcatctttggcgacgaacagctagagggcaagtacaccttggcggactacaacatttgcaacgagtccacgcttctccttgtcatccacccatgtacaagtacaagtgacgcaatgcagatctttgtgaagatgcaaaacggaaagaccaccactgttagggtcgacagctcagataccgtcaacagtatcacggtgaagatctatgaaatggagggcatcccacccctagaacagcgcatcatctttcgcggcaggcgtcttgagggcagacgcaccctggcggactacggcatccagaaggaggaaaccctccatctgatgctttgcctttgtggctggtgatgagactgatgccatgcatgcatgcatggtcattcaatattactactagtggtttgttatcagtaaaaagtatcattaattatagggatgccgtgtcatttagctaaaggtctttcttaccaggagagttctgtcatcagtaaaagtttttattgtggtacgtcagtgtgtgacatcttatatcaaga

SEQ ID NO: 33761 - DNA, 4198 bp, Zea Mays
gttgcgtcacgacgacgtccacagccgtgggatcctcggcaccggtactggcctgtgcatccaccatgtcgcgcgatggggaatctttgctggagcacaaatagagaaagatggcgacgtacggccccgtccccctccgtccccgcctgcagcgacctcccggctgccgtatcctccttcgccgacgcgttcgtggactttgccgtgtccgacatcttcttcccgaccttcccctcctcctcctcgctccctcctcgcccgaagactccaaccaccttcctcccttccccatcccggctcgtcgccatcggagacctccacggggacctgcccaagtccctctccgtgctccgcctcgccggccttgtgcccccgtcttgcaccccgactccccctccgcctccggcctcctcatggcccgcggggcccaccctcgccgtccagctcggcgacatcctcaaccgcagcgacgacgagctccgcctcctatacctactccaccgcctctccctctctgccgagacacgcggaggcgcgttcctccccatcctcggcaaccacgaggtcatgaacgtctccggcgacttccgcttcgccacgccgcagggtttccacgacagggcggtgtgtgggggggtgctggcgtgcgcgggattcgcggcgtgggctgctgaggcgggcgtcgcgggagcggcgggttgctggcgcacgggcgttgcaggagcgggagcagtctacactgcctccttaatagttagtagagattgtttaaaattaaactctacgctaggactgtggacgtgtttttgccccatccgatctaaacctaatccattgccatcctatattgatataggatcatgggcaggtttagttaatccacggcgaagaaaaaaatacatgctgccaagtgccaactggcaagaaatgaagaaactgtcctctggcaagaaaagcgggaaaggcgatgggctgggccggccaggagagtcgctcgattcgcaggccaggcagatcgcggtcagatccccactgccttggcgggaagcctatcaatcctcaccccaaatcccccgctactccccgctccggctccgttcacgactacggcgacgagcaccaccctcacccccagccccacaccgcgccacgccgatgtactcccaactcgtcgacggggactccgactccgagggatccctgatctccgacatctccgcctccccgccccgcggccgttcgccctcgcccccgcccccgcccccgccgccgcccgaacaccgtcccaaccccaagcacaccgccaccgtgaaacctaagcctcccaagtccaaggcgaagcccaagcttgcagcatccgcctgcaccgccgctgtttcgccgcctcccctcccctccgccgcgctctccgacccgcacggtctcgtctcgcgcatcgccgctgctcccgcgcttgtcaccgccaccagcaccgtctcttcctcctccttccgccgtctcgtccagtcgcgcaacccctccttcgatcccgccgccgctttcagcgctccgacacccgcacccactctggcgcccaccgagatagcaaccgcagcgacagcgcagtgccctgcgccggacgcgccgccgcagaccaggcccaagcgggtgcatcccaactcggtgtcggaggtggtcccgcccgcggcggaggcagagcaaccgaagcggccgagagggggtgccgaaggaaactttgtgcggctcaacatcaatggctacggtcggaggaggacgttcaggaacgcgcaggccaggcgccctacgaaataccgctcctggcggcggcagcgacatggcggcgcaaagcctcaaggccgtggtgacgaagaaggggattttgtggctgaagctatgatagagcgggagaagaagagggcaggaggagatggtggtgtcctcgaggccgtcgaagcagcgcgagaggacccgtctgagcagaatcttgagaatttgctcagaattatctatgggtacaactctttccgcgaggggcagcttgaggcaattcagaaggttgttgcaggagagtcaactatgcttgtgctccctactggtgcgggcaagtcactatgctatcaggtacctgctatgattttgcctggactaacactggtggtaagcccgctactctccttaatggtggatcaactgatgaagctacctgcatttttgccaggtggctttcttgcaagcaatcagacaagcgatgagtttcatgagacattacaaaggttgcgtggaggggaaataaaggtgctttttgtttcccctgaaagattcttgaatgaagaatttctgctaatatttagggacgggctacaaatatccctagttgctattgatgaagctcactgcatttctgaatggtctcataattttagaccttcatatctaaggctccgtgcatcactacttcgaagaaaacttaatgttcaatctattcttgcaatgactgcaactgcgacaactcaaaccttggaggagatagtgactgtcttagaaataccatctgataacctcattaaaacatctcaaataagggacaatctgcagctgtttatcagcatgagcaataacagactgaaggatctattgctgttgttgaaggcttcaccttttgttgacatgaagagtataattgtctattgcaagtttcagggagaaactgactatgtttcaaagtacttatgtgataacaacattactgctaagagctaccacagtggacttcttatgaagaacaggaatcgtgtacaggagcttttctgctctaacaaaataagagtggttgttgcaacagtggcattcggaatgggtcttgataagagtgacgttgaaggggtgattcactatagcttgccagaaagcttagaagaatacatacaggaaactggccgtgctggaagggatggacgactgtcatattgtcatctatttcttgattcaacaacattctataaaagtcgtagtcttttgcacagtgacggtgttgacgaatatgctatgagcaaatttcttttccaggtattttcatgtgaaaattcagtggggtgcatttgctccttggttaaagagtcgacttcgcgcaagttcgatataaaagaggaggtgctcttcacagtcctaacacagctagaaattggtggtcagcaatatctccgtttacttcctcagttcagtgttacctgcaccctgtactttcacaagacgtcaccacagctgcttgcagacaaggatgtactagttagatcagttctggataagtcagagactaagggtggacattttgtcttcgacatgacaaaggtagctaatgatctgagcatcacagtgaatgaagtatttgaccatttgcaacagctaaagttctctggagaaatttcatttgaattaaaagatccagcctgcatttacgtgatcttaaagaagccagatgacttgaatgcgctttcagcagatatcacaagatggctttctgaagtagaaaactcgaagatcagtaaattggatgcgatgtttgatctagcaaactttgctgtcaagggttgccaaaggactgatggctgttctggctcccagcacactccgtgcattcaaaagaagatcatacagtactttagtaagaactactccacctcagacagtggccaatgtactcagccacaaaggggcagcccattcttgcaagctgacataaaggtgttccttaaaagcaattcgtttgcgaaattcacgccaagggccgttgctaggattatgcatggcatatcaagcccggcttttccatctgccacctggtccaagaaccacttctggggccgctatttggaggttgatttcccagtggtcatggaagctgccaaggccgagctggtcaaactcgtgggaaaaggagagtagcagtgtagtacttaccggcacggcaataggaacagttgctttcactcgatggcggtatttattcaagcgatgctgatgcggccagccaagctggtgttagcacctagaagggaatatcggagagaagagaggtagaagaagggttgaagaagaagataacagcgaggaagacgatctgatttgatatctgatagccaaaatggttcatgaccccttacagccagggtttgggtgttacttgtaaccacacgaccac

SEQ ID NO: 33762 - DNA, 841 bp, Zea Mays
cgagcgcgttcctgccccgccacagccgaagctcccagcgtcctcctgcaggccgagctgaaggttcagcgcgccggtggagttcgacgacgaaactccgtcacgtcatacctctccacctcccgtcttccagacgtctccaatcgaggctcccagcgtctcggagaagaggagcagcacgacacggcggctgtggcgaggaaggctcctgtcccatcccaacccagttagcagccgtccaaggaggaggagatccaatcggcgtgcgggcgtccgcggtccatccatcgatccaattccaatctgcaggtgttggttcgatatttggcacggagtgcgagaagcgtgggatgctcatcagggtggctggggacaacatcatgctgtcacccccgctgatcatgactcccaatgaagtcgaagaaatcataagcaaattcggcgatgctctgaaggctacagaggaacggattggagaactgaaatccaggaagaattagccgatgctactggttgtaacgacgacatgcaattgaaaatgacaattgatcttttttatgggcgaagtgttgaagatggctttggtgaaggaaatgtcttgttagcatcaagtaagtggcgacatcacaacccctacaagcttgtgccttaaaacaaaaggatacaagaagttggagtgcttttgtgaaagcttttgcgaatcacttgaaacgttagtacttttgtgaatgattttgtaaagtgtttgcaaatatgtgcaaaacataataacatgtgtaggttttgtgaatgattttgttgtggtgcctgttgatggtttatgtatgtggatctatcatgg

SEQ ID NO: 33763 - DNA, 2643 bp, Zea Mays
tcttcatcttcctcgcaacgccgacgctgcaacttccgctccctccccgactcgcgctcggcacgcaggcaggcgactgcggtggcgctcaggctcgggctctcagcaacggcggggcagtcccagactcagcggctccctctctccaatcgccttgcgccctcgctccgttcctctgctcaccggccgattctgcgtgcgcgcctcccgctcccctatcgcctcggtcgaacgtcgacggcgcccggccccggcggctgcattgcgctgcttgcggccggcgggtagcgggagccagcaggctctgctcccccaaggcggccgcgccgctttgttcttggtccagatgttagttgcagaggtgctcagagctggagcgtacatctctaggttttctcggcgtgcatgcaaagttgcaatattttccagcatagcttgctcacctacttctcaatttagaagacttcaatttctggatctgagcatcaaatcaagaccataccactttagtcagtcctgtctgatggcactggctgcagctccagccagtggtgattcacagagtggtcctcagaggaactatcaggttgttgtggctgccactcgtgacatgggcattggcaagggtggggtcatgccatggaagcttcttggtgatcttaaattcttcaaagaacttacactaactacaactgatcctgccaaaaagaatgcagttataatgggaaggaaaacatgggagagcattcctgttaagtcaaggccactgcctggtcgtttgaatgtcatacttactcgatctggtagttttgattttgcaacagtagagaatgttgttatatgtggaagtatgaagtctgccttagagctgctagcatcaactccatactgcttatcaattgagaaagtttttgtcataggaggtgggcaggtactgagagaatatttgaatggacctgcatgtgaggctatccatctgactgatattcagtcaagcattgagtgtgatactttcatccctccagttgacttttcagtgttccagccatggtattcatctttcccagtggtagagagcaacattaggcattcttttgtgacttttgttcgtgttagaaagtcagtggcagaaactcatgagtcaaatggcaaggaatcaactgagattgataccaagaatgacaaatttgaaatagagaatttctcttttctccccaagatagtatatgaccgccatgaggagtatcaatatctcaatcttgttgaagatattataaggttcggtgctcagaaaaatgacaggacaggaactggaacattgtcaaaatttgggtgtcagatgcgattcaacttaaggaaaaattttcctctgctgacaacaaagagggtgttttggcgtggtgttgtcgaagaactcctttggttcatcagtggctcaacaaatgcaaaggttttgcaagaaaagggtattcatatctgggatggcaatgcttcaagagagtatcttgaccgtattggcttggcacacagggaggaaggtgatctaggtccagtttatggatttcaatggcgacactttggtgccgaatatactgacatgcatgctgactatactggaaaaggctttgatcagctaatggatgtgattgacaagattaagaacaatcctgatgaccgccgaataattttatcggcgtggaatccttcagatctcaagaagatggctcttcctccttgccacatgtttgcacaattttatgtggagaacggggagctatcctgccagatgtatcaacgctctgcagacatggggcttggtgttccattcaacatcgcatcatattctcttttgacatatatgattgctcaagtttgtgatctttctccaggagattttgtccatgttataggggatgctcatgtctatagaaatcacgttcgagctctggaggaacagattcagaagatgcctaaaccatttccaattttgaagataaatccttcgaaaaaggatatagattctttcatggcgtcagacttcaagctggttggctatgatcctcaccagaagctagagatgaaaatggcagtgtaacggtggcttagctctggagcccccagccttggaacctcggtgggtgaaatcagtcgaacgaactggtactacataaaaaatgaaccggacatcgcactagcttgtttttggtgatggtgctgaatgttgtgcgggaggcgttttcccccgttattagtagcgatctgcgtgctatatatggtcgctgaagtcaaaattggctctcttttattttttatctactactactactcatttgcgagtgagagatggtctgggcacaccattcaattgcaacggcctactggtgtgttgccccccaatgagggctgtgacgattgcgccactacctcgtgagaaacatgatgtgaccgaaattgctgtgtacctgcatggtagaacaacgcactctttggtatctggttgccttaatacgtgacctggttaattcagtttccagtttggatgggcacaagatagcgatttgctgtggcgttttagttgttgttgctgtgctgggggcagaaagtctagtgccgtgcttgacgaagacggggtcaaagcgcttg

SEQ ID NO: 33764 - DNA, 1274 bp, Zea Mays
attactgaatagtttagaccgagtttgtagaacttctccatctgtctatggtgtatcacttccatggtatgattgatatgctcataaactgtggatatgagaaagggaccacactatttggatatggttatgattttcgccaaagcaacaggatagacaaagcgatggctggtttgagagcaaaacttgagacagcttataagacctctggagggaaaaaagttaatttaatctcacattctatgggtggattgctagtacgctgcttcatgtctatgaatcatgatgtattcactaagtatgtcaacaaatggatttgcattgcttgtccattccaaggtgcccccggatgcatcaatgattctctacttactggattgcaatttgtttatggttttgagagcttctttttcgtatctagatgggcaatgcaccaattgcttgtcgaatgcccatcaatctatgaaatgttaccgaatccagaattcaagtggaaggaaaaaccaattattcaggtttggcgtaagaaccctgaaaaggatggaactgtggagcttgttcaatatgaagcaactgattgtgtgtccttgttcgaagaagctttaaggaataatgagctcacgtataacggaaagaaagtagcactaccattcaatatgtcagtcttcaaatgggccaccaagactcgccaaatcctagacaatgctgaattaccagatactgtgagcttttacaatatatacgggacatcttatgaaactccatacgatgtatggcttataggttgtcaatgtataaagttcaaggctgatgggttctctgcgaaagaaagagttggcgtcaaggccgaccaccgtggcctgctgtccgatgagaacgtattcaagcttctcaagaaatggctcggtgtgagcgagaagaagtcagagtggcgttgcgtgtctaaatcctactccaaagtgggtaattgggttgccctgtagttcttcaggaagactgttattttggcctttcctcctgaagagaagatgaaacaaaattctggtgattgtattgtatgtctgcacgatgtaaatccctgcgagctgcacggaacaagggattagtgccccttgtacgatgtatcattgccagacatttcttttgaagcctagggtcatatattcattgccccttccaactttggagcatagtaaatgaataatatgaaatcgatcataatttcagaagtgttctgtatttggattagaatgttaatttgcccataacggtgg

SEQ ID NO: 33765 - DNA, 2074 bp, Zea Mays
  misc_feature (2073)..(2074): n is a, c, g, or t
aaaaacccacgtcgcggttgcgggcgcacccgcaccgcacgcccccacatttcccgcgccaaccgaccaggcgaacggcggccacgcccacgccatgggcaagcccaagcagcaagtgctctcccgcttcttctcccccaagcccgcgcccgtgctctcgtccgccgcccccgacccgccgcctccgcttcctcccaaccccaaaccctccgcggcgcatccgcccgtctctaccgtcgcctccttctcccccgctaaacgcgcgcgcgcgctctcactctcccccaaatcccccgccgccaaacggcccaatcccacccctcctccttcccgagacgccgtccgccgcaggctcctggagccgctccaccaggagccgcctcgcctcctggaccctacaggtggcggcaagggctacaccccgctggagcagcaggtggtcgacctcaaagcccgccaccccgacgttctcctcatggtcgaggtgggctaccgcttccgcttcttcggcgaggacgccgccgtcgccgccgcggtgctcggcatcgtcgcgcacccggaccgcagcttcctcaccgccagcgtccccaacttccgcctcggcttccacgtccgccgcctcgttgccgcgggccacaaggtcggggtcgtgcgccagaccgagaccgccgccatcaaggccgcggccaggggcgtcggaggcgccccgttctcgcggggcttgtccgcggtctacacgcgcgccacgatcgaggccgcggcaggcgagctggagggtggcggcgccgccgcgcccgaggaggggagcagctaccttgtctgcatcgtggataaggaggtggaggcggcggggagggaggggctccaagtgaaggttgggttggtggcgattgaggtgtccacgggtgaggttgtccacggggagttcctggacagcgactccaggagcggactcgaagctttgctgcttggattggcgcccgtggaggtcatcctcgggacaccactctcttttgccacagagaagattatgatggcatatgtgggacccacctctaatgtgcgggttgagcgtgtatcatgtgaatggtttggcaaagatgctgctttggctgaactgataactttatttgaaaagtctgtaaacaatgcttctagggctgaagatgataggaagctgatagaaacaaatgatgataacaacaattttcatgggattgagggtatcatggcgatgccagagctagttgttcaagcattagcattatcggttcggtatctcaaagaattttccttatcagcaaatgctcttcaacaacttgaggtattcaggaacaactcagatggtacaacagaagggtctctgttccaaattatgaacaatacatgcacatcttttgggtctagattgcttagaaactggttaacacgtcccttatgcaatagacatctgatttgtgctcgtcacgatgcggtatctgagatttttgaatcaatgggaccacaacattcagttaacaatctgcaggatggaggggatagatcctgcacagcttcagtgcttagtgatttgtgtattgtcctttcgtcagttttggcattgctgggaaggtcacctgacattcaaagaggaataagtaggatttttcattgcaaagctacagctaaagagtttgttggcgttatccagtctatcctcacatctgggaagcagctacagaagcttgttcttgaggatattggcattgtctcgtctccgcataaatctgtgcactcccctttgctaagaaggctaataaatacagcttcatcatccaccatacttaatagtgctgtgaaacttctgtcttgtcttaacaaagatgcggctgatcaaggagatatgctaaacctgttcattgcatctgtggatcagttcccagaggttgcagaaggtcatgtaaatgtaaaaatggctgaacataaacttgatttgttgattgtggagtaccggaagcaatttgctatgcacaacttggagtttaaaactgtagctggaaccacccatttaatcgaactaccagtagatagaann

SEQ ID NO: 33766 - DNA, 584 bp, Zea Mays
accccgagagctcgggaaatcaccctgtgattcaaaaaacgaccttctggcgctatataaatgaagtcggggttccgttcttccccttcatatcctcctgaccacgccaccaagcgcaggaaatcgagaaaagcagtgccacggaggggagatccatgtcgctgtcgtggccggcggtatgaaccaccgttcggggtcctgtgaggggtctgggtgacccatcctatcctggcggagattactgtggcatctacgggaggattgggctccgtgatccgactgaattgctcgccggaatagcatacccgccatggttcgacctgcgcgcgtgggcagcatccttcgcacccttgacgttggtgagaatccccatcatagtacttgcctcgctctttggatcacaggagaccttttgatttgaagtttagggtcctggggtgctggaccatgtgtcaccggtggggtctccgccgtgggatcctagcggcgcggccgtgttcgttcgtctggggtagaagacaactctagagccgttgatctctcgttttgcggtcgagattagatcaaacatatcctttcgcttc

SEQ ID NO: 33767 - DNA, 868 bp, Zea Mays
acttatctcattccacaaagatgggtggttgagaatcaggttggcaagaagacccttgctattgatgattgtgattccagacaatctgtctatgtgtatggatgcaaggattctgtccttcaagtaaacggcaaggttaacaatatcactgttgacaaatgcactaagtttggaattgtattcaaggatgttgtagcagcttttgagattgtcaactgcaatggcgttgaggtccaatgtcagggtacgtcaccgacaatatcaatcgacaacacatctggatgtcaattatacttaagcaaagattcgctgggagcttcaattacttctgccaaatctagcgaaatcaatgtgatggttccaagtggtggcgctgatggtgattgggtggagcatgcattgcctcaacagtacatccatagtttcaaggatgggcagttcaccacttcaccagtttcacactcaggagcgtgaatacaattgttactgctgttgtttttgaggtttgtaaacagttttgggtcttgcagcactggactcggtctgcgattgttgttttttgttgcccttgctcagtccgcggtgtgtatgtcctgcatgcacgtggttcctttctgttggtgtttttgtgtgccaacaaaccaccaaacttggtttgtatgtctttagctgatcattctttgacactgaatctcattatatttgtattcatttggacgcttgcttttttcgagtctcttttcagattcctttaacaaagtgacaatggcaaatgctgttatcgtactttaaatctcgacgctgtgcttggatcgtgaaacacgtactagaatacgagaggtggcgcaatacattaggcagaaaaaag

SEQ ID NO: 33768 - DNA, 807 bp, Zea Mays
aaaaatatcaacattgtgttggcaatcttgtagtgataatcttattcatgaacaatgattaccttcttgccacgttggtatgcaagaagttgacatgtcggtacatagatcagttagtaaagaatttgctatttggctaacatatatgcttctctcgaatacttgagttaattggtaattgtttgacaacttgaatggtagtacaagcaatgaagaacttggcatgttggtccataagagtcctcaagatcgatgtaattggttgccatgttggtctgcacagctcctctcatgcatcggaccaatgtaaaaaaacccttaattatagcatacagtagaagccgatggatcgaaaggcgttgcaaacagagtagatagaccggcggcggcgaatcaaataaataataaaaaaaaaacaaacgaactaatttaaacgaaggaaacatggatggatcgaagcgaaacctggaggcgctaagtggagaattccaaagggattgcactgactgatctgcttgtcctcgggcacgtacgtacgtcggcgtcgatcggcaggttagatcaatgcgatccctttggagtcctccactagcttcctgctagtaggcggcataggggggacgacggcaggagagctagctatatagatgccatgccattgatgggacgacggggagagcgaggagaggtccatgccaatgccagctggttaattccggcgatggctgttgcttgctttgcgctctcgctttcgacgtacacgtgggcccgcccggtcccggggtggggtgtgggaggagagacacg

SEQ ID NO: 33769 - DNA, 485 bp, Zea Mays
atgtccgaatcgacttggagcagggatttcgacgaggctatccggtttgaaccattcatcgaacaccaggtgtgtgtcattctccccaaaatcaatatccggcaagaacatcggtgtcgatcttcccaacacgcgacgagcactggtccactcattttgctgaacggggagctgcaggggcgcatagccagcgggcacgaggaaacgacgatagcgggaagtgagctcgcggcgcggcacgacgtgactgtggttttccgtgaactcggcaatcacgatgtgaggagcaggagaacggctggggcgagcccaacagagaacagcagggcgagcgacgccagggagctcggcacggtggagcacgcgaccaaggagtggtggggaattgactatgagataaagaatcatgggatccacatttcccaacatggtgaaggatacagagcactcattccagagttgctttgagccgtggtggatctcta

SEQ ID NO: 33770 - DNA, 1254 bp, Zea Mays
acataatctatttaaagatagtggacatcttcagtagcagctgccgtggccaccataagaatcctccttcagagccatatgtccttgaggttggggttttgcaagattatgttggaagtggaggctgtgtgcaaggcgtgacagcgtgtcgtggtcaaggaccctaagctctagcgccaaattcatatcacatttgttctagaatgagatcatgaatggtccctggggttggcctggttcacgctccattctcagtgcgttttccgacatcgttcttcaagcaagcatgcgagctggctcctattttcactgagcttgtggattgtgtgagcttagatggggagtccttgcaagctgctttgtctagaacaaagcaggttcatgaatttaccgcaaggctgctagatattcatgataagatgatgttgataaataataaagaggatatacgcttaatattgcaccggtcggactatatgttggattctgaaatcaattcactgcttcaaattgaaaactctaggagctatattttgccaccaacgctgcaactttctgttgttccatcaggtggttggcaatgcagtgatgctcggtgaaatcataaactacgtgcagtccctacaatgacaagttgagtttatgtccatgaaactggccaccgtgaatccccaggtggacttaaatagcctgcctaacgtcctccctaaagatgtacatcagtcttgtggtccgccacatttctcgctggagacctcagacgcttcgttgtcgtacctcagccagcctcaccatggaagccctcttggctgcatggacaaccagagttgtatgcatccacttgacacgacgttttgcctggcgataaatccgcagtatcatttcctcaacggtgttagcgatgcatcgtctcagctaatttgatgcttgtgtttatggaaaccaagaggtggcgctgatccattggaaacctggttgtgtatgaatgggtttccagctacttctattcttggagatagaaaccaacatgtttggtttttgtttttattcgctttagaacaactcatttttgtacgaaaagaggcatttagctataattgtttgttgtagtatgtttaccgcaggatagccgttccatgaaatacataaaaacctgatactgttgttatatttggtttagtcatgctcttatggaacctttaatgaggatttttctatatcaagatatcatcgtcatcgtcattattattgcat

SEQ ID NO: 33771 - DNA, 1863 bp, Zea Mays
cacgcagtcacgccctccgcaaaactcccccactccacgcccggccgcacctctcctatcttgctccaagcagcaagttccaactcgagtagattcacttcgccactccgttgccctctcctccgccgcccgatcctttccccgtctgagatggcatctccggcatcggcgtcgcttaaggaagccgtgggcagcctcgaccgcgacggctttgttggtctcctctccaacctcatcggcgagaccgcacacctgcagaacgacccgccgacctacaggcctcaggaggagcgcgtggcgcagcacgtagtcgacgtgctccgcccggtgtccgcggacaccgggggcggccccctccttgtgcggaagataagctacgccgagggcaggagcaacgtcatcgttgaataccccggcaccgtcccaggccgcgttgtctccttcgtcggcatgcacatggacgtcgtccctgccaacggcagcgacgaggataaggacaaacttcggggacgtgggacaaccgactgtcttggacatgtcgcactggtggctcagctaatgcggcggcttggtgaggtcaagccacccctgaaacattctgtcattgctgtgttcattgccaatgaggagaactcatctgtcactggcattggtgttgatggcctcgtgaaggatggattacttgacaagctcaaaacaggacccttgttttggatagatacagctgataagcagccatgcattggcactggtggaatgattccatggcatctcaaggcaacagggaagctgttccacagtggccttgcacataaggccataaatgcaatggagatgaacatggaagcactaaaggtaatccaaaaacggttttacactgacttccctccacatgagaaagagaaggtctataaatttgctactccatctacaatgaagccaactaaatggagctatcctggcggggggcttaatcaaattccgggagaatgcacaatttcaggggatgtaaggttgactcctttctatagcacttcgcatgtcatggagaagttgaaggaatatgtagaggacatcaatgagagatttgaaacagtacttgatactcgtggtcctgtgtccaaatatattcttcctgatgaaaatctacaaggaaggcttgaaatcacttttgatggagatgtgatgaatggggtggcttgcaatctggagtctcgaggctatcatgcattatgcaaagcaaccaaggaaatagttggccacgtggagccatattccatcaccgggagtctacctctaatccgggaattacaggacgagggatttgatgttcaaacagctggatatggcttactgaagacgtaccatgcgaagaacgagtactgtctgttttcagacatggcccagggctttcaggtgtttctgagcatcatttcacagctggaagaagaggtctgagccttcttgatgggatagaccaatactccctccgtttcgttttagttgtcgctggatagtgcaaaattgaactatccagcgacaactaaaaagaaacggagggagtacctccaatttacattactcgttgctcagtgatctgtttaatacctccaatttacatcactggttgctcagttgtctgtttacaactcttttcaagattccgggacacggacatctaacaagccttcgaggttgtctgtcacccgttgaaaacggagccatttcaccgcagtgttctcgtgggcataaaacctttgtgctacaacttggcataaaatctttgtgctacaactctacgtaggcattacaactcgttgtatgaacttgaaattaatatatctcccatttccaaaaaaaaaa

SEQ ID NO: 33772 - DNA, 1831 bp, Zea Mays
cctgcatccgtgcggccgtgcgtgcgtcaacgccagtcagtacgtcgctgcctttcctctcccgactcccgttcaccacactactttccctcgtgcggccgccgccctacaacaggtgccccaggtcttcgctgcgccattcgccagcgacgagcacccaacaggctcagaaacatcgctgacatccacatgcaccacagtagttcagtagagtagctgttggaacccacacaccggcgatggcaactgctcctgtgacatcctccatggctacgaactccacctgtgtgcggctgcctagcatgcccctgaggcgtgcacccgccatcgtctcctttgcctctcgtccatggtcaaccgcaatgacctcatgtactggattgtcgcggcactctgatgtggttgccgccgcggggcaccagaagttgatggggtctttgaacaacaacgagggactcatgtttggggtggttgtggcacggttcaacgaggtcgtgacaaatttgttactacagggtgccctggaaactttcgagcgatactctgttaaagcagaaaatataacagttgttagtgttcctggaagctttgaagttcctataacggcacaaaagcttgggaaatctggaaaatttgatgcaattctgtgcattggagctgtgattagaggtgacacaacccactatgatgccgttgcaaactcagctgcatcaggtgtactcaatgctggattatctgctggtatgttgttttctgttcttccctatcatgtgtcatgcagtactgggtaattctaggtacgttcattttcttctatttttaagtgttaaaaaggtggtctagcaagttgaaatattgaactcttaaacatattcccacaggtattgaaacttgttttatatgtttcattgttgtttctcagcgaatatgcatatataagtacaatggcaaaaaaaagtcacaagcatgttggggtagactaaaattttgccagtacagcttacagaaatctacaatagttaatgcgagcaactagtgtgggactggaaggttttggttatatgagagaattgtatagttggtgctataaaagtacttcacaacattaagtgaaactttgcagtgtgctcatcttgttttttctttatgatggttaattcagttaataataaaaattcagattattttggcttttaatggtgatacaggtgttccttgtgtatttggtgttctaacctgtgaagacatggatcaggtacttcatggtttgattatgtacatctttaatccagaatggccacattagcgaagctgaggtttcacacaagtattcccttgtgacgagaaagtttcatgtcaataatgtgacctctttttttgttggttatctggctacttttcaagacctgatcactgttttgctccttatcgaaatcctgctgagaatgctaaatcgcatactgcaggcactgaaccgtgctggtggcaaggctggaaacaaaggagctgaagctgctcttactgccattgagatggcctcgctgttccggcatcacttaggctgacaccttgtgtattctgattttctatacacgaggcggcagcatttcctcctatcaagagttttggctaatagagagcttttccgccgcggctagtataatttatttccaagtttgttggtccggtgcggattggttgctttccttctgagacctgaaaagctcacaagacatgtctgtaaacctgacatcgtgaataattgtctccacgaacgaaatatggtcatgaataaagctgcacaagtgttttgttacgtatgattatcatg

SEQ ID NO: 33773 - DNA, 5153 bp, Zea Mays
ggtcgcgccgctgcctgccccgtcccgtttcggtgtcgtctctcgccggccacgccaccgcccgccaagccaatcaagggcctggagttgaagcacgaatcatcgaagcgcagcaaaactgagacacacgtcttacttcttcacaagttcttggacgatggacatcttcgggagcccattctgctccaagcaagccgtcgcctcatgcggcggatggacggacatactcgactcctccagctgcacgaaccatatcctggaaaccggcaccgccgctctgatcaccgtcgctctcgcgctgcacctcctcgtcgtcaggattactacgaagaccagagcgtccgcacgccgcccccctgtcgcgcccggcctgccgctgcagctggccggcgcggcgttcaccgcctgcttgggcctcgtctacctcggcctcgcgtcgtggatgctggggagcaacttcactcagcacgcttccgcttacctcccacactggtgggtgacggcactgtcccagggactctgcttggtcctcgccggcttcgctctcagcggcgtcggaggagcacgtctcctcgggccaatgtctgcgcgcgcgtggtcggctctgctggccgcgtacgccgcgttcgtcgcttgttcctcggtcgttcacatggttgcggatagggcactgaccatgaagggttttctggacgctctgttcctgccaggtgcactgctgcttgtctgtggcgcttggtgcgtcaaggaagaggacggtgatggcggaactggaactgctgcttctttgtataagcccttgaagactgacgacactgttgatgatgagaggggtgggtctgagagccatgtgaccccgttcgctaaagccggggttttcagcgtgatgtcgttctggtggatgaacccgatgatgaagacgggctacgagaagccgctcgaggagaaagacatgccgctcttgggtccctcggaccgagcgtacagccagtacctggtgttcctggagaagctcaacaggaagaagcagctgcgggcacacggcaacccgtcgatgttttggaccatcgtttcttgccagaaaactgggatcttggtctcgggtctctttgcactgctcaaggttctcacgctgtcttcgggcccggtgcttctgaaagcattcatcaacgtctcgctcgggaaagggtccttcaagtacgaaggctacgtgttggccgtagcgatgttcctctgcaaatgctgcgaatctctgtcgcagaggcagtggtacttccgcacgcggaggctagggctccaggtgcggtcgttcctgtcggccgccgtctacaagaagcatcagaggctgtccaactcggcgaagctgaagcactcttccggcgagatcatgaactacgtcaccgtcgacgcctaccggatcggcgagttcccgtactggttccaccagacgtggacgacgagcgtccagctctgcatcgctctagcgatcctgtacgacgcggtcggcctcgccacggtcgcggcgctggccgtcatcatcgccaccgtggtctgcaacgcgccgctggccaagctgcagcacaagttccagagcaggcttatggaggcgcaggacgtgaggttgaaggcgatgtcggagtccttggttcacatgaaggtcctgaagctttacgcgtgggagacccacttcaagaaggtcatcgaggggctgagggaggtcgagatcaaatggctgtcggcgttccagcttaggaaagcgtacaacagcttcctgttctggacgtcgcctatcttggtctcggctgcgaccttcctggcatgctatcttctgaagatccctcttgatgccagcaacgtcttcacttttgtggccaccctgcgcctcgttcaggatccgattcggcagataccagacgtgatcggagttgtgattcaggcgaaagttgccttcaccaggataaccaagttccttgacgcgcctgagctgagtggacaggtcaggaagaaaagctgtctgggggatgagtatccgatagtgatgaattgctgcagtttctcgtgggacgagaacccgtcgaaaccagctctaaagaatgtaaatctggtggtcaaaactggacagaaggttgcaatatgcggcgaggtaggatcaggaaagtctacactgctggctgcagttcttggagaggttccgaaaactgaaggcacgatccaagtttgcgggaaaacagcatatgtttctcagaacgcatggatccaaacaggaaccgtgcaggacaacattctctttgggtcttcgatggacaggcaaaggtaccaggaaacactcgagcggtgttctttagtgaaggatcttgagatgttgccgtatggagaccgtactcagatcggcgagcggggcataaatcttagcggcggtcagaagcagcgtgttcagcttgctcgtgcattgtaccagaatgcagacatctatctccttgatgaccctttcagcgctgttgatgcccacacagcaacgagtctgtttaatggatatgtcatgggagctctgtcagacaagactgttcttttggtgacccaccaagttgattttctgcctgtattcgattctattctgttaatgtcagatggtcaaattattcgttctgcatcttatcatgatctattggcatattgtcaagaatttcagaaccttgtaaatgcccataaagacactattggtgtttcagatcttaacagggtgcctccccatagagaaaatgaaatattgatcaaggagacaattgatgttcatggaagcagatacaaagagtctttgaagccatcaccaacagatcaactgattaagacagaagaaagagaaatgggtgatactggtctcaagccttatattctctacctgcgtcagaataaaggcttcttctatgcttctctgggtattatttcccatatagttttcgtatgtggccaaatatcacagaattcatggatggctactaatgtcgagaatcctgatgttagtactcttaagttgacttctgtgtacattgcaattggaatcttctcggtgttcttcttgctatttagatcattagcagttgttgttcttggggtcaagacatcaagatccttattttctcagttactaaactcattattccgtgcaccaatgtccttttatgattctacccctcttggaagaatacttagccgggtttcttcagatctgagtattgttgaccttgatattccgtttggcttcatgtttagcattggtgctggcataaatgcatatagcaatctaggagtattggctgttgttacatggcaagttctgttcgtctctgtgccaatgattgttttggcaatcaggttgcagaggtattatttagcctcatctaaggaattgatgaggatcaatggcactaccaaatctgctctcgctaatcacttgggcgagtcgattgcaggggctataacaataagggcttttcaggaagaagatcgtttctttgagaaaaacttggaacttgttgacaagaatgctggtccatatttctataattttgcagcaactgaatggctcattcaacgtttggagaccatgagtgctgcagttctttctttttctgcccttatcatggctcttcttcctcaaggaacttttaaccctggctttgtaggaatggcattatcttatggtctatccctgaatatatcctttgttttctctatccaaaaccaatgccagctagctagtcaaatcatctctgtggaaagggttcatcagtacatggacataccaagtgaagcagcagagattattgaagaaaatcgaccagcaccagactggccccaagttggcagggtggaccttaaagatttgaagattagatacagacaagatgctcctcttgtattacatggaatcacctgcagtttccacggtggagataagatcggtatagttgggcgaacaggaagtggaaagacaactttaattggtgcactgtttcgtcttgttgagccaactggagggaaaataattatagactctatagacatcaccacaataggcttacatgacctgcgttcacgtttgggtatcattccgcaagatccgacactctttcaaggaaccataagatataatctagaccctcttgggcaattctctgatcaacaaatatgggaggttctaggcaaatgtcagcttcttgaagctgtccaggagaaggagcagggattggactcacttgttgtggaagatggttcgaactggagcatgggtcaaaggcagctcttttgtttgggacgtgcacttctaagaagatgccgtatcttagttcttgatgaggccacggcatctatagacaacgctactgatgctatccttcagaagacgatcaggacagagtttagagattgcactgtcatcactgtcgcacaccgtatacccaccgttatggactgcgatatggtacttgcaatgagtgacgggaaagtagtggagtacgacaagcctacaaagctcgtggaaaccgaaggatctctcttccgtgatcttgtcaaggagtactggtcatacacatcgaattgaaatatctaggagaaactgtgacaatcacatgttcactcgttgcagtctcttaaaaaagagataacaggagcctgttctcacacacatccgatgaactattctatctcaagtccgaagtagaggtgtcaggcattgtcgggaagtgctttttgttaactagttgaacagggggaaacctgtcgtcccttaaaaaaaaggaaacctccagcgtttttttgctccgatattgagcgaataaaccgaaatatctagtggaaggcgcatcaagtatgcatccttgatactgcatgttcacagaaatgcttgtgcggcaggctgttccaaggctttaaactttatggtgctttacattcctaataaaccgaattgtgtatatgatgtttgggaaaatggtgatttttcaggtttcagctccctctcttgctcacgtttaatgtattatcagtgtaaattcatccgtgattggatttaaggcaaccaatttgttggtacgtagctctgttttcacagcgtgtgcccttcaaacttataactcttgggctccctcatatcc

SEQ ID NO: 33774 - DNA, 3330 bp, Zea Mays
ttcctccccacggtaacctcaccgccggcttcaagccgagcaaaagacacgcacccgcgaccgcgaccgcgacgagcgaagtgagagaggggaaggcgaggagaccactgcaccagcaccaccaccaccgtgccgcgagcgaagtgacgtcgcgttcacttccctcataaaatctcgccccccactctctctctacccgagcccagcagtaatttttttttggggaaggtgaagcgagaggagcaggaggagagaaaggggaacgaggccggccgcgaatcggaggggaattcggggggcggggctcggtccggccggaaattcgcgcgattcgggcgcgggcgccgcggatgtgaagatctggtgctcggcgggatgacttcttcggcggcggccgcggctgctgccgcccaggtggcgggaggaggtggaggcggcgagggagatgccgccgctgcggcgcgaggcggaacggaggacggcatgtacacggagctgtggaacctctgcgccggcccgctggtcacggtgcccagggtcggggacaaggtgtactacttcccgcagggccatatcgagcaggtggaggcgtcgaccaaccaggtggctgagcagcacatgcaattttacgatctcccgtggaagatcctgtgtgaggtcatgaacgttgaattgaaggctgagccagacaatgatgaggtttatgcccagctcactctgctacctgaatcaaagccagaggagaatggctctagtgaggagatgcctgcttcacctcctgctgcacttgcaaggccacgcgtgcactccttctgcaagacattgacagcctctgataccagcactcatggtggattctcggtgctgcggcgccatgcagatgagtgtcttccgccactggatatgacccgtcaacctccaacacaagagcttgtagccaaggacctgcatggtgtggaatggcgctttcgccacatattcagaggtcaaccacgaaggcatcttttgcagagtggctggagtgtttttgttagtgccaaacgtcttgttgctggcgatgccttcatctttctaagaggtgatagtggggagcttcgtgtaggagtcaggcgtgccatgaggcagcaagcaaatgttccgtcttcagtaatatcaagccacagcatgcatcttggtgttcttgctacagcatggcatgctgttaacactgggaccatgtttactgtctactacaagcctaggacaagtccagctgagtttgttgttccctgtgatcgctatatggaatcactgaaacgaaattaccctatagggatgagatttaaaatgaggtttgaaggtgaagaggctccagaacaaaggttcactgggaccattgttggaaatgtggatcctgatcaagctggatgggctgaatctaaatggcgttacctcaaggtgaggtgggatgaagcttcctccattccacgtcctgaaagggtttctccctggcaaatagaacctgcagtcagccctccccctatcaacccacttccagtgcacagacccaagagacctcgctctaatgctgtagcttctctgcccgagtcttcagctccaacaaaagaagctgctccaaaggtcacattagagactcaacaacatgccctgcaaaggcccttgcagacccaggataatgtggccccgaaaagtgtttttggtgataacagtgaattggactctgctcataagtcctccctgcgaccgtcaggttttgatctggacaagagcaccattggcatgcagaggaagctgggttcagatatttggatgcgaatgaacagacctgatggttacagtgaaatgttatcgggatatcaaccacctaatgaaggtgcacggaattcgcagggtttctgttctttacctgatcagattgccgctggacgtcctaatttctggcacactgtaaacgctcattaccaagaccagcaaggcaatcacaatctgttccctggttcatggtccatgatgccttcaagtactggctttgggatgaacagacagagctatccaatgatccaggaagtcggtgggatgtctcagagttgtacaaacaccaagtttgggaatggagtttatgctgcactacctggccgaggcattgatcgatacccatctggatggtttgggcacacgacacccggtggtcgcgtggacgatgcccagccacgcgtgattaagcctcaacctttggtccttgctcacggcgaagctctgaaaatgaagggcaactcgtgcaagctttttggaatccatctcgacagcccagccaaatctgaacctttgaagtctccgccaagcgttgccacaccggcagctgagaagtggatggcagacggaatcgacgcagacaaaagccctgagccgcacaagacgccaaagcaactcggtgctacacaggtggatcctgtcccagagagatgcccacaagcttcaaggggcacacagtgcaaatcacaaggcgggtcgactaggagctgcaagaaggtccacaagcaaggaatggcgctgggcaggtccgtggaccttaccaagttcaacggctacacggagctggtggcggagctggacgagatgttcgacttcaacggcgagctgaaaggctgtagcaaggagtggatggtcgtgtacaccgactacgaaggcgacatgatgctggtcggggacgacccctggaatgagttctgcagcatggtgcacaagatcttcgtgtacacgagggaggaggtccagcgcatgaacccgggcgccctgaactcgaggccggaggacagcggcctcgccaattcgacggagaggggctccgcatctactgctgctgctagagaggcacccggctaccagtccgcctcgtcgcttaactccgacaactgctgatgccttggcagctagctggtcgtcccaagtagtagagaacaaggcaaatgtatccatagatctccttgtagcggagcttaatgcctttttttcccctttctaatatgcattggatgagcccgtagcgcaccgtagtagtatctaaagctggtgttctgagttggttggaccttcctgcagttttggtttctccttctgatgtggcaagttttagctggtcgcacctacctaatgtatgcttagcaaacgaagtcccactaagcgctgtacataactgcccctccctgcatcaactctaatatatcatctgcttaatcgtcacccctgggcccccgtgctggttgctcaagatcccagctgcttgttgtggcgcttggtttggttcgttgtcggccgtggctcatgtttgtt

SEQ ID NO: 33775 - DNA, 3653 bp, Zea Mays
tctacgcatcacgttggtcgttgggctcggtctcgtccgctcctgctcttttctccgcacccagcgccgccgcgggcgattctagggtttcgtcgccggcggcaacaacctgcctgtagcgattcgacacccacgacgacggcctgcagatccagtccacctccgacgacctcgacctatctgcaacttgtggacagcctgcagaaacagctcgtattggaggctacacagaaaaacctgcacccaaaagttgtaaagctcaccaagaaccttgcaggataacacaagtgctgaattttggaaatggatcatgggcgttatgctccacaacatggatgggagaacaacagtgcaccaaatgggtatggtgtaattaatgagccagattttaggtctggtggatcctacaatgctaggagatctgtggatgaaggctttcctagagattcatatggaaggggtgcattctatcatgatacacatgatagaaatatgtatgcatcaccaccctctgccggtggaatgtggtctcagcctcgaaggaatcatgatgaggactatgcaactgcaagagaccatagaagtcaccgtgattttggtgctgataggagcaaaaggattggaagcagagaacgggcggagtttcatggtgagtttgaagaccggtaccgcagttctcaccaaagcagggaggacagctatgagagagatcatgaatatggtcgttatggttatgattcggattatgaaagaggcaagagagatagtagctggagaagacgtgattcatgtgacagcgaacgtgaaaggagtggattaagtcgtgaaagagaggaaagcccgtacacgcgccatagccgttctcgatcacatgggcgcgatgaccgatcaagatcacggtctagatcaagatctcctcgtccgagaagtcatggtcggaaccaaagagatggcctgtattatgataatcgatttgacagaagaagggaatatgattgggatgatagggggcatggtgattcagtggctccatctgccactgttgttgtcaagggactgtccctgaagactaatgatgatgacctatataagattcttgctcagtggggacctctacgcagtgtgcgtgtgatcagggaacggaattctggcatgtctcgtggatttgcttttattgacttccccactgtggaagcagcccgtagaatgatggaagctacaggagagaatggtctcgaaattgatggcaggaatgtgttctttcagtacagtagtaaaccaaccggggggatgggtgggccttctcttggacaagaaaattttacgaggcctacttatgggcacaggactgctgctgcaccgtgtgactggatttgtactatatgcggatgtatgaattttgcccgcaggacctcctgctttcagtgcaatgaacctcgtactgaggatgctcttccagctgatgcgacaggttccgcttcacactttgggagaaggggatctgaactaggtccaactcatgttttagttgttcgtggcttggatgaaaatgctgatgaggaaatgcttcggtacgaatttgctaagcacgcaccaataaaggacatccgccttgttcgggataagtttactcatgtgtctagaggttttgccttcgttcatttccattcggtggaagatgctacgaaagctctggaagctacaaacgggattacacttgagaaaaacggtcaggttttgcgtgtagcatatgctaaaagtacacatggacctgcatcagggggttctcagtcaaacagccttgctgcagctgccattgaggctgcatcatttgctcagcagtatgatgccataggttgggctccaaaagagtacaatcctgatgacaaacagaacaacaactctgaatctcaaaaagatggcagcacagcacagtcgggatttgtttgggatgaaaaatctggttactactatgattctgcatctggattctattatgatggaactactggcctttactatgacagcaactctggagtttggtattcatatgatcaacagactcaacaatatgtcccttgtaatgaccagagcaacactaaggcagccggggaggcggccagcgaaaacacgaaaacctcagatagtaatagtggcaaaaaggttgtgatctctgcgcctgctgccacaattaaacaaagtgagaaaacttcacttcctgacgctgttcaagctgctgcaaatgctgcactggctgcagaaaagagagaaaaggagaaggcaaaagagattaaattggcctcaaaaaatagtctcatagctaataagaagatgagcaatgtcctagctatgtggaagcaaaggaatcaagaagggcaggccgcacgaattgtccttgatgacaaagaaccagcaaattctgatgataaatttagtcattcacgtagtggaactggattctctttgaaaagcaagccaaattctgaccttgaaaatgctatgggcaattctcttggccaaggaatgacatcgactcaaacattggattctgttgtaaagcctagacctgtcagtaacagcttagggactacagttatgggtgtcataagaggttctgctagaggagtgatcaagtcagatactacgtttcacgcattatctgatgctggtagcactgattcccgcaccactataaccacaagagcaagtgggttaatgacaagttctgaggcacttataactcctgcacccttcaaaactgatgtgtctgccttagtctctaatactccatcgggagtttctgggagtggtaaacgtcggttttctgaggcaccgggacaatcccagtacagggatcgagctgcagaaagacgaaatctgtatggatcatctcatggcactgatactgttggattggattcaaggttcaagtgagatagggtcgatgccgtttcctcctggtgtgggtgaacgttccagtggtgaaattggcaacagcgaaaactatgaagttattaccgctgatagagcaatcgatgaaagcaatgtgggcaaccgcattctacgcaacatggggtggcaggagggactgggtctcggaaaggatgccagcggtatcaaggaaccagtcctggcaaaatccgtcgacgccagggctggactgggaagtcagcagcggaagcctgatccatcccttgaagcccaagccggggacagctacaaaaccatcatccagaagaaggccatggcaagattcaaggagatgtcttagctacactgttttatctattttattgctgcattttgtagtccgtttttaacagcatgcatttttttgtttgctcgtgtgttttttaaataaactgagccgctgaattgtgatttattatcctgaaaggggcactacatagttcgagacctggatgctttggttcccttgtgtgttagttttcatttgcacgacctatgtgcccgggtgttcataagttgatttgccacaatgtggtcgtagagtctcaacatcaggtcatatcacatatcgtttttttaaacggtgagcatgttttctccattattactggatgaagagaaaggttcttcttggtttgagggaagggtgatttaagggattaagattctttttagaaaaatac

SEQ ID NO: 33776 - DNA, 795 bp, Zea Mays
gttgctgttaagtaaccctagttagagttatgtgggcaaataccggctttgcctctgaggggtctcacatctctatataagaaacttgtacaccccttcatatgatagagaagagaaagaggccagaggcccaaccctatatcctgtgtctcgtgtgtttcttctgtcgtgcttatgggaagggagacgggtactctacaacttcttgtgcctctactgctgacgggagggaagggagcggatctggtgatccgtggtaacgtagttctcaacacgttatcagcacgctctacctcgatgttgctgcggcgagaccagatctgcatcaactctccgtcaagtcggcaggtccccggcctagccgaactgtcctacgcgacagacttcgattctccctctgcgcaatcgagcggtatgttttcttgatccgctggtgtgatttgtgcgctaccaacttgttgtctccgtcgtggtgttgcgtccatgtcggaagcgcccgcacccgtggtagcgctatcaccataagatggccaggccgccgcgctatccgaggatcccttcgacgtcgtcgcccgtgtatccgctggcagcaagcagcatgccgagggaacgtgctgctcctgatgagcgacaccagcggtcgccgcgccttggcctctggcacgggccctgcatagccaaaagtggagctcacggcttgtcttagcgatgaacgagtacgaacgagaggctaggcaccaggtttggatgctgatcaatgatgccgggagctccagcagagcaagcgcagaagag

SEQ ID NO: 33777 - DNA, 2208 bp, Zea Mays
catgcacttgctgcagcagccgtaggacacacgcacaccgcctcgacctcgagtccaccactgactccaccacctccccctgttttttttcgacctcgctctgctcatccgcacggccagacagccatggtggtggtgctcgccaacccgcctgtcgtggaccagatcccgctcctgcggtccccgggccccagggacagcttctcgtgcgtgccggtcgtcgacctgtccggccccggcgcggcgcgcgcgatcgtcgacgcctgcgagcgcttcggcttcttcaaggtcgtcaaccacggcgtgcccgcggccaccatggacgtggccgagtccgaggccgtcggcttcttcgcgcaggcgcaggccgacaaggaccgcgcgggcccccgcgcgtcgtacccgttcggctacggcagcaagcggatcggcctcaatggcgacatggggtggctcgagtacctcctcctcgccgtcgactccgcgtcgctctccgacgcctgccccgtcccatccggcgccgcgttccggagcgcgctgaacgagtacgtcgcggccgtgcgggacgtcgcggcgcgcgtgctggaggcgatggcggagggcctgggcatcgcggacgcggccgcgctcagctcgatggtgaccggcgccggcagcgaccaggtgttccgcgtcaaccactacccgccctgccccgcgctgcagggcctgggctgcaccgccaccgccacgggcttcggcgagcacaccgacccgcagatcatctccgtgctccgctccaacggcacgtccggcctgcaggtcgcgctccgcgacgccgcgcaggcgcagcagtgggtgtccgtgccctccgaccgcgacgccttcttcgttaacgtcggcgactcgttgcaggtgggcgtgcgctttagttttgacacgtgacgccaattgcctatcgatccgatcgttcgttcgtgggccggtcggctgtgtttcttttttttattattattgttattttacctgccgctcgactacagtgctgcaccagcgagctagctagattctgtggtgatatgatatgtgcatactatactaaaataaaacctagtggctagtgccgcgcgcgcgcattcgcgaacaagtcaaactggaaaaaggccgcgatctgccggccaggcagtcaactcagggcattcggctctcatcagtcatcacgcaccagcattaaaataagtgaaccatacacgtacgtacgtccacgccacgccacgcgacggcaaggacgcgttaattagcatagctttgcagctgcaggtcgagcaagatccgcaccgcacgcatgtctcacaggcacaggggtgtttttgtgtgtgtgtgtgtgtgcaggtgctgaccaacgggaggttcgagagcgtgaagcaccgggtggtgaccaacagcctcaagtccagggtttccttcatctacttcgcgggaccggcgctggagcagcggatcgcgccgctggcgcagctgctggcggagggcgaggagagcctgtacagggagttcacgtggggcgagtacaagacggccgcgtacaagacgaggctcggcgacaacaggctggcccagtttcagaggtgtagcatctaagctagctgcttagctagcactctagcagggcggcccccggccggtcaagcacacaccagctttacaggacgacaacagcaacaaccatgacgaacgaggacgagcgagtctgcttgcgagaaatgatggcgaagaagaagaagaagaacaaggtagagacgagacgatgatgatgtgtacagctggggagcgaccactctagtagctagatttttttttgtggtggtggtgggtagctgggtgcagggagcagggtttccgcaagttgctaatatggcctgttttggtgcatgcggtggggttacttgcctatttcggtaatgctggagctggacgggcaatgagccgcgcgccactagttagcgttaaccgaagtgggaggagtacttagcttagcagcgaagggccgatcgatcctctctggctcctccccagcagcttcccaagttagcttgcttctgcttcgccttcctagtttttttttggtgtgtgtgtgtgtgtttttaagcaccaagtcgcgtgtatgtattatcgtcgtgtacatggaggtttgtgtgtgcgctaatgtagacctcctgtttacctttt

SEQ ID NO: 33778 - DNA, 1199 bp, Zea Mays
aaagcaagcaagcggcggccggagcatcttggagacaggaagaaggggtggtagtaggtgaaaccggaggcggcaggatagggagagggagcgagagtagaggccacgcctgcttgacagcaaggcccgtgcgctcggcggcggcggcggcggatatgggcgactctggcggctctgttgtgtcggtggacgtcgagcgcatctccttcggcggcaaggaacatcatatacaaaccaaccatggatctgtatctgttgccatatatggtgaacatgataagcctgctcttattacctacccagatattgctttgaaccatatgtcttgcttccaagggctactcttctgtcctgaagcagcttcattgctgcttcataatttttgcatttaccatatcagccccccaggacatgaggagctgctccgattttgccgagcacacctgtggcatctcctgatgacttagcagatcaaatcgcagacatacttgatttttttggactggattcggttatgtgcttaggtgtcactgcgggcgcatacattcttactctgtttgcaacgaagtatagggagcgagtactaggacttattctcgtttcacctctatgtaaagctccctcatggtctgagtggttttataataaggtaatgtcaaatttactgtattattatggcatgtgtaatgtcgtgaaggatattttgttgcagcgctactttggaaagggagtacgtggaggctcagctgaacctgaatcagatattgtgcaggcttgcagaagttttctagatcaacggcagtgtgtgaacgtgtggcgatttatccaaactatcaacgagagaaaagacttgacagagaacctgaagcagctacagtgcaggacactaatttttgttggtgagaattcccagttccatgctgaagctgttcacatgactgcaaagcttgataggcgatatagcgctcttgtggagtacaaagcttgtggctcggttgtgacagaggagcaacctcatgcaatgctgataccaatggagtactttctcatgggatatggactgtacaggccaagccagataaactgtagccctcgtagccctctgaatccgttttgtatatcaccagagctccctctctcctgagagcatgggggtttaagctaagcccattcaagaacgcgaggctaaccttaatgca

SEQ ID NO: 33779 - DNA, 2585 bp, Zea Mays
ctccccccttccgtcttgttcacttttcaatctcccacgtcgccccatgggccatggcaaggctgcttcgggtgtccctcgctctctctctcgctttccctctctagacttcaatacttttcccctgtccgtgggcaagcccatcatgacgtgagggagggggaggcgatgcccagtctactctagcctgggtcttgagagagaggggagacgagggtgggagtaatacaacagagccaagccgagggaggagagagggagagagagggggagcagggaacccaaagagacaaggcaaggaagcagagagaaactccaagattgggggcgactggtaagcaaggggaggagtagaggcggcgtttgttctccttcgattccctagtcttcctggagggcgacgaagggagatttcgccgggcgcggacggacgccgcgatggccggtgtcgacgccgccaggtacgcgcacagcccagcacaccacgctgtggcggcccgggaccacgccgcgctgcgccgcgtgctggacgcgctcccgcgggcgcgccggcccgaggagatccggacggaagcggactccgtcgccgaggaggcccgcgccgaggccgtctcggcggtcatcgaccgccgcgacgtgcccgggcgggagacgccgctccacctcgccgtgcgcctctgtgaccccacggcggccgagatgctcatggcggccggcgccgactggagcctgcagaacgagcagggttggagcgccctccaggaggccatctgcacgcgcgaggaggccctggcgcgcgtcatcgtgcgccactaccagcccctcgcctgggccaagtggtgccgccgactgccccgcgtcgtcgccgccatgcgccggatgcgggacttctacatggagatcaccttccattttgagagctccgtcatcccattcatttcccgcatcgcgccctccgacacctacagggtctggaagcgtggctccaacctccgcgccgacatgaccctcgctggtttcgatggcttcaagatccaacgctccgaccagaccatactcttcctcggggaagggtcggaggatggcaaggtgccgccgggttcactgtgcatgatcaaccacaaggacaaggagattatgaacgcgctggagggggcaggcaccccagcctcagatgcagaagtccagcaggaggtcgctgcaatgtcacagaccaacatcttccgtccggggattgacgtcacccaagcgctgttgctcccacagctcacttggcggcggcaggaacggacagaggcggttggcccgtggaaggccaaggtgtatgaaatgaatcatgtggtggtcagtgtcaagtcaaggagggtcccgggggcgatgacggatgaagaattcttttcatcttgcaatgacaatgatatagagagtgaggggtttgatgatgttctgacagaggaggagaagaagcagttggaggctgcgctaaaaatggattctccggatgccggtggggaagaccaatctgactcatttgctggccctcgacatagttgctttgagccaagggagagggaggtacccattgaggacatgagtgtttctggaaatggggagggtaagcatgacaagaaaggttggttcagtaattggggaaagagaagtcaggttagcaagtcagagggggtgaagaagatggcatctccaaggaactcgctctgtgtagatgacaaggtgagtgacctcgtcattgaatcgccctcaaatgtacaaacaagaccgggaaggcattcggtagatgtagtcagaccagatgacaacagaaggatcagggaaagggatagtaggagacatgttgcttctgcagagaatgggcataggcgcaaagaaggttccaaagaaagcaattcgtcgtttgagggatctacttacaacaaaactccctccaggcacatttcctgtcaaggtcgctattccagtcgtgcctacaatcagagtgcttgtgacattcacaaaatttgaagagctacagccgctagatgagttcaccacaccaccctcaagtcctgacaacagcaagagcccagcagtgcagccttcttcaagttcctggattcagtggatcaaggcgccctacctccagaacttgtcgacggcacctggcccaagcagccgcgtggaggacatccaggacccattcgccattccttccaattacgtgtggacaacacctgaagagaagaaaaagaagacacaagaaaacaagaacaagtcgaagaaaggcaggagcggcgcatagatagtacgtaggtgatagcattggtgggggggggggggagttaaagttatgctgtgagtgggtgaaaagggctatactcttcaggatctaacaggagggatgattggaagatttggagatttcggctgctctgacgtcgaatattgagaagcgaccgcttgtcttctttcattgtgataacagatctgctgtcaacattctttcgtttaacccatcgtttgggtcctgattatcattgcaatctactgtattggtagattttgaggtgtggcgccttctgatatgattg

SEQ ID NO: 33780 - DNA, 1714 bp, Zea Mays
gaaacgaaacagcagttgagcttatttactttttcgaagaaaccacaaccaaacctcggctgctcggtggtcggtgcccaggtgcgccgattatctccatcaaagccgcgcatcccgctgcccccttactcatcctccccgctgctcgaaggagagccaaatccagagcgccgccgcgatggcctcccctgacgcggaacagccggcgccgacggaactcgagcggtggcgtgacctcgacatgctcttgtcccgccctggaaacctcgtggaggccactttcgatcccagccccggcagttcaagatgttgggaagtccaaggctgaagtagcagcgaagagggttatggagcgagttaatggggtgaacatagttcctcatttttgcaggattgaagataaagagatagagttctacagtcagttccacataattgtcctaggtctggattcaattgaagctcgaagctacatcaattctgtggcttgtggtttcttagattatgactcaagtgacaatccactccaagagacggttaaacctatggtagatggtggaactgagggcttcaagggacacgctagagtcattatacctggaacaacaccttgctttgaatgcaacatatggctttttcctccacaggttaagttccctttatgtactctcgccgagacaccaagaactgcagctcactgcattgagtatgctcacttgatcaaatgggatgaggttcatcctggaaaaccttttgatggcgatgatgcagagcatatgcagtggatttattcagaggctttaaagagagcagagcttttcggtatttctggtgttacatattctttgacacagggtgttgtcaaaaatataatcccagccattgcatcaacgaatgcaattatatcggctgcttgtgcattggaagccttaaagcttatttctgggtgcagcaaaagtgtgtcaaactatctcacgtacaacggtctggaaggaacacacattaaagtaactgagtttgtcagagacaaagattgccttgtatgtgggcctggtacccttgttgagctggatacgtcatctactctttcagatttcatcaagatgcttgaagagcaccccaagttgcggatgtcgaaagccagcgtgacgcacgaaggtaacaacctgtacatgcagtcaccggaggtgctggagcagatgacacggccaaacctgagcatccccatgtttgagcttctcaaagaggtcccatacaccactgtccatgccacgggcatggcagagaacaacgggaaaaaagtgtcctcgttgaggaagctccgtgtggccttcaagggcatcgaagacgcctccaagatggatacgaccgtgagctcatgatgccggtcgtcgtcgtcttgttgctaatttcaagtctcccaggaaagatgaggattaacccaatgtttttggacaggttaagtgtagttttcgagcgccatattacaaattgaaatgtgcgcctgatactgttcaaacatgaagaaatttatcgtagatgatactatggttttgtgagaatctacttcttggtgtttcgaatcttgctcgacaagtaaattaaatttattgtgcgtattctgagttttggagcgtgtacgcggtggagaatgtaagatttatactagttcggacagaacgttcttactttcagtcattgtggcttatgctat

SEQ ID NO: 33781 - DNA, 1203 bp, Zea Mays
atgccgccgccctccctcgtctccatcctccccgccgcgtccatctcgccacgaagacgccaagcaaagcaccccaagacccccaccgcgagccatcccttcttctcccgaagacttgtgtcccaaccgccgcgccacgcctcgatctccccctccgctgccggcgggagcgggagcgacgagctccaccttctcgagaagccgttacctgccgtcgcagaggataacgaggccgaggaggagctcgagtctgctccggtgtcatcaacagaagaagcgctcgcgccttttctcaagttcttccaggtgaagagcaccgaccccgacgtgggcgcagacaccgcggatggcgaggtgccggaggaggcgtcaaggagagatgtattgtccgccgctgataaaacagctaaatgtacccatcaagatcaaaatttatgagtggaatgctagtggcttgctatctagaattgagggccttcgggcattccttcccaaacctgagatgatgactagaccaagaaatttcactgacctaaagaacaaagttgatcaagaaatgcatgtctgcattacgaggattgatgaagagaccaacgaattgataattagtgaaaaagaggcatgggcggtgacatgccttagagaagggactctcttgcaaggcacagtacgcaagttgtttccatacggtgcacaaattaggattggcgagactaacagaggtggtttactacatatctcgaacatgacacatggcaagctgagatctgtggctgatgtgctgaaagtcggcgagacggtgaaagctcttgtcataaaatcaactccagacagaattgctctgagcacaaaggacctcgagagcgaacctggattgcttatcactaacaaagagaaggtgttttctgaggctgaagagatggcgcgaagataccgggagcaaattgcagagccacagccacctggatccattgccgcggaagactcctgtgacgatgctgtccccttcaacgacgaatcccggtcctatgctaactggaagtggctgaaatttagcaagtccgacgacgtggcaaaccccaaatctggcgtcgaatcgtaatcgtggtgcaggaactctgtagaaattttgatcaattcagatattcagtttccatgcttacttaattgtgcggcttggcgccttggccgcctgcacccggg

SEQ ID NO: 33782 - DNA, 854 bp, Zea Mays
aaaaaacatatattatgcgacatgacaaggtgtggcctacctcggcggcgcggcaggagcagagcacgtggagtctagacctcgacgcggcagtacgtggtggtctggaacctgagcccgtgcgcgccgacagcgccgcggtagccggagccggcgccggagctgatgaagtaagccgggcaggtgacgaacatgtggtagtggcccgacacccagctgccgaccttccagcggaccctcccgtcgatcctgagctgcaggacgaggtaccccgcggcgaggtccttggcgagcgcgtcggcgaggaagggcgcgaaggggacggcggggccggccagcacgggcgaccagacgtcgacgtcgccgtggccctggtacaccgcgggcagcctggacgccagcgtcacctgctggtacttgtacgtggcgtagacgtcgaggcggtcgtagtagacgccgacgcggccgttggggttgcgggacgccacggtgacctgcgccgccgtggacagcagcggggccgagccgttgctcaggtccagctgccgcagcgccgcgtcctgcaggtagaagcgcgggtgcgtggggcggagcaccaggtacacgatcagcgccacgacgcccaccagcagcgccatggtcagcaggatggccagcaggcgccggcatgactgccggaagtcatcgtccccgtggttgccgcagtccttgcccatggctgcctggctcgctgacggctgcctgccttggtcctctctctctctctgactctgggttggtggagaggcttcaagggaaagggaggctgggctgagctgtgtagcttgtggtcgtttgggaatggggtttttttt

SEQ ID NO: 33783 - DNA, 2542 bp, Zea Mays
tcgctctccctctctctctcatccataacgacatggcacctttgcaccacgctactgccctgcctactactagcactgcacggtctggttcttgttcctgagcagttgagctgcgcacaccgacttcttttgcacaaggtacagcagcgcaggcgcggcggcagcccgccgctggatctctcccgaggctccggcgatggagcggtcctgctacttcccgctgcggtgggagagcacgggcgaccagtggtggtacgcgtcgccgatagactgggcggcggccgacggccactacgacatcgtccgccagctgctgcacctcgaccccaacctgctcatcaagctcacctccctccgccggatccgccgcctcgaggcgctgtgggacgacgacgcccgcttcgccgacgcggcccggaaccgcgcgtccgtcgcccgcagcctgctgctggagtgcgagtgcaggaaccaccgccccggcgccggggagaacacgctgctccgggccgggtacggcggctgggtgctctacgcggcggcgtcggccggggacgccgcgttcgtgcgggagctgctggagagggacccgctgctcgtgttcggcgagggcgagtacggcgtcacggacatgttctacgcggcggccaggggcgggagcgcggacgtgttcaggctgctgctcgaccacgccatgtcgccgaggtgctcgacgagttgccggaacggcgaagccagcgccaggcgcagctccgtgttccggcttgagatgatgagccgggccgtccacgccgcggcgaggggcgggagcgtggagatgctcagggagctgctcgacgagtccagcgtgtcgacgtatctcgacatccgtggatccaccgtgctgcatgccgccgctgggagagggcagctgcaggttgtcaagtaccttgtggcctctttcgacataatcaattcgactgataatcacgggaacacagcgctgcatgtagcggcctaccgagggcaccaacctgtcgtggaagccttggttgctgcgtctccatcaaccttgtcagttgtcaacaacgccggtgacacgtttctccactcggcagttacaggattcaggaccccaggattccgacggctcgaccgccagttggagctgatgaggtacctcatacgcgagagaaccgcggatatccagaagatcatcaacctgagaaacgacgcgggccttacagctcttcacctggctgtggttggctgcgcacacccggatctcgtcgagctactgatggccaccccgtccatcgacctgaacgctgaagacgctaatggcatgaccgcgctggcgctgctgaagcagcagctgcgctcagcgacgtccgaccggctcatcaagcagatcgtctctgccggaggggtcttgaactccagcatcctgagaacccggtcagccatcgcttctcagatcaagatgcagggcgggatcgcgagcagccccggcaccactttcaaggtatcggatgcggagatattcctgttctccggcatgggagcggcggagtctctgaggccaagctcctgctccagcaacgggaaggatgatgaccctactcacgcagacgcagactgcgccgagaaccgtggatcgtcggagaagaggctgagctccgcgagccgggccaaagaccgcctcaagatgatgctgagatggcctcgccacaaggacaagacgcccaagaagtcagaggacagcagcccgctggggtcgatcagcaggctgaacgagcacggggccgagacccctgctccgctgaggcagaagtttaccaagacgacggcgctcaacggcaagcggaccctagcggtgaagagctccaccccgagctcctcatccaccaagaagaagctcaacacgaagctcatccacggcatcatggaggccatgccacagctggcgccatctacggcgcggtccgcgtccccgacggacactttcctgaggtcctcggtatcgtccacgccgcagccgctggcgaagctgaaggacatctgcctcgacgacgagatctccatggtgacgccgcccgccggcaggctgaaggatagtgacgacgccatggaggacccctcgtgctccaacaactcgtccatggacgacggctgtggcgccgggacggcagagagcgcggcccggaagcacgggtgcggcaacgggaggctcatcaacatctgctttggcgcgcagggcctcaccgtggaggactcggcgagcgggcagcagacgagcaagatgttcaagcagcagtgcctcagggtgtcctgattgacggcgtggtgtctcgactacaacagcgtggtgtgattggtttggtgtctcgcgtgcagctatgtgtgcttgtttgctttgctccttgcacagccagcggtgaactggtgatccaatgaacttgtgcttgtgttaactgtgacgttgacgaatccacagctctttaacttcctcagtgtcaggtcgtgcattcttcaaacaaatcaccgttgatcaatcacttcctcg

SEQ ID NO: 33784 - DNA, 283 bp, Zea Mays
atttcctctgataccacttctgtcacacccgtatttaagggataaagccgggtgcgtctcatatgtgcgccaaggaagaacaacacatataataacaaagtgcataaagataaatgccataaatgtacttattacatagcggaagtcttacaaaataaatgataaaataaagcgaactatatattatttccctggcgccacaaagcttattgggagacgccacctagattaagtcgaactcctcgttgggcggctcctcttgaaccacttgttcttctcctgt

SEQ ID NO: 33785 - DNA, 1669 bp, Zea Mays
agacgagagagagggaggtgccgaaaaaaaaaacggacaagagagggcgaagttaacactaacagggagggcagacggagaaccaggagcggcgtcgagctaaaagccccggcggcggtcatggccaccgcagaccagagccgtattttcatgaaggacgtcaaacgcgtcatcatcaaggtgggcactgcagttgtcacgaggcatgatgggcgagtatccacaggcaattttggtgttctttgtgaacaggtgaaagagataaatgctctaggatacgaggtgatcattgtgtcctcaggtgctgttggtgtggggaagcagaggctcaattacaggaagcttgtcaatagcagctttgctgatatgcaaaagccacagacggagctggatggaaaggcttgcgctgccgttggacagagtggcctcatggctctctatgatatgctatttactcaacttgatgtatcctcttcccaacttcttgtgacagacagtgattttgagaatccaaacttcagggagaggcttcgtgaaactgttgagtcactattagatcttaaagttgtaccaatatttaatgaaaatgatgccatcagcaccagaaaggctccgtatgaggattcatcgggtatattttgggataatgacagtttagccggtcttttggctatagaacttaaagcagatcttcttgttctactcagtgacgtggatggcctctacagcggtccacctagtgaacctcaatcaaagatgatacatacatacatcaaagataaatatcataacgaaattacttttggggataagtcacgtgtaggtagaggaggaatgacagctaaagtgaaggctgctctcgtggcttcaaacagtggcacacctgttgttataacaagtggatctgcatctgggagcatcattagagttctccaaggagagaagattggtactctctttcataaggacgcgagtttgtgggaaccatccagtgatgttagtgcatgtgagatggctgttactgcaagagaatgttcaaggcgtctgcagaatttgtcgtcggatgagcgcaataaaatattgctagacgtggcggatgctttggagaaaaatgagaatctaattaggaccgagaatgaagccgatgtagctgcagcgcaagatgctggatatgagaaatttttggttgatagattgaccctaaagccaggaaagatatcagccctcgcgaaatccattcgcactcttgcacgtatggaagacccaatcaaccaaatactcaaaagaacagagattgcatctttagcgattcgaagtggcaatggtcttctcttgaaaggtggaaaagaagccatgagatcaaacaaagtattgcataagcttcatgatgtaattgatcttgtcattccaagaggcagcaataagctggtttcacaaatcaagacatcaactaagatccctgttcttggtcatgctgatggtatctgtcatgtatacatcgacaaatcagctaacatgaatatggcaaaacaaatagtgatggatgccaaaattgattacccagcagcctgcaatgctatggtatgtctaatttgttacaatttatagtatttaacatgtctcttttcagcttgcatacttaactactcttggcacgtccttactcaag

SEQ ID NO: 33786 - DNA, 2297 bp, Zea Mays
aatcacatccttgtagcagcatctgcattgacatcagaatgacattttctctgaagagaaacatcctgtcattcttcgttagcagctctgcaactattttgaagccttttttttgcagatgatgcgaatcaactttgtatagttagtttcgttgatgtacgcctgtaccatgttgtagtaaatgataaagagaataggagtcctcggatcatctgctcgtttgaaccattcagtcatcagccatcgaaaatagctgtctgctatattttttttcgtcagcgacgatctgtcagggtcagggacttttcattgcaacgagtgggacgaacttgtccactgaaaatgatgaggcccgacccgaagggacgcatcaaatccgaatgagcctgtgaagtcaagcactcgaagccttatctgggaaacaaaatgctattcctgatctgacggaagcatccaccaatacagctagtttgggtacacacgctgaaccagctagttcgcctgggagaggtctctgtcttgtttacatgccatcgtctagaagttgtctcggaaaaattttaagcgaatgttgcaatgaacagagttccttttgttgctgtgatttgtcattggtcgaagaggactaactgcagcgtttgtctacctacaatacttgtttctttgttgttgctgtcttgtagtgccagcagcgatgcctccttgttcgtgctcggcaagtcggccggtgtgagcaaaatccgtacgtcatcgtctccagtggtgccattctccgtggctctgcacacggtcggggactcggcggccttgctggatcatttgtgccgccaaacggtaaggaaggaggcaggcgaggatgtcgcaccgtaaattcgagcacccgaggcacggttcccttggcttcctccccaggaagcgatcctctcccgccaccgcggaaaggtgaagtccttcccgagggatgacccaaagaagccctgtcacctcaccgccttccttggctacaaggctggaatgacacacattgtggtgaggtcgagaagcctggctccaaccccccgtggcctacgaaccctcaactctgtctgggcccaacaccttagcgaagaagtgcggagaaggttctacaagaactggtgcaagagcaagaagaaggctttctccaagtatgccctcaaatacgacagcgacgcaggcaagaaagaaatccagttgcagcttgagaaaattagaaagatgaagggtttgaagcagaagaaggctcacctcatggagatccaggtcaacggtggcactatagcagacaaggtggactatggttacaagttctttgaggaggtccctgttgatgctgtgttccagaaggacgagatgatcgacatcatcggagttaccaagggcaagggttatgaaggcgtggtcactcgctggggtgttacccggcttccccgcaagacccacaggggcctccgcaaggttgcctgtatcggtgcatggcatcctgctagggtgtcgtacactgttgctcgtgctggtcagaacggataccatcaccgcactgagatgaacaagaaggtttacaagattggcaaggccggacaggaaagccatgacgcctcaactgagtttgacaggaccgagaaggacatcactcccatgggtggtttcccccactacggtatcatcaagggcgactacctgatgatcaagggttgctgcgtcggccccaagaaaagggtggtgactctccgccagtctctgctgaagcagacgtctcggttggccctggaggagatcaagctcaagttcatcgacacctcgtccaagtttggacatgggcgcttccagaccacagacgagaagcagaggttctttggcaagctcaaggcctgagttgctgatggtgtcaagcgaaatggaaatgtattaccagatagttttttgtttttcagattcagctttgttggagatatcataagaacatgtttgatttgctagtctgagttgattctattgcgggcggctgaagttatattacctaatgaactcgaaagtcagcttgctagttgcgtgactttacctgcgctagcacttgccaattttgatggaatctcaaatcttcccgcacgcaatatgctcttgctcaattcagccgtttttttactgtaatcgttgtcagcacatctgtctacagtgaattaacgctgtaattgttctgaatttttaaaacaattatcttattattccataaaaagtgcaaagtgcttcatgtatgctccctatcgcacctccttcct

SEQ ID NO: 33787 - DNA, 214 bp, Zea Mays
ctttcctccttcttttcttccttcttactccctccaaactcccatggaagactcgcacccacacgacggacaccaagcggggagactccaccatggagaggaagaggtgggggggcggctaggtttgagggatggcgctggaatcacttggggaagaaggagagggattggggtggctgcaagagtggaagagagaggagggggggcggccaaa

SEQ ID NO: 33788 - DNA, 2682 bp, Zea Mays
caaggacaaggttaccaaacgctccaagtccaaacccctctcctcccccgcgtcccgcgagctccgtcaccgccgccgctggcgagatgtcatcggtgacccgccctcagcgggaggccgactttgcacgcttcccgtcgtccacccccatcgtcatcgacaacggcgcttctaccttccgcatcgggtgggcgggcgaggcggagccgcgcctttcgttccgcaatgtcgtgcagaggccgcgccaccgcagcactggtgaaactgtctcaattgttggggacactgacccatctctaatgaaattctttgactgcacaagatcggcagttcgctctccatttgacgatgatgttgtctatcagttcgagtacatggaatatattcttgactatggctttgatcgattaggtgtcgattcagaggtgggccatccaattcttatgacagaatgtgaatgtaatccgtccttttctcgagcccgaatgtcagaactacttttcgagacatatggtgtaccatccatagcatttggcattgacaacgcgtttagttataagtacaatcagaaacttggaaactgtaacgaagacgggctggctatttcatgtgaacatggaacttgtcatgttgttccatttttgaaaggacagcctgtgttggggggcttgctgcagaaccaatatcggtggatttcacattactgattttctgaggcagcttctctgtctaaaatatccctatcacacggcaagtatttcatgggaaaaggctgaagagctgaagaaggaacattgttatatagctcctgattatatggcagagttgcagatatttaaaaacaataaggaagaagctgatgagaaaatgaggtattggcagctaccatgggtccccccaccaaaggaagaaccaccatctgaggaagaacttgcaaggaaagcagctttgaaggaaaaggctggtcagcgtttgcgagacatggctgctgcaaagagatctcagaagatagtggaactagaaaaacaactttcctatctggaggaactaatggaacaacttgatgaagctgaggaagaagaagcaacagctattctaggtagctctggatatctttcccagcaggaaatcagatctgccattttaaaagcatcacaatctttaaggaaagcaaaaggggagtccaatggcaatgatgagaaaacagatgcctcagcagttgataagtatccacttgtatctgttcctgatgagacactgacgccagaacagttaaaggaaaagaagaaacagatattacttaaaaccacaacagagggcaaattgcgcgcaaagcagaaacgtgctgaagaggaggctttgcgggagaaacaagaagaaaagagggagaacccagagttataccttgaagagcttcgggcccgatattcagaactttctgataaatttgagcagaggaagcgacagaaagttaatggtagtcagacaaatgggaaccatagttcatctgcaggtgtaggccgtggagaaagactaaatgcagctcagaaagaaaggatgcggctgcttgcctcagctgcttttgatcggggcaaaggtgaggacacttttggaatgagagacgaggattggttagtgtacaacaagatgagcaaagacaatgatgatgacagcaatgatgatgatgaatcggaacttgttcgaatttcatcgaagctccaggagattgatcctacatttgtgtccaaatccgaagctgttcaactgactccggagccacccaaagtccggccactaaccgctgaggattacagaattgccattgggatcgagcggttccgttgccctgaagtcctcttccagccaggcatgattggaatcgaccaggccggcatcgatgagatggtcagcatctcactcaggagattaatggaggacgagtctgtgaaggagcgcctctgccagtcgatccttgtcactggcgggagctccctgttccctggcatgatccctcggctggagtctgggatacggcaatatcggccctaccttgctcccctgaagcttgtcggagcagctgaccccattttagacgcgtggaggggtgctgccgcctttgcggcatcaagcaagttcggcaaacaaacgttcagcctagctgattacggagagcatggagagaacctgtttcatcggtacaacattgtttactcactataaccggaaaatgacatagtgatcgaaccatctcagtcaggctatttatttaacagctgatacaaattgatgtagcaacaaagtttttcaaaactgcaattgatatttttatgtgattggaattggagggttcaaatggtgaaggaatttcataaacctataatatgtgtgcctttttttagtcttcccagggcacaacttgtttaagaacaggtgagctgaatcctctataaagctaaggtcactatcgactatatggatggataaaaagaacaaagttgtccatggttacttgcataggggcatttctttttcattttcttttttagtctctattttgttatatctaccattaattaaaaaaaggaacacagtcttatatagggggtatgcctttttattttatttttaaatcttctgtttcttcagggttcctaaatctattttttgttttctttaacacac

SEQ ID NO: 33789 - DNA, 2490 bp, Zea Mays
gcagcaacaccgcccccggcctcgctttgcagccccctccctccaccgcctcctccacgccctagcgctccggcccccgccccgagctcgtcgtggccggctgcgctgcggtgcccgcacctgtgggggcgtgcgggccggtggtgaaacgacccgcgacctcggtgcctctcgacgtctgcccgcttcctcgccggcgccattttgttcccgagagaaaataaagccagagaaggaactgcaacgtgccaggaaacaaatcataaaatgcaaaattgctatacgtgatatcatccgccaacttgatttgtatacttctactgggagtgttgatgacccactaatgcctacagatcagtccaccaatcccgaacatgtatgtatgttatcaagtgaaggtcagatgctctacttcattggatctatcaactgataaattgtcaatatttattttgctagaccatgtgctcaacatgcaagtctcatgaatcatttcccagcaataaaattatcttctgcaaagggccctgcaaaagggcatgtcatgagaaatgtttggaacctcccttaaacaaaagcgtacttccaacaagtagccatgggtggctttgcaaattctgtttgtgcaaggtgaggattttagaaactattaatgcacatctagggacgagttttacagtgaagtgccactttgaagatatattcaaggaaactactgaactaatagactctgaggatgcactagatgaagattggctttctgagtattcaggtgatgaggactatgatcctgatgaaaatgaggccagtggcgactgtatggacagcggggagaagattatgtctgatgattccaatggttcaggaagccccctttattctccaaatgacgatattcctgacttcatatcagcagacttaaatgttgtggaagggttttgtcataccaatttagatttaggcattgatgccgttgaagatgattttgcacagatcctcacctaccaaaggccaagaagagatgttgattatagaaggcttaacgaggaaatgtttgggaaaataaccgggaatgaagaacagagcgaggacgaagattggggccatgaaaggagaaagaaaaggacacattcaggtgttgctggggataattctgttggtttcttgaacgttatatctgatgaaaagagccagaagaaggggagaaaacttttcaggattcctcctgcagctgttgaggtacttcgcagagcttttgctgaaaatgagcttccaccccgggatgttaaagaaaatctctcaagagaattgggaatttcttttgaaaagattgataaatggttcaaaaatacacggtgtgctgctctcagagatcggaaggctgaaggaaacagtcataatacagctcccagcaaaagctcaaaaaataaaggaaaagctggaatctcagactggaaggaatggtcatgttactggtccctgcaataatttgagaacaaatgaagaaaaaacaggtatatcggggaagtttgattcaggagacaactcttgtttggttcccttctctgaagtcatcaatgtgcctacgcgattgccacacaactttgagatgaggaagatggaatcaactagaagtcctgcgaggctacacaataaaggagggttcctgtctgcaacagtccaaattaaggagagtacgttgttacccacaggcaagccttgttggcagtcagaaatgagccatccaacaactaatgaagtgagcacttcagcgcaagctactacttggatcgacgcgggggcgtgtgccgaggagcaagaacctactccttgggtggacatcggggtctcagactaccagcctttcctggatgtgatcgacgacatgtgcggacttgagtggaggctgcagagactgaaggagaacatgctctcatctagcatagacggccaaaccgccgccagtgagagtgacaaaagaaaccagaccgtggtgctagtgccaaccgccgagctcaaggaaaagctgccgcatgacggtttattcgggcattattgcccataggtcttatatacatagcggataaactgtacagagaaccaagaagaagaagaaaacaaaagggaaacagcaaacagacaggtgcccgcttacataccggtccatactgtcaggcactactctcctttcttgggcctcgacacgactaatactgtgctagtccagaacagatgagccatagccattacctgtgtgcctcccaggttcagttcatatgttgtatgtattaatgtatatcagaagagtcgtgcttagtagtagcaagaacctagtcctgatccagaccgtgaatctggatcatcttgtcctgtggttgtaccgtgcagaacagacagatgtcggctagtcgtttggttctgaagtaagaaactataagcatgcgtgattttggcccgttgcgtgacaaaaaaaaaagaggtggtgaggcg

SEQ ID NO: 33790 - DNA, 3128 bp, Zea Mays
ctgccgctcctctagtctccacaatccagtccttctccagtctgcccgctcattctgtcgaacacctcgtcctctacatcctcatcgacgtcttcccaattcaaaactcctaaaccctagcccttcttcccgacaccaccatccatccaaaatcactgggtgatgcggaagaggtagcctccgccgatggcctgctgcttcgtccgcgtcgctgcggcgccccgcctcctcatctaccgcgccgccgctccgcggcagctcccgtcgccgctcaacgtattcaggaagggtttttccgagcagtcagttctgccagtcacagattcgattgagtgtttccaaggaccatcagtgccgaatactccacggattccactgtatgatgacagcgtatcctcaagcatattggatacattgtcgaatccgactgggggtgtccctcatgctgatccttcaaagagcagaataatgctagttgatggaacgtcgatgatgtatagatcctactacaagatattagcacagctgcagcacggccagttggagcatgctgatggaaatggggattgggttttaactatattcaaagctctatccctgcttcttgacatgctggagttcattccatctcatgctgcggttgtgtttgaccacgatggagtcccatatggtcattatactgccatgccatctaaagaatgtcacatggcaaaaggtatgggtgtatgatgtctcaaagttgatgggaacatggtagaaggtaatctgtggctgtcaattagcatcttggggatgcatcagaggtcttggactgagcctcaatccactaattgtgtttcatggcatggagccctggcttgcacataagcaatgttctattatacatttatacttcattccttggtcaagaaagtgttgggtagagagaagtagaaatggtataggagtgttgggtaaccagttttagaatatgcaatataggctttgtaaaaaaacttgacctgcgggggtaagaccgcccccacggtattatattaagaagaccttctcacgcaggtcgagaaaacccccgaaccctgccccacccatacatagcggcaccgtagcccatgtgagaacgaccacaaccgtggccgagccttagacttgtgctttggcgtgggacaaacgaggtgatttatttaaccacagccgggaaattcgctcccacggggagtcgaacccaggacctgaggagtgctactcaaaccacctagccaactcggctagaggccctttagcactgcctacttttattttctaagaattttatgtcacttagtttcttggttcttattatcttcctagctatactttacttaaaaatgtgtagtatattggaagcaacaaacatacgagtcatcaagggcatcttcgatgctccaacttgggaggtcttagagatactttgcttacacattggaaagagagcataccaacacttattcatttaggttttcattagccacttcttagaagatacctttgcttatggagggttgggtaccaattgattgttttcagctgttgtatcatgttactctcatcttttgaatcctataaagaaacattaccattttttctcccctttaggaatgacctttcgtcatatgttgtaccctgcttacaagagcaaccgcactccaacacctgacaccgttgttcagggcatgcaatacttgaaggcatccattaaggcaatgtcaataaaagttccaggcgttgaagctgatgatgttattggcaccctggccataaacagtgtttcggctggttacaaggtacggattgtctctcctgataaagacttcttccaaattttatcaccttctttgcgtctgctcaggattgctccacgtggatcagggatggtttcatttggagttgaagacttcgtcaagcgatatggaccattgaaaccctcgcagtttgtggatgttgttgcactttcaggagacaaagctgacaatatacctggagttgaggggattggagatattaatgcagtaaagctgatatctaagtttggttccttggataatctactgaaatccgtggacgaagttgaggatgaacgaattaaacaggctttgatttctcactcggaacaggcaatcctttgcaaaaacctggccacgctgcgttctgatcttcctcattatatggttcctttcaagacagccgaccttgtatttaagaagccacaggatgatggagagaaattcataaaactcttacgagcattggaagcatatgcagaaggttcctcagtaaatccaatcatcagaagagcagcctatctttggaacaaacttaaatcatgatgacactgatgttttcagcgttgaataaaaaggaattttgtcaaggctgagagtttgggttcaaagcttggtgtcgtagtgctcaatactggcggcattgacttctgtggactcggcggccagctacactcacatcgcaacgcaaaatcaaattgttgctggcagaagtgcataaattgaaggtgccgatgcttaagcaaagcagctcagtgtttatacctcggaacttagctctgtagataagaaatgcacaacattgcccatgtattccgccttttttgagaggaaagctcgtggaatctatttgattttttttctctgtactaccaattacaaagggttgtaggtggagctgtggaggccagagcgggcaaccgtgtggcttaacattctaccacgcctagcactctagcaggtttcatgaagtctactacggtggtgaatcagatcgcacaactgttgtgttgtaggagcgagtatgtgctcgttttgtcgcacaaagatgttgtaaggctgagtccaatccttgtcgatcctgactgttgatgccggcggtcggtaccgagcaaactggctccaatgccggtcggtttgattggctggttggtgggcttgccaatcgatctgaggcctagtttgttttgtggtgattaaagtttagtgagtcacttttagtttctaaagaaacaaacatggtaactaaagtggtgtaactaaacttaagttctttagccacaagggagtgactaaaaggactaaagtagg

SEQ ID NO: 33791 - DNA, 3645 bp, Zea Mays
gtgaaaattgtgttttcggtatttgaaacctaggggatatcatgactatcgcaaccggccaacaggaaatttcagccgggcatccccaattcatcttccccacgccgcgtccgcgtccggaccggacaccggcggcacctcctcctgcctccacttcaccagttcatcgggcgccggaagtgggagccatccgccgccgccacatatctgtcctcttcggcgctgactggggctcagccgctcgaagctccatcccgcctcccgtcttcgccgccgctcgtcagatccctcgacgcgacggtcgtgtcttgactctccaccacgcgactccacccagctcttctccacgcgactgcagagcgacgatcggaggcgccgccatcgcacaatccaccgtcgctgcctgctcctggtgtgtcctctctcctctctcctctccctctccatctccgtctcaaatcttttacccaaaccctaaccccgactgctatctattcttgtaagtgatactctcacaagatccgctgctacatccatttcttcttcttccacgttgctgggaggagacgggcgcaaggatttgtgcgagggagaaagaaagggaaggaaaggggataggacgggaggaggagcacgactgcttaccacttattcttcccagcccgatggattccacagctcttcaatatgaaaaccaaaaattggtgcaacaactggaggtacagaagtccgaaatgcatgcattggagcgcaagttcaaggagcttagtgatgatcaatgttcttatgacaagactctgatttctttgaataaactgtggaatcagctgattgatgatttggttctgcttggagtacgggctggtggggatttggataatttgcaagcacttgaccatgaagagttatcagaagaatctttggagtcgtgtccttccgaggagatatttctcttaaggctcttgaagacaaacaacatcagagataatagtgacactagcttgttgaaatttgttgaagaagctcttgcttttcggtcttcagcaactgttactttgatgaagtccctgcaagagactatttcttcgcagcaagctagaagtgagtctttgtctttagctttgaatggacaaaagtcaaatgaagatgttattgttgcccttcgaaatcataatgattgcttgaaagaggtggcagagaatgcgagtcaagccatctctattatcaacgagaagcacaaaaggtatcttgatgagattgaggcttttaaaagcaaccattcaagggagctacaggaaatcaagcgtatttcaggtgagctagaggaaagcattgcagagcttgaggaaagtcaaaggaagttggttgtgctccagttgcagaggcatggttctgtaatggatgcatctggggcaaatgctgtgaatggtggtatttctactcataaatcttcagataaaagtatgagctggcaagacctcaaagatgctgttgacgcagctaagaccctcgcaggaaaccgtctattagaactccatcagactcaagaggataatctgatactatccaaggagctgggagatcttgaggggcaattgaaagatgagaagtatgtcttggtatccaaaccgtacatgattcttaatgataaactacaacatttgaatgctgagatagagcgttatagagggttggttgaagttttacagaatgacaaggaccagctcatgcaaagggagaaagaaatttctgcaaaagcagaatcgctcgacagtgttaaacaaaccattatcacatatgagaaaaaaattgaagaactggaaactcaaattcagatactcttttctgaaaagaatgatctcgaaaccaaggttgaggagactttgcaagattcaggtaagaaagacttcaagaatgagattcatgttatggctgcagcactctccaatgaactgggtatgatggagaatcagttgagtcgatcaaaggatgcagcttctgaagcacttgcattgcgtgagcaagctgaatcattaagatcattggtagctaaaaagattgaggaacacaagaagatttcggataaatacaactcacaagtaattgagatcaagtccctcaaggcattggaaaagcaggagctggagtttattgcagatatgtacgtgaaagaaagttctgagtctaggacaattgctgatattgaagaatcagaaacccgagctcgcaatcaggctgaatatttgaggagcaatctagaggagcatagtcttgagcttcgggttaaagcagcaaatgaagctgaagctgcatgccagcaaaggctttcctttgctgaagtggaactagaagagttaaggaccaaagtagatgcatctgaaagagatgttgtggaacttaaggaggcaataagaattaaagaggctgaaggagacgcctatatttctgatatcgagacagttggtcaagcatatgaagacatgcaaacgcaaaatcagcatcttcttcaacagcttactgatagagatgactttaacataaagctagtatcagatagtgtgaagatgaaacaagcttgtagttcccttctctctgacaagcttatgctagagaagcaactccagcaagttaacacttcactggagtcatctaaactgaaaattgcccgtggcgaagagcagatgaagacttgtgtagcgcaagctataaaaacttcagctgaaaacagacatcttactattagcctggaaaggattgcgctggagttatccaacacagataaggaactcaagtggcttcggtcctccgttggatcctctgagaaagaatacgagcaaactcagcaaaagatatctgagctgagagcgttactggagcacgagaggagtgagaggcggcggcttgaagaacaatatgaagaggtgaaaaatgaagttatggagctgacctctgagactgaagagactactgtccggaaacttgaggatgaaataaaagaatgcaagggtattctcaagtgtggtgtatgctttgaccggcctaaagaggttgtgatcaccaaatgtttccacctattctgctcgctatgcatccagagaaacctcgagattcgccaccgaaaatgtcctggctgtggaaccccattcggacaaaacgacgttagggaggtgaagatatgaacctcaccaaagtgacagtgacaaaaccgacttgcgtgtgaacagcagcaacaaactcccttgtgaatatcgtctgttatgttggcgaacatctagatctaacttgctttattactgggattaaaattaggataagaactggaagaagtgaagttcctaatttatttgctatcgtgtgtgctatgtatgattacccttggcagcgagtggtgtatctgctgggtgtcaatatgctcgaattctagctcctccctgctagcgggtgcatgccagttttattaaggctattccatgtacatggtgtcacactctttaatacataccacataggatgaaaatctgatgtgacatgtgattgaaacatagggagacaccactcatgcaccagattatagacattgaaatctgaaccatctaaatgaactgtaactcatactcttatatatatctaacattttgtcttgtg

SEQ ID NO: 33792 - DNA, 2046 bp, Zea Mays
atcttcttttaactggagcagcagagaactgaaaagtgcccgcctctcgctcgcatcaggaaatcaacgactgagtctccacgactgtcggtcacttcggatggcggcaccaccggaggggaatgtccgcttaggcgaggggtgggacgaggacgacgtgctggagccgcagccgctggaggtcatagcgccggatgtcaagtccaagaagcgcaatccggcgcccggagttcgggttgttggtcgccggatctacgatccagagaatggcaagacctgccaccaatgccgccagaagacaacagacttcgcagcggcgtgcaagcaagtcaagaagaagggtccgtgcccagtcaagtattgcctcaagtgcctccttaacaggtatggcgagagtgccgaggaggcggccggcaaggaggactggatctgtcctaagtgcaggggcatctgcaactgcagcttctgtagaaagaagaaaggcgagatgccaactgggataatggcccacatcgccaaggcttccgggtgcacctctgtccatgatctccttaaaaaggggtcagatgtggtttctgctgcacaggcgattctcaaggtgaatggtagtgacaagggcacaaagagatcccgagggacagatgctgctgctgaggtggcgactgaaaaggatgtaaatataggcattgatatcaatacagttatagcagatgaaggagatgaaaatataggtgttgatctcaattcacttccttctgttgataccaagaaaaggcagaagcggcagaagctcaagcacaggacaaagaaggatcctgctgatgcaacgtcacatggagtcaatactgaaccattgcagatggatgggaaccttgattttctcaatagtaaaactgtgcgacccaggggtaccccagtcactaaaattgcaggcgcagagcttgatgacgaggatactggggctgcaattcagtttatagaattctgccgtgcatttacagaggtagtcaaagatttttcaaataaagaaagggcaaccagaaaaaattcttcaagatttagttggaggccgtgaacttcggtttgtatcctcagttgttgctgggtttcatataaatttgttatctgtcattcaagaaggaaaggggaagaagcctctggcttacacaagagacggagatgcatgggtaattgatattggcaaatatataagtgaatcagcttctatatcaaaagggtttcctctcaaccatatcaatcaggggatatcaggatataaaaacttgagcccttcttcaagctgaggaactggattgacatgcaaaatgacatagctgctgaaccagtgaatgctgctagagaaaaggcgcgtgctgcaaaagaaatggtaaaggagctaaaggaaaggctaaaggacaacatgaacaaaataattgtttcaccaaatgaagcagcagcctctaacagtgaagcaaataagtatattatttcccaaataaaggaggcacaggaagtcaagcgtgcagccataaatgacatggcaactatggagaagcaaggaggtttttggaccaagcctctgatggtagagaaaggggcagcatattggaagttagatggttactgtgataactcagcaatattgcttcaagagtatggtggcgatgaattaatggcaaataaagacaagtggtttatgtttactgaagacgaggagaaaataattgaaaaacatttagccactaggtaatgagtttgtcttgccacgtttggatgtgtttctacctttccaatgatggtgaacttctcttttgttgcttgtatatcatgaaatttatctgttggaaaccctatctgtattttcttctgttgttgatcctccaactattgctatcaaaaaccattttatgtagtagcatcctaacaaatgtggcatacaattcattccagtatacctgaactattgtgatcaatgaactccaacatgtaacgaatgattagagttgacaatcagtccttctacggataccttgcttccagagaaaa

SEQ ID NO: 33793 - DNA, 570 bp, Zea Mays
cccaaagaccaggccgtcggcttcaactacttcgaccgaagttgcgggcgaaatcgtcggcaatcccggtcttctcgcgcggccatggcagcattccctggggctcgcttggactcggccactacagctataaaggcgagaccctaccctcgttaccctcctgttgcctcaactccttgtgacgctcctaccaaaacaccacgcaccaggagagcagaagaagaacacgagagagagaaagaacgctgccgcggatccaggggcagggctaaccatcgcaagtcttccggtttgcgccaccaggatgcgacgcctcatgccgtggacaagtcctggtgccatggatcgctagtggagaacctcactgatgttcgctgggccgagtagaaactagggagaccaccaattctgcggttgccacttggggagaccagaattcgccgttggcggccgaccaccacgacggagcttcgatgcgctgtgggccagggtccctacctcatccccgtcgcagtgcggtcacaaggatttgaagaatcaccctggtaactggaatctcaagtgccaggc

SEQ ID NO: 33794 - DNA, 663 bp, Zea Mays
gtcaaaagaaaaaaacataggattcccagggtactttgactgtgcggtggcttgaatcgtgaaaccacgacgtgtttctgtctgagatgcaaacaaaactggagctgcccaagaagctataaatggtattagacgggctagcaaggccatgactgagcaagaagcccggcaaattcttggtatcagtgaaaattcgacgtgggaagagattgtccagaagtacgacacaatgtttgagaggaataacaaaaacggcagcttctatctccagtcaaaggttcatagagcgaaagaatgcctggaacctttatatcaaaagcctgatgtactgaactgagattttgcagacgccctagcttctgtttgaagcggtatgcctaattgatcgatttattagtgtgctcagagatcaacgttcagtttattgatcggtttgccaatgcgcccagagatcaacgttcagttttgagttatgtgttgggcgcatcaggttggttccttgtaatgccagaataatgtttaacaaacataccgaattttggctgattctcattggcaacgtctcagtcactggttttaattcatagtatgttatttcacactttgtcaaccaagcaacactttgaaactttttgtcgataataaatggttcggttcgttcat

SEQ ID NO: 33795 - DNA, 3347 bp, Zea Mays
ctaggtaactgtaacttgaaactcttttgcaactgaatttataataaaataataataaagaaggttttggggcttcctcgactgacctgcccatacttggaactccactccagtttactaccctcctccgtcgaaagcgacgcctcaccgcaacacaaggccgcccgcggacactgggtcggcggggcccgcacctccttggctcctttccacgcagcttttccacagcacagttgccatctgtcctcgccggcgcaggagcagcctgccctgcctcgcgtgcgaccctcctctgctttttagagagagacagcgagcacgcgcagaggagaggagagagaagcaccacgcctcccaggctcccagcgcgcacgcaccagggtccaggagaggaggacaccgtcgcctcctggttggttcatctcgtcagtcgtcaccgcctcctgcagccaaccggcggggattcctgtcctggatgcgacaaggccagcaggagagaccctccccctctccttcttctccctgagcaggaagcggaaagccttccgcgcttttcaaagatcgtaggccgcacgcctgcagcagccgccgactcagggcgagcgttgagaggaggacgaagaagagactgaagaagagcagaccgaagtgaggccggaggaagggatcgggccttgcgggattcggcagtccatcacgaggtaaatgcggcgctaggagctgcagcgatggcgtcgctggtacccggggtcctcctcaagctcctgcagcacatgaacagcgacgtcaaggtcgcgggcgagcaccggtcgtcgctgctccaggtcgtcagcatcgtgcccgcgctcgccgggagcgacctgttcaccaaccaggggttctacctcaaggtgtccgactcgtcgcacgccacctacgtgtcgctgccggacgagcagcacgacctcatcctcagcgacgtcatccagctggggcagttcgtccatgtcgaccgtctcgaggcagccaccccggtgccgatcctcaggggggtcaggccggtcccgggccgccatgcctgcgtcggcagcccggaggatcttgtggtgaccagctcctccacttttcttcttggcagcggcaaggccgcccaagcctcctccaccaatggtagttccaaggatgccggtgccctgtcgctagagaaagagcagggcaggttagagaagatcaatgctcctcccaagagcaacggcacagagagcaagaagccccagctcaccaagtcgaactccaacctctcgaaacaggcgctcaatggcctcctctcggacaagaaggacgtggttagctcgaaggcaaaatcaaccagcgctaggtcgacgccgtcttccccgaccagcgcccattctctgcctgcgtcgttcgataaattctcgagtgacatgaaacagagagtgagaaccaaaggagcagagaaatcgccgccgtcaaggctgtccttgctagaaaaggctgcgtctgtgttgaaggccactacggcagggaggaagtcctccctgggtaactccattagtaacaccttgttgagcttcgaatctgggcccaaggccttgagaagaagctgggaagggaaagcagatgcaaaggacaaaggcaattcggattcaaagcctgccaaagctgaaaagaagtctgaaaatcgaagctcttcggtaagtgtcaacaatgccatgtcatatacagcatgggtatataatacttgtgaagttttcatcaatgtaggatcaacaacatcaattctgaacgttttcatcaatatatgatcaagaacctgaccatatgtgtctcttgttaggaacatgtagactgtagtattgcttcaactcatcagtgcccctattaatgtcttatgtccatgcagcatgtttagtaaataacctttgttgattctcccatgttcagactcccagacgaaaatcattagcagaagagaaaccatcgaataaggatgacagtaagattctgactccacccaggaagagctcagcgagtgctcctgcagacgattccgacaaagaaactgacagatgctagcgcttcgtggacaacgcttcctccatcactcgttaaactagggaaggagcttctgaagtacagggatgcagcacaaatggctgctgttgaagccatgcaagaagcttctgcggcagagagcatcgttcgatgtttaagctcgtacgcggaggtgagctcgtcggcggaggagcagaacccacagcaggctgtcgagcagttcctcgctctgcatggagcaatctctcgagccaccatcgtcaccgagtctctaaccaaggccacgaccacggtctccaccgcgacttcaccagatcaatcagcagccggcgatgcgtcaacagccgacgaggaaaccatggctgtcgcggcggagcgccgccgccgggcagcctcctgggtcggcgccggcctcgccaccgatctctccgccttctccctctacaacctgaaacccgccccagccagtgtcatctccccgctggccgtcgtgctcgtggacgagtcagccaagccggcggcggcgaaggcagtgccgcccgcgaagtcgcggctgtccccggcgaaggggaggttgaaagctggttccgcggccgccgccgccgccgccgccgctgcggcggcggcagcagtgcctccgcctgaatgggagcggggaggcggcgcggaggagcggggcgagcttgcgcggcggctcggggacgaggcacgggcgtggttcctggcgttcgtggagcggttcctggacgcggacgttgcggcggccgcgccgtgggaccgcgaccgcgccgcgaggatgctcccgcagcttaagcgcgtcaacgactggctgagcgagatcgggaagtcggcagagatggcgccgcatccgccaccggaagcggacggcgaagcggcggcacccactgccaacggcggcgcggccagcggcgtgccggaggagacgatagagaggctcaggaagaagatctacgagtacctcctcaccaacgtggactctgctgccgccgtgctcggcggctgcgagatggcgccggcaccggtggcgaacgggaagaaggggtgacgatagtgggccgcgaaggaaggcccaattgggccgttaacttggctgagccaaaacatgggccggtctggatttaaatgtaaaaatgggctggattgagattgcagtggttgttttggtacttttttctggtgttacagaaagtaaaaaaaatatatttttgtccctctctccttcaattctgaaaccgaaaatatctcctcccttatctctcaaaaccagtcag

SEQ ID NO: 33796 - DNA, 828 bp, Zea Mays
gggtttgctcaccggagccgattagatgataccacctgcctctgtattactgtgactactgcgacacctacctgacccatgactcgccatctgtccggaaacaacataatgctggatacaaacacaaggcgaatgttcgaacctactatcagcaatttgaggagcagcaaactcaaagtttaattgatcaaagaatcaaggagcatcttggacaagctgcagctttccaagcaggtgcccctttcaaccaacatctgcttgcattcccaggagctatggcccgccctcgtcttccaattctgccaacccctggcatgcctcatgggtttcctcaagcacctggcgcaccattgatgccaggaattaggcctccagccatttaccaagcaaatccacaagcatctgcaggtccaacttctggtgctcctccagctccaccgactgctccacagcctgcgttctcctatgctcccccatcagaggggaaccactgattctgttccttaggcatgacttgggaggccatatgaagtatgtgcagaaaggctgttcctttggaggttgatgttgtcatcttttaactaaggtcatttctatcatcctgaattcaagatattattgagaaaatcttccaatttgtgtggctgggtctctgttgttcgatgcatgttaactatgttagtttttatataaatttcaataaaaaggacgcttgaaaaatcaaaactaaattctctgagaattgtttgtggcatgggatgcttgaactcggtgttgtgattcgccagtattcatgttttagatgttcttatgtccacttttaccatc

SEQ ID NO: 33797 - DNA, 3666 bp, Zea Mays
ttcgcgtccacgtccgctcgccctctacagcctctcgccctctgcagcctcgtatatacatacaacaacacccggtccccaaagaaaggccacacacagtcgcactcgacagccgccaccaccaccacctggtccacgtcgccggcggcaatgtgggcgcaactggccgtcgcgctgttcgtggcgttagccgtggctcccccggcccgtggctccgacgtgccttcgttcccgctgtcgcaggcgcagtccccatccaactcctcgtccccgtccaacgccgcctcgcggccgtgccacctggacctctcggccgagctcttcggtggggtagccgcggcgtgcggcgccggcggggggccgggctcgctggaccgcggccgctgctgcccggtcctggcggcctggctcttcgcggcgcacgcgcgcaccgcgctgtccgtgcccccggcgcctccgccctcggcgctagtgggggacgagggaatggggcccgacggcgacgacgacgggcccatggtgccgtacgacaaccagaggtgtgtcgacacgctgggcgcagcgctggagcggcgcggggtggcgctgccccggcccaacgcgacgtgcgacacggtgctctgcttctgcggcatccggctccaccagatcggctcgctccgctgccccgccgcgttcgccgtcaaaactggcgccgcggccaggaacgccacgcccaccgccgcggtgaaggccctggagaagagctgccgcaacgcctcctacgccggctgctcgcgatgcgtgcagtccctgcaaaaggtaaacctttcttgctagctttctctcctaatgccattgcttttgctcatcttttccgttcttgtctcttttggcttgatctcgcattccctatataactaatgtttgaaatgttacaccacgcatatcttgccttcttggattccaaaccactgatcgatttctacccctgcttatatatagacgaaaaccttcaacaattttgtcagttatacgtaccactcctgcagagcaatagtgcggcgcttcaagcgacgccttcactccttctttgcttgtttttttatctagcaaaaggtggccatttcgatggtatcccctttcccacaaagggtttccactgcgctttctaaccgcatcattgtttcaactttcgaactgatctgcttgttcttgagcttaccatcaccactaatcatttcctacttgattgcctttctctctgaaagcaaccatgggaaagggcaatcccgccaggtaaccaccggataggaccattccttgaaagcttgaacacgcatttgtggggacaaacctccttctttcgagcaagggcaaaggcggggtattcgccttcgtattcgccttcggcattgccccccgcctttggctccgggaagctgatcatggagggctccctgggcttcttcgaaaaaagagaagctgacagtgtccagatgcagaacgtgctgtccatcaggaatcctaaacctcctgatagagaagcctgcagcagcgtcagtcccggtgctgcgacagctacttgtggctcaaggagaagacgatctttttaaagattttcatgttctttagcttttatcctctactaggtaaatacccaggagaacaagtacttggcattaacctgagggtttatcttgtcaagctgcaaaacgatctcacccaagaacttgtacccagaaccatctttcgcgtggaagttcacaggtcgaaagcagggtgagacagcagcttctgaacatttgcaacatttccaggaatctctgaagtagcttgaagagcaaacaacttgcttacaacctatcagagtaaaacaaagaaacaacagaaatccaagagggcatcatcacgaacttggcctggattttgggataatgctgctaatgcagcaaactgctctgtcatgttagtcgcagacttgtactcatgcagtgcaagctcaacgaaatctggctcattcaatgacgcaaggatgcttagtgggccaactgtagggatctttccttctacatacaacatgtgggactcgctttttggtaagtcaattatctgttaattcttctatttctgaatcctaaagaaaaatggtccctaatagcttatggtttacttgaaaagttcatgaatactccggtaacagaattcaaggtgatattacagaacaatcatatctaatcgctctttcgcatgctctatatgtattcttttagggagggcaaccatctttagagtagcaattagctgaacctgcaaaaaaaatctttttgttagccctgatttgggaggatttccccaaactagccaataatattatattggtaaaattaaaataaagtggacaaggaaaggcgccttgtcaggcaaagagaagagctgaagataggattagcttctatctatattgcagagtttgctggtaccaggaaacacaaaagaaatacaatactcctatctatcacctgtctagatctccttctagaaagaaaccataggatgaatggtgggaccaccagcatagcatgagtatacaatgaaagcagatcataaccaccagcattatagctgcttttaaaaagtaagtgttactctgaaagtttctccttttcaaggtcacaaatgattggatttttttggttatataccatttgtttgcttgcattatagttgcttttttgtggtttgaatctaacaggattttcctacttttgttgtattgtttgctttttttagaaaaaaacacagtaaaaatacgggcctctagtttataaacactcggcatgtagactagcgagatagtatatagattaaacaacagttaataaatgatattaggaagaagcttgtgtagcatcggtggccctatggggcatgctatgtcaacaatgcatcagtggccttgtcagttttattttgaccccctcaaggccttgcaaccatttcccaagccacagtatccaagagatggcagtgtcactcacagaagcagctgttcttagtatgtgatttaggaattcaatgaattatatctatgtatggttacacaagtcctatgctgacaatctgtaacatgtgtatgcttgtatttgaacctgaaacctgtgtaggctggtgtgagatctgtttgtggtatttttggtaacctgaaacctattttctatgttgtgtatgttgttttttggtaacctgaaacctgttgtgtatgttgtgcgtactactttgtagaaacctgaaatctgttttgtatacaacagcttctatgctggtacgagattgaaaccatagaaggtgttgttttgtatgctgcttgcatgcccaaggtcccacaaagcttctatggttcagactaaagaacctacagttttgtatggcatatggttccacaaggttacaaagaagttgatgttttgtatgtttaacctgaaacctgtgtttgcacaaggttccgacagcatcttccatggttcagacaacaacttctgcatcaaatagttttgttcagatttaacatagatttattcaaactaaaaacttttttcaacacatattctgtgttgtcctaatatggcgccggtaagggcgcctcgagttctagtgtattgaaaggcctgtggaccgaagatagat

SEQ ID NO: 33798 - DNA, 1049 bp, Zea Mays
cgaatttaaatatcttccccggacgcagacagtactacacatggttcagtgatgtggtttggtacgagagtttacacgattgcacgatcgactgtccacgcgacgcgacaagagttgacatgaaatgtagttgtcgaccaacaaggatgtttagcgtatgctgtatgccttgatcagacatgtgctagcttgtgcctggagccctctctcccccgtgaaccagcacggcgaactgggcaagcaggaccggccggtacaggcaatgcatgcatgcagcacgtacgggcaaggatttcgaaatgtgtcgcccggacccggtggtgcgtgcgatgcggcgtcccgggcattcggcaacaacaagcagacgacgccaccgccggcaacaacaagcacgggcacgcatgcatgctaaccatgaatgcaagcagcaaacacgccggtcggtcgggccccgtcgcccgccggccagacgccaccgccgtccccgtcgtggggccgacgtacgtacgggccgggggcaacatgtgtccgcgcgcccgccttttttacagtttccgttccgacgtgtcgaggaagaagggaaaattcaccggcgtgcgtgtgcagtgcatgcaaggacggatgcatgtaaatatcaaaatgcctgcctgcgtgcgtgagccggccggcggttgaccgatggatggagatggagccgagggcgcgaggcgaggagacggtggtgttggccgcaagcgccgcgtcgccttgcgcatggcggaatcccggggccggggccgaggacgatgatgagacgacggagactgggagcggtggccgggcgcgcgctggcgctgaggcgcggtgcgtcgcccattgcggttggttttgtctccgttctgcctcctttgtttggggaagtcttggcaagatccactgggttcgtcgcgtctatcgtcgacccatcatgtcgcggcagcgcggttggccctggctagtgggcgggcagtggctgctggctgcccgtgcgctgcggtgacgcgccggcagagcgccaccatgcgtggtgg

SEQ ID NO: 33799 - DNA, 3019 bp, Zea Mays
tttttttttttgaactctctagaaatggaggcatactgtcactttctcacactatactgaagttagctgtccctgaatgtttgaagcaatcaaccgatcttgttgcttctatttccaggctcaaggcaaagatactttctattctgctgcaactttgtgaggctgaaagtgtctcttacctcgatgaagttgccactaattcaaacagcatgcggctagggcaaaccttggctctagaggttcttaatttgctgaagattgcatttggaaagaaaaaatacattacttctgattctcatgataaggttaagatttaccccatgggatctatgcttatcagtgcattgcgtcttgttgacgtcttctctgatgattcaaacttcagatcatcctttttgactaacactgttccgtttttaacccagattctagcaactcctcacggtgaatttgtttctagttggtgctctgtcaacttaccagcaattgaggaagatgcaagtctagattatgatccttttgttgcatctgaggtggcactgttagcttctaataatgtgttgactgaagctaaagctgactattcatgcccttttcgccctagcctgccttcagtggcatatgcacagacaagaacatcatgcgtagtgaaaataatagcaaatttgcatgtttttattccaaacatatgtgaagagcaagaaagggatctttttcttcagaactttcaaaagtacttggtgtctgggagttctaaactgtcagcagaccagccagcttctagtgattttgatgccactaaagtctgtagaaacttaggatctttgtctgattatgctaaaacattggttcctaatttgttaaatggggaagacttgttgttattaagtgatttttctgataagctacaatcttggtgtaaatcacaagttgcagtaaaggtggtacaaaatgatattccaccagaaagcatggaggacatgcacccaatgcagcagcccttgccaacacgggcaagcactccggactccaaaatgaataactttccaaaggatgtgcagaacatggaagtgtctgcaccaatacccccaataaatcgggaaggaaatgataaggatgagactccaaagaacacagtctctagaaatggtggtttcctacagaatgcagttggtcaagacctagtccatcttggcgttgcaagaacagccagtggtggctcttcggccgtcacttccgttgttagcactggacaccagcgcagcaaaatggatcttgatccagcttccggtagcgtggacaatttcaaaacaccagaactcacaaaagaaaatggtctccagggggatgacaaaggagaaagtagtgtgtatgatgagaggcaacctaagagaaggaagcggaacattatgaatagtgagcaaatagatgaattagagaaggctctagtagatgagcctgagatgcacaggaaccctgttctattgcagggttggtcagagaagctaagtctgcagggcccagagatcacatcatcacaacttaaaaactggctgaacaatcggaaagctaagcttgctcgcattgcaaaagaaagagggacatttgagggagataatgctgataagccatctacccctcatcccggcgagtcttccgaaagtgctggggaggacaactatataccccctgcaagggtgatgactgctccatccaaaggcagactggtgagcccggacggcaatgagaaaacatcgcaggcagagctatcccccaacacgatgctgatccgcccattcacgagatccttctcactggagcccggtcggctcgtttcactagttgacagcgacgggaaggaggttggcaggggcaagatattccaagcgccagggaagagcccagccccagtggagagccgcatctgcacggttgatgtcaccgagctcaggaccgagaagtggagggagctcccacacccttctgaggcatctgggaggaccttccaggaggcggaggcgaggaatggtggaatcatgagggtctcttgggactccggcaggctgttgcctgtagtgtagcaaggcagaaacttttcgtcaggttgctgtataccgctaggcacaaggtgagcagagggagcctttggtttagggcgagagactggatcatgggattcttgggggcctaagtaacactgttaaaacctgtggttaactgtggtgtatccatcaactaattgtctcaagcaatgcaggtacggagtagttactaattttactgctggtgtttggtgtcacctgcaacgtgacgtggtaaaccaatgctgagcgatggagttgcatgtaaataattcagcactagaggaaaccaaaggggctgcataatgaactttagcttttattgtgggaaaaaaggtgatagcgttcttcatgttcgatcaattaaacagcaccagtaaattgatcatagggatgtggacttgctgaggcttgagtatatatggtgttcctcgagcttccttaaacaagcatgaagtttgtaggcacttcatcacttgttggtgagctacagtaatcttgagcccgaccctataaataacatggttcttaggctcgttaccaaaatgagcattacattacaaagcagcttttagacatatattggccaagaagatgttggagagaaatataagtctcaaatgttgagtgatatgttgcttcgtgaattattctcaaacatttaatgacgaggccacatacgaatttctccattgatttttttcactaaagacaccatacactgacaatgatgagatattggagagaaacaaaagtctcacataattttcattgtatatcatttgtgagattccgaactattgtttttatacaggtcaacatgctttagtttttgttaccatagtagttgtgagtaaattggttataacaagctaacgagcatcaaaggtcgcttcattcaagataattttatgttgctttaacaaacaaacaaacaa

SEQ ID NO: 33800 - DNA, 1632 bp, Zea Mays
aaaacaaatttagctgttttttctttcgacgttttcgtccctacctcgcggttggggctcgcggctctcgcggcccgcctgtgctactgctgcacccgcacggccgcgcgcacctccaccgcaacggtcacttctagctctcgtgcagtcgtgcgtcctccatcgtcgcctctcctcccgcggtcagggtaacgccgcgtgtctcccgtcgcatactcgctcacacccatggccgcaccgccggccgcctcgctagtggcacgcgccgccctcccgccgcgccttcgcccaaccaccgcttctccccttggccccgccgtcctcggtcccagcagccgccgccggtacctccgtctccgccgctcgccatcgctggcggggactgccgcggcggcggcgagctccccatccgtgccttcctcgtttccggggcccgggccaggtatcggcgatgccctcggcgacgtcgaaatctactccgcggccaccggcgagcccgtcctgttcagagacctgtgggaccaggacgagggagtgtctgttgttgcgctgctaaggcatttcgggtgcccatgctgctgggagttggcctctgttctgagggacacaaaggagagatttgattctgctggagtaaaactgattgctgttggtgttggcactccagctaaagcccgtattcttgccgagcgcttgccctttccgttggaatacctctatgctgatcctgatcggaaggcgtataatctcttgggtctatattttggtgttggtcgcacgttcttcaatccggccagtgcgaaagtgttttcacggtttgactcccttaaggaggcggtgaagaattatacaatcgaagccaccccagatgacagggcaggtgtcctacaacaggggggaatgtttgtgttcaaaggtaaagaactgttgtacgcaaggaaagacgagggcacaggcgaccatgcacctttggacgatgtgctcaatatctgctgcaaagttcctgtaacctaacccgacggcttgtcccacagctcagtaggcacattgtctttcatccattctcttttggcaattggcgttagcagatcccttatcttgttcacaagctggacaaggttctatatgctctgccgattccctgcatgccgatttttgcataacgtcactctaagttacttctgtacagtaggtacttggaaagcactttcggcgtccttgattcctgaacttccaggatcgcctgctgcaagagtgtcttctccaccaatgtgccgatattttcttttgagatgcttggtttactttgatatctttttggtgatggatcgtgagttgttggcttgttgcattatgaattgcgtactgtaagtatccagtttgctgtttagcacttatacaattcgaaagcaaagttcgaagtcctggctgcctggctcttccttggagatggaagtttttgcacttccagaaatatcgggaacataaagtccatgtgatcttttgtgcctttaaaattttggatcgtttcctaatggaaatctgttccagttttattgacatcagaaatcctatctcctgtagtcctgttattcagcgtctgagtggagctataaaattgatcttatcatt

SEQ ID NO: 33801 - DNA, 1278 bp, Zea Mays
gcagcactctttcgtgcagcggaggaaagaatcgaggcccttcttgaccgtccgatgaaagatccaacgcccacgatccccgccgcccgcttcacatagccacgccgcctcccctgtccctttcattggccttccgcctccacttgtacacgcctccgccacccgacaaactactcaataaccctagctaaacccccacgccgccgcggcgacctcctccgccggcgggatggacagcctcaggggagtcaagttgccgggcgtgccgaagggcgggagtgcgctcgtgaaggtggcgctgctcggcggcgcggggctctacgccgtcctcaacagcttctacaacgtcgagggcggacaccgcgccatcgtcttcaaccgcctcgaggggatcaaggacaaggtgtaccccgaaggaactcacctgatgatcccgtggatcgaaaggccgatcatctacgacgtccgcgcccgacccaacctcgtcgagagcacgtccggaagccgcgacctccagatggttgctgcacaagaagctgagcgtgccaagttcattgttgagaaggctgagcaggacaagcgcagtgcagttatcagggcacagggtgaggctaagagcgctgagttgattggccaagccattgccaacaaccccgccttcctggctctgagacagattgaagctgccagggagatctcccacaccatggcggcctccagcaacaaggtgttccttgattccagggaccttttgcttggtcttcagcagctgaacgtggggggcaagcaaaagaagtgaagcggtcgtccccaggccatcgcggatgagagtagtttcaggcgatggttttatctgttacagaatgcgcatgcgcgggaatgaacaaagtggcaccatgttgcagtctgtatgtactgacaagtttgtctatcgatctttgattctctgctcttgtaagtcgtgactgatgaatctgttgttgcaattgccttcctggaggcttgctctgatgcgtgtaacagccattccattgctcgtagtcgcagacgtaattcagcgtgtgagttcaatcaggacccgtgtgactggttgtggcatggtggtagcctggcccgacttgtctagtatgtggagccagatttcatatatccaggctaggctcatgctcatatttatgtttggttgtttgcgttcaggtcggataaagatatgtgtttggctgtatgcatcaataccaagatcaaataaagtaaataaataaatcttcaaaattaaat

SEQ ID NO: 33802 - DNA, 2518 bp, Zea Mays
cacccggccacccctgcgtgctgccgcgcttctctcggagccttgcctcctgcctcgcaccttcacgagctcactcctgctgctccattccacaatccacactcccccgcgctggactggagtcgagttgagcgcacgctctcgcactcccatattcccaccgaccatatcgctcttgcttcgctaagcatcctagatctccattcgcgcccatggggtgcttccagtccaaggtggcggggcccctgccgcccaacgacgccgccgcgctccccgccgacaagcctgcagatcccgaggcggcgaacggcgccgccgacgggggaggcgacggcgacgacaaggaggccgtgaagcgcgcggtgccggtgttcagggagttcgcgctggccgagctgcgcgccgccaccaagggcttcagcgccgacctcatcgtctcggagagcggcgagaaggcgcccaacgccgtctaccgcggccgcctcgatggcggacggctcatcgccgtcaaacgcttctcgcgcctctcttggcctgacccgcagcagttcctcgcggatgcggtgggcgtggggaaggtgcggcacaagcgcctcgtcaacctcattggctgctgcgccgagggtgacgagaggctgctcgtcgctgagtacatgcccaacgacaccctgtcgaagcatctcttccactgggataaacagcctttaccatgggaaatgaggctgagggttgcatattttattgcacaagctctcgaccattgcaatttggagaacaggaaaatctatcatgatttgaatgcttatagagtactttttgatgaggaaggtgatccccgcctgtcaagttttggattaatgaagaacagccgtgatggaaaaagctatagtactaacctggcttacactccaccagagtttctacgaacaggcagagtaattcccgagagtgtgatatatagctatggaactgtcctgttggatcttttgagcggaaaacacattcctcctagtcatgccctagatttaataaggggaaagaatatactgttgctgatggattcctccttagaagggcagtatgctaatgaagatgcttcaaaattggttgaccttgcatcaaagtgtctgcaatttgaatctagggatagaccaaacataaagtatcttttgtcttcagttggtcctcttcaaaatcaaaaggaggttgcatcacatgtgttcatgggtattacaaaagccacatcagtactgccagccatttattctccacttgggaaggcctgcgctggtatggatctttcagcggtgcatgatattttactcaaaacaggttataaagatgacgagggtgcagaaaacgagttatcctttcaagaatggacccagcaagtgcaagagatgctgaacacaaagaagtttggtgacattgcatttagagacaaggattttaagactgcaattgactactattccaaggcgcagtttttcctacttgatgaatgagcaagcagagcttgctctacgggacgcaatgcaggcccaggtctgcatgcccgagtggcctacagccttctacctccaagcccttgctctttcaaagctcggcatggaaaccgacgcgcaggacatgctcaacgacggagcaacatttgaggccaagaagcaaaacggctggcgcagttaggaaataaaagtctcctaactactccgtgtcgttgcccttcgaggaaaaaaaaggcgcaatcgctagtgtcctccaaatcagttcattgggacgtctgttgcacgaccaaggagtgggattgaaatgcactgttttatcgtgcaatctctgccctaatgccggcaacgagcggtggtgttatgatcaggagtggaagaacaggtcagggggctttgagtgcacaggcatagcttgctctcccgtgagttgcgctttgttttgcgagtggtggtggcaggatctgctgattgttgcaactgcagttgtaattaaagggatgctttctaacaatttctccttttggttcacgtcgaatctttgggctgcagaggacaagagtggtgtgcaaaaagccgggttcattgtgattagctacggagaataaactagaggcatcggaattccattcgattctaccatgtttgtatggagtttgtatgcggtcttattttttccccctttctatgaacaattctgtcttttttgatcgatcgaatcgtttcagatagtcagttgcgcatccaccgatttggtttcaaagcagcagatacgtgcttgtatatcatctggttgactggttgtcataaagaacttgcacaactatcggttgggaggcgcgtaattttattttaagtacacgagcaacttatcacttgctgttatttgttttcagattttttaaaattgattttaaatccttaaacttgtccctgtatttataaaattcatgtttaatctttaaacttatcatagagtgtcacccgacttcctgaaattcttaaaatatcatctc

SEQ ID NO: 33803 - DNA, 1207 bp, Zea Mays
atccaacggagtagccagcccactcactacccatgcccagttctccctgtccaccggccgccgccgccgctgccgtgcgcttaatcctacccctgtctgtctcctcatccagtgcaaggagcgcccaccgctgcctgtgtcgtttggtcaccggagatggatggggatgaggagaacgtcgggccgttccgccggactagcgcgcgcacgcgccgcatggccacgcgcatggcgtccgcgctcgccagctcggacaatcgcgcccaggctgcattagctcgccttgaagctcttgagagcgataatggtggggtcgaggtggtagatcttaatgatgatgagtacggatccacggatgaagaagaccctgctcgtaaactgcaaaggttcctgggttcaactcaaatgctctacccgctgataaactgaagttcattgatgtaagccaaacttctgttttctgctttcctcgatacagttctcatgcaaaaaaaacagtccaagatcatgaaacgtaaaacaaggcaagggaaagctttggagaagagggcagcaagatcactcatggatgtgctacaagaagcaaatttggagtccgttcctcctcatgtgccaacatattcaagggctgctgtgggtccaccgagcacttcatctcgacgccactactgctcagtttgcggtagctctgcaacctacacatgcgtgaggtgtgggacgcggttctgttcatgccgctgtcaagtcatacacaatgatacacgctgcctgaagtttgtggcttgatcggctggatatgtataagctacatttgatgtatgtccacatcctaatggctgttcatatgtgctctgatcagtatgatatacttgctgactatgtatcctactctgtaggtgggggtttggtaagttgtagaaaaccattttctcagtagtgtactgcagttgcaccgaccacttttgtttttttttcccagaaatgttgtgcgagctcgcagttatgcagtagagctgaaagtagctcttggttccaagatatctgaatggtaatttgagtgcttggcagtgtttcttgatggactaaactctggtattagatatgaactagtatgttaatatcacaattgaccagcttatgatatcaacaaacgtcaataaaatagtactgcaaatgatgtaatgcataatataatgttgaaacagta

SEQ ID NO: 33804 - DNA, 14157 bp, Zea Mays
cgctactttgcctgaatgtttgttggattggccagatgttgtaacagtaggaaatcatagcatgggaagcccgttcgtgcttacagctactttaagaaagagttacgaggtagctttgatggcagttggccagaagtggcctgtacttctctatgggcctgttggtgcaggaaaatctgcacttattaacaagttggcacacatagttggaaatcgagtactttttatccacatggatgagcaaatggatggcaggaccttattaggaagttacgtttgcacagagaaacctggtgaattcaagtgggctcctggttcgcttacacaggctattgtcaaagggttttggattgtgtttgaagacatagacaaagcacctagcgatgtgcgttcaattttagtgcctttattggagggttcaaataccttttcagttggccatgcagaggccgtggaagttgctgagagttttcgcttctttgcaaccgtcactacatcaaagaacgatgtttcccatgatctgccagggagactcacatttagtgcattgtggagaaaagtgatggtgggagaacctaatcagagtgacatggttaatataattaaagggtgctacccaagcttggagcccatctcctccaaactcatagatacctttgaaaaggtcaactctcttggatcttatcagtttggtagtctcaacttggcagggggtttatctgatggtgttctgcacagattttcattaagggacctgctaaaatggtgcaagagaatattagggactgacctcaactttgaggacctcagatttgcatctagtggatgcaaattaatctatcatgaggctgttgacattttcactgcttcattatcatctccggagaaaaggttgtatgtagcaggagaaattgctagaatattatgtgttccttaccgaggagaaacagtgcaacctactgaaaagcccgtcatccaggctcgacatatggaattgcaagttggtagagttacattgccatgctgcgacaaacctacattaatccagaaagggccttttgctgatattcggcgtgcattagaaattcttgaaagggttgcatgttctataaaattcaatgagcccattcttcttgttggtgaaactggtactgggaagaccactactgtgcagaatcttgctgcctggcttaaacaaccgttgactgtggtgaacttaagccagcaaagtgacatttctgatctccttgggggatttaagcctacagatgctcgatcgatatgttttcctctttatatggagttcaaggatcttttttctcgaagtttttctgcaaaggaagtcacccgtgaagataatttattcattgatgttatcaaactaagagtacaagattgcgttgggaatatcacttggacaaaaagtatgtggaggctatacttccttattgagcgttgctacagatcacgcgaacctgtcctccttgttggcgaaactggtggtgggaaaacaactgtttgccagattctaagtgctgtccttgggttgaagttacatattttgaactgccatcagtatacagagacatcagacttcattgggggattctgccctatacgtgatagatcaagaatagcaattgagttcaaagatcttgttgcaaaaatcaaacagatgaaaatgtttttttatgttgcagggaatgttccgcttgaaactgatgtatctggagctgatagtgtcatcagtcatctggatgaaatacttgacagatacagaaagaaaaaatatctgtttcctgaggtgtctgctcaagatcttggtgccatggagcaaatcaagttggatttgatgcatctccacaagaggtggcaagcaattttcctgtggcaggatggaccgcttgttcaagcaatgaagaatggtgatcttttcctcattgatgaaatttctttagctgatgacagtgtgcttgaacgcttgaacagtgttctagaacctgaaagaaaattgtcattggctgagaaaggtggttctgtgttagagaagattgtagcacatccaaacttcttcatccttgcaacgatgaaccctggtggtgactatggaaaaaaagagctttctcctgcattaagaaatcgatttactgaaatttgggttcctgctgttattgatgttgatgaacttaggagcataacttttgggaggttcaccaaaactgacttctcttgccttggagattgcattgttaacttctggaagtggttcaaccaattgcacatcgggagaacattgacgatacgggacctgctgtcatggatttcatttataaacgtgactgaacaaaatcttgggcccgagcaagctttgatacatggcctgtttcttattttgcttgatgggctctcattaggtctaaatgtttctaaaactgaggctactgagatgaggaatacttgcttgtccttccttctagaagaattgcagaaagttgggggcacggcagtagattcatacttgaatgatctaaataattatggctggggtgacaatatgaaaaaaaaagatatagatcatggttgtttggaagatcatttcggcattgcaccattctatattcctaaaggccattttccttgtaagcaacaggactttgaaataatggcgcccacgaccagtaagaatgtcttgcgagttttgcgtggtatgcaactacctaaacctctccttctggaaggtagtcctggagttggaaaaacaagtttaattgtagcattagctggattttctggtcatgatgttgtacggataaatctatctgaacagacagatatgatggatcttctaggttcagacctgccagctcaagggggaaatggaatggaattttcctggtctgatggtattcttctccaggctttaaagaatggaagctgggttcttttggatgagctcaatcttgctccacaatctgtcttagagggcctgaatgccattctggaccaccgtgctgaggtcttcatacctgagcttggtcaaacttacaaatgctcatcgtcttttcgggtctttgcatgccagaatccttcatcgcagggtggtggacggaaaggccttcccaagtcctttctgaaccgcttcaccaaagtttatgttgatgagctatcagaggaagattatctattcatctgtaaatcacgatatggttcattgatttctgaaagtttcatccgaaatcttattcactttaatagcagactgtatatggataccatggtatataggaagtatggccaacaaggttctccctgggaatttaatctacgtgatattatcagatcttgtgagatgatagcaggttccccaaatcctatgatggatgattcttttttaaatactgtttatctgcaaagaatgcgcacattggttgatcgccatgaagttgtcaagctttatgaggatgtctttaagaaaaagatcagcattcaccaaccaaaaatgctccatgttaatccacattgcttggttgttggaagtgcctctattagaagaaataacatccaatcatataaagtgcaaaacaatcaactcaacatatttccaggtgtccttaatagtcttgaagcagccatgcactgtatccagcaaggttggttgtgcattcttattggacaaaattcagctggtaaaacatcattaatccgcttgctggctcagctttctggaaatacgttgaatgagttaaatctgtcgtctgcaactgatgtgtccgaattgttgggatgctttgagcagtataacttctttaggcactacaaaactgttttatcagaagttgagcattatgttgatgtgtatttcagcctgagtattgatacgaaccagaagaattttgttgcagaaagaaggggtttgtttaccaaatggtttgaatttgtggctgcaaaagggcactcctcaattaagacttcgaaattaatgagtgggaatgcatctttgccttcattaagcttgcttgctgaaatagttgagcagatgaaatgtgatctggaaatgtttgacttctctataccattgacaaaagatgatcttagtgaaacactgaagtccatcaacaacttgcagcaaaatggagctgcacaccaaccagttagattcaaatgggttgcgggagatttgattagagccattgagcgtggtgaatggattgttttagataatgcaaatttttgtaaccctactgtacttgataggataaactccttggttgagcaagaaaggtctattatggtcaatgagtgtggtcttgttgatggaaatcctgtagttatcaaagcccaccctaagtttcgaatgtttttgacagtaaattcaaactatggtgaagtttcaagagccatgcgaaacagaggagtggagatctttctgatggaccaaagttggaatctgaaaggatttagcaatgtacctggggacagtgaacggaaggatgtgataagatttttaatttcttgcggaatacccagaatggaactggtctcgtcaatgtgtgaagcacacatgtacgcaaaaggtgaaggttcacgtgttggtgtgaacattacccttcttgaaatcacgcgctgggttcagttgttccaacaactgattgttaaaggaaatcagttcctttggagcctgcatttgagctgggaacacacatatctaccatgtttgggtgaaattaatggatctggcattgtggaggaaggaaaaaataagtttttgactaattttgacagatctgaaattttggctagaaactttagttttttgactgtttttgatggttgttcaactagtttgcattctggattatctttgtccttgccgggtggttggccaattgagcaaaaactaagggatctcatttggtattcaaaagaaacttgtgtcatgaggaattgcatgtttctacagtcattgggtgcccaatacgctgcttatcagataagcagtttgaatgataattcattattgttgggtcagattagtctcatccacccatctattcttcctgctgcaagcttacgcgaattacagtttcctacggttaatggtcagcctgtcaaaatttgtgtcactggggcattcaattcatacttagctgatcagatgcttttctttgctgcaaactgggtaatggagcaatgtactaaaaacgatcttgaactatatggcaaatggtttaattggtataactctctggtccagccttattgcaacttctttgagagctattggtatattctggagcaagaaagtgagcatcctatttggcataacatccttgaatattacagggaaatagttgcctatcacaatattgatattgttactcagcatattccattactctcgaagaagttgctggatatggctggttgtgatagcctgaaagcatgccaaaaccggctgcatcgttcttttaaggctttgggcttgttgcggcttactctgcagcaatggcaaattgagacaaaatgtcctgatctttctgtcctggaatgtactttgttgccagcattgaagtccctcagatgcttagagggcgaggtacttaaaacgattgcgaaatcttggaagcggctcaaaatatactctctccttcttgattaccacagatcaatatggaaaatgatgattgcatctcagttagaggggctaccaattgtttggaatcttttgaggaaagaaatactgaagttgcagcagaagttcccggttgaagttgacgtctttttgatggaatgtgtgaatctcaacaatataaatgataccaattttcaatatggtaaaccaactttgtgggattatggtggtcatcctcatctgccatcatctagcgagatatttgacaaaatgcaagaacttttgtccttcacaacagatgtgtggccaaggaagaatcttttgaatatagagcttgatgataggaaacagttgactgatgctatgctgtcagccaacaaggatcttagacaccttgcaatggaaggtgtctctatggcttgcattgctacaatgaaaactgaggaagatgttttagctgttgtcccccaattggatgaagttcacaagcggcttgtaggaaaggttaactctgtgagggataatcttggattattgtccaagacatcagtgcctgaatttaagttctgttgctcagtgtcctctgagattctatgtaacatttatggtttcaatggctggctagcaagtcttcctttgctcaacttgaagagcttaaacttggatacccttttacttcaacagctatgcaagtgcacacaaaaagattcttctgaaactcatgagattcttgttaattctgagtacctgctgaagtatgctatggattactcactgggttcatcttcaagatctcctctggactatattcaacatcagatcatttggtggatttgtcatgactgggccaaagttgacaatgcacatttaaaagttgctagttgtattcttgaaatgtggtacaactatcactcttccttgtggacttattgctcaggaagcccaaagtgtctattctcagtcacacatgatgattcctgtgacttggcacacctgacaaaaatggacgccatcaatactattatccagcaggatttacatgtggtggattatctgaagagtggtgtaatgcttaaagttgcatctagaaacctctgggaaggtgtttcgtgtttgggaaactttgtttctagtctgcactctgctgctgattccctctttaagcagattatatttgtccataagaagcatttcgaggaagagaactataaccagttagagtctctcctgttccaacaatcgagacgtttgatagagaaagaagatctggacactgtttgtgctctgttatcatcttcaagctgtagagtattggcttcgctctcagagtcagataaactcgtagaatccttgcttatggacttgtattcatcctactcccgtgactctttgttgcataccggagctgcttgggtccgtattggagagttacgcttccggttattgttgagctcatacagtccagatcctacatttaagtctagatacaagcattcacatattttggaaaaaattacacttgtgaagcttgaggaaaaggttcgtcatgattgtgaggaattagctggttctaactcccctgaagatagccatgacaacgagttattgcaattgctggaaattaaagagaaagacacccgtgcaaaggttgtatttcgtcctcgacaatctaagcataagagtctcattgctgcatgccttgagtttgaggaccgcctgtctgagtgcaaggacttgttagctagcttaacttgcgaaggacttgggcaactagaggttgaccgagtgtgcaattggcagataatatccatgaactttatcaagaggctgacagaagattatagggaatatgttgatttgatccagccaattcaagttgctgtatatgaaatgaaacttggcttagcaattgctctatctggttctcttcagagggagtatttgaagaagattaaagaagatgatattaatagagttcttggagcaatttatgcttttatgcagtttccctctggatcttttactgaaagggttgtaactgacgtgactgatgatcttacaaattatacaatcactggccaactaggaaccctaaacagttgttctggagatgtagatatgttgaagaagcttgctgctatgtcaagtcagttgaatgtttgtaaagttgctggcaaagtgaagtccctgtccgagatgcttgcttcagtgcatcatatttttttagtaagaacagctgattgtgtcagctgttcccttgtcatggataagtcatcttatgcgtcattgaaggatacctttgatcattttacaagcatgtggatcaacatgaaataccgtttgaaggctaaagaaagcgatgattctcagtacttcaagttcaaatcgcgaatgatcagtatagacgacatctttaaagatgtgccgttgctttctgatatggaatcagaagacagcattttagataatgaagaaaaactagagcatgaatttttcaaaattacggaaagtattgatgacgataatggtgttgttgaagacaactgggatttgataccagagtctgctcttaaatgtattgtgaccatacatgaccaattgtttggttcgcccgatctttttgagaagcgccgcaaatgtcaagttagtgatgcacagaaagtccagtctttcatagaatcatatgagctgggaacaagaatacttaaagacctcccggaattaacatgttctatgtttgatgaaaagctcatgcctgagcacctatttcgtgtttgtcttgaataccaacgatcctgtgcaaaaacacatcaagattgtagtggttataatgcttacaaggatccaaatcctcctgtcttgtttaaaatggttgagtcactaactacacttcaggagagagttaatagctatctggatgaatggcctgatcatcctggtctcttgaaaatactggacctaatcgcttcccttttagcgatgcccctaagcacgccaatttcgaaggtcttgcttggattgcaattgctggctgggaaagctcaaacattgcaggaaaatgactccaagttctttgtaaaagatcatcttgcatcgatatttttgcttgtgtattcatggcaaaggctcgagttagattgttggcctatactgcttgaggaggtccagacaaagtatgagttgaatgctgcaaagctgtggtttccattgcgagccttacttactcaaacttctggtattccagtggatgatgatttgtctattatcagaagtgttgaggaatttgttcaaacatcaagtcttggagaatacaagagacgattgcatatcctctttgccttccatggtgagatttctgctggtgctagcttgggtagttattcaagtaatgcggtgaagaaaatccagaatattctgtacagtgtgtttggttactatatgcagtttttgtcactcgttcatgggaaaattgaagaaggtaaaaaaaacattgagaaggagttgaaagatcacgtcaagctttacagctgggagcaagcaccatatagcagcgcttctattgaaaattttaaaaggactaggcaaaagatttttaagcttctgcaacggttcaatgatattttgaaaagtcctgtcatctttctactgaatgaagaagccacatcaaggaagattccatgctggcttgatcctcagaggcctgaatcacaccttcctgttgactctgaaaaatttaacaaaaggtttctgtggtaccacaagtgggcaagtgagacgtctttatcattacaaacattgcagcaatcaaatggtagtactgttggagttcctactgccaaagatatggtatatgatgtgaagcactggcagaatgaaattgagctcaatgacagattgcagttcttctggatctcacttgagagaatatgtggggcagctaattttggtagtacagtgaagcatgggaaaaagaatcagaagaaaacagctctatccaatctgttcaagactcttgaggaatgtggactatctaagcacaggccaatgagtcatgagtggggagatgagctggcagcaccaagtccattgttcttggagcagtcatatgattctgcacatttattacagcaaataaactctcagaaaatgctggaagatgttagcatcaatcattccacactattgaacacagataactggaagcatgcaaatcagcaatacttcaaatgtttagcaatgatgcaacaacttcgacaggtttctttgaagtttaacaaagatctaggtttggaagaggttaacaaggctatgtcatttatgagtcatctgttgactgtgttgtctgaacaacgacatcttgcttataatctatttgatcaacggaaccaattcaagcatgctattttcttattaggttctggaggaaagagtaaatctctatcatcaagccaaaatgtgctgctgagttccatgtggcagcaaaagaaattgtttgatgctgtaatcactttgataacagactccaacttattgctcagaagcttcaaggattgccattataactcttgtaacaactttatagaagttgaagggatctcatctctccttggaaagttcatcttgaatttttctgaatccaaggagttgttagatgaatgcttgcttggatccactaatatatttgctggtgcatataagagcatgcctcattctgcaacagagatggaacaactttttactgataattgccagcatatagattcattgttggatggatacttgcctggatccaataatatatttccagatgcatataagagtattcctcttgctacaacagagatggagcaactttttgctgataattgccagcttatagattcattgagagaagatatgaaggttctatgccacagggatctttcagtgggatctgttaagaaagttcttatctctcgtttggaagaattgttggagaagggcaagatggcaatggagaaccgaagacatgttgaagaaaatcataagctatgcttaaagcttgaagcttcgtatatagaaattttgaaggaaactttcatgttagttgttggtgctgtcagaaagctcactgatcatgaagtatgcagtaatggaactgaaaaatcgccagttggtaatgttgcatcatggaaagatactttgcagacatgcattatgaatcttaaattggatgatatttgtgttgctggtgaaaagattcgtattctagtgaggttgctggttgactataaacctgatatacgtactagtatagagctgcacctaatgcatcttcatgcttggctgagtgtgatcctatcatcagcagaagggatactttccgaacttttagaagcacacataacaacttctgaaatgactcttgcacttggggacctttttattcatttatttacggatgggtttggttccactgaagatacagccgaagatgcagatgaactacagcaagatgctgttggaagtggaactggaatgggtgagggggatggtcaaaagagtgtaagctctgatatagatgatgaatcacaacttggtgacagtaaggacttgacatgtaaggcagatcccgctcctaagaacgatgataaagctgttgaaatgcaagacggttttaatgcacaattatctgatgtttctgaggatcttgaaggcaaagactcgggtggcgaagatgaggataccttggataatcagatgggtgatactggtgatgcaagtgaagtggttggcaagaaatcatgggataaggatgaagatgatgatcctaagacatctattgagaaatatgagtcaggctcatcagccaagggaacacaacaggatgatagggaaatgagagctaaggatgatggttctattgaggaggaagatccgatggaaatggattctgaggaaggaaagaataataatcttgaacatgatcctagtacccatgatgaaaccgaactgaatactgatgaagtcatggacaaagctgatgcatatgatgaccggactggacctgaactccctgaaccagagaatgattccattgatgttgacatggtggaacaagaacaaacggatgaaataaatgctgacaatgaagatataggtacagaagaagctgaacaagcagatcagaggttagatgcttcagatgatatggaggaaggagatatggcacaacatagcgatggtgtggtagataatgaaggggagcatgttgaagatgcaaatacagacgcaggtgagatggattcacaccaattggacaaggcggattcacttatgcctctgtcacaaggcctacagcctgacaatatgcaaataaattctaatggagaatctgaagcgaacttggccaacagcagtgatatgcatggcgctgttgctccttcagtaaatttttcaggaaatgaagtgcccaatatggaaatatctatgcccaatactggtaacgattcaatactatcgtctaactccaagccagatatgcaaaatgatgctcagcagcacatcaagcagacaaatcctttcagaagcatcggagatgcattggaggactggaaagaacgggccagagtctcagctgatactcaggatcatcaaccagaaactggaaaagatagtagtgagaacactactgaatttcgttatgtgcctgagggtgaggagagcacctctcaggcattgggtgctgcaacagctgaccagatcaattatgacaatcagattaatcaatctttcttggaagatgaaagctgtatcaggaatttggaacatagtgatgagagaacacctgataaccctgaggtgccttaccttcaaacttcacaagcacttcccaacaagtctgaaaatgccaatgaattggatggaagagaaattcaaactgatgcatccgttcaaaatttagttgaaagaacagatcacactttccaagatctagtttctttcaaacaacccccggcagatgataaaatagctcttattgacctaactactgacagggaattgccttctcagatggatctcgacatcactgatgcagagacaaaaagatctaatgcggtctggaaaaatcttgagctcgcaaccatgaaattgtcccaagaactggcagagcaattgcgcctggttatggaaccaactcttgctagtaagcttcaaggggattatagaactggaaagagaataaacatgaagaaggttattccatatattgcgagtcatttccgcagggacaagatatggttgcgccgaactaagcctaataaacggaattaccaagtggttattgctgttgatgactctagaagtatgtctgagggcaaatgtggaaaatttgctatcgaggcattagttactgtgtgccgtgctatgtcacagcttgaggttggacaatttgcagttgcaagttttgggaagaaggggaacgttagtgtgctacacgattttgatcagatctttaatagtgaagctggagttaatgtgatctctagcttgtcgtttgagcaagataacaaaattgaggatgaaccggtgtctgatctcttgacacatctgaatgttatgcttgatactgccgttgcacgggcacgcaccccatcagggcaaaatcctctccagcaactgatactgataatatctgatggaaaattccatgaaaaggaaaacttgaggcgccatgttagagacgttctaaatcgaaagaggatggtcgcgtatgtgctcctggatagccccgaggattctattattaatctaaaggaagcatgcttcagagtaggggagaaggtagagctgaaaaaatacatggattcctttccgttcccgtattatgttatgctacagaacattgaagctcttcctcgcacattggccgacctgcttagacagtggtttgagctcatgcagagcgccaacgagtgacccttgggagttgggagtagtgccacgcatttagctgtacagcaaactacattctagcttccatttttgcttgggcctggacagttctgtggtggcaagcttgattgtgcacaaatgccttcacggttcaaatcgctttcctgaaatatgatctctggtcgcaggcttgattgtctaaaagcatcatcacaattcaaattgtttttgggaaatttgaatagaatttccgctttcctgaaatatggtctctgctcgcaggctttattgtgtaaaaacatcatcacaatttaaattgtttctggcaaatttgaatagaatttccgtgctcaagagttatagtttgttttttttttcaatggagaattgttgctcacgtgctacatgcgacctgagtgtgattgatccttcaatcttgccctgctgttcatcttgtgttgtttgtcatgtttggctttgttgatgtacatgtttcttccactgcatgtgctacgcgttgacgatgtacgcaactgtcgctgccaacgcgaccactttatatatgtgacagtgacacatgccaggggcag

SEQ ID NO: 33805 - DNA, 2015 bp, Zea Mays
aggtggttgagacttatatactgcgacggacggagtatttgcacatttcataacctgcttcattgtttgagctcatgcaaggcgtaaatcttattgcaagaagggcagctgtgcatgttaagtctcaaatatagactcacttgataacactgcatgagaggttgaaaacttgaggtacagttgatattctggttcagagtatgggttcaaggtttgcatcacatcagctgagcaatggcctgtatgtttctggtcgacctgagcaacctaaggagaaggccccaaccatttgttccactgcgatgccatatactgggggtgacatcaagaagtctggagagcttgggaagatgtttgatctccatgttgagaaatcaagaaaatctggtcctctaggaaacgctccttcaaggaatacttcatttggaggcactgcttccaattctgggcctgtctccaatgctggtggtcggtccaactactctggttccctttcatcttcagttcctggtgctggtggatcagccagagcgaaatcaaactccggaccactcaataagcatggagagccaacaaagaggtcatctggtccccagtctggaggagtaaccccaatggcacgccagaattctggcccccttcctcctgtgcttccgacaactgggcttatcacatctgggcctatctcttcagggccacttaattcgtctggtgctccaaggaaagtatctgggccacttgattctgctgcatcgatgaaaatgcgggctacttcctttgctcacaatcaagctgttactaatctgaacactgaagatggttactcaattcagggaagctttccgaagccaatactctgggctgtgattttgctctttgtgatgggttttatagcaggtggcttcattttgggggctgttcacaatgcaattttgctgatagttgttgtggtcatatttggttttgttgctgcacttcttatctggaatgcttgctggggtagcagaggtggaattgggtttgttagtcgctaccctgatgctgatctcagaacggccaaagatggacaatatgtaaaggttacaggggttgttacttgtggaaatttccccctcgaatcctcgttccaaagggttccaagatgcgtatacacttctactggcttgtatgagtacaggggttgggattccaaagctgccaataccgaacatcggcgttttacatggggtttacgttcaatggagattttcagtccgggcttcgagcattggtgaaaacaggatatggtgcacgtgtgaccccatacgttgatgaatctgttataattgacatcgatccagacaacaaggatatgtcccctgaatttttgagatggctaagagagagaaacctttcaagcgatgatcggacaatgcgcctaaaagaaggatacatcaaggaaggtagcactgtaagtgtgatgggggttgtccaaaggaacgacaacgttctgatgattgttcctccatcagagcccatctcaactggttgtcagtgggccaagtgcgttctcccgaccaaccttgacgggcttgttttaagatgcgaagatacttcgaacattgatgtggtgccagtttaattagcggtgaagagtcgttgccaaagaaagtgtctgttaaatatgagtctgaattgtttcatgcaatgttagttgacaaaaatgtgcaaatgttgggtgtgattatggcaggtggagggtggttcgttaagctggcttttggatgtatagtttctttttcttttagttgtgttttgtcatttctttttaattttcagctccgagatctgaaacttgtgtaaccagatgcctcttaatctaaatcagcgtggcatttagatcgatttgaaagcttacaggtgacaggacttcggatgtacattcttccccttttattgtgttgtcatttattttcttttttaatttcaactcagatctaaaacttgtattcagatacatgaagcagatggtttgc

SEQ ID NO: 33806 - DNA, 1759 bp, Zea Mays
acgtatcagtgaactcgctatcccccaccgcccaccggccgccccctctgctgctgccagcaagacgagccttcgaaccttccagttccatccatcgccgccctcctcctgaggagcatccgaaacaagagcagcggcagccgccaacgcccgcgcccgccatcccgacgatgcgccgacccacactctcgctcgcgctcgggctcgggctcgggctctccctcgtcgccctcttcgcggcccggggcgcccacgcctcaatccacgagtacggcggcggcgacttcgcgccgcgggccaactccttcttcttccacggtgggagcgaggggctctacgcgtctgaccactcgtccaactcctccgcatccttcatcagatttgacaccgttgtatttcgtcgcaccctggagtcagcatctaggcatgaggagatgcaacaaaagacaggattggtggaggctataattgttgagatacaggatagaggcaaaattggaggttcatatctgcactctgatgcaatatgttgcacacctgagcttgataaggagaaatcttgtagagtaggtgaggtgatcatacgtccaaatcctgagaaccccgactggcctaagaggatccagacattctttgatggtaaaaatgaagaaaccactatggtaactcaaattgtgtcgataaacaaaactgggatgtattacctctattttatgttctgtgatcctcaacttaagggattgaagattacaggaagaactgtttggagaaatccacagggttaccttcctggtaaaatggctccaatgatgacattttatggtttcatgtcacttgcatatcttgtacttggacttctatggttcattcagtttgtgcgatgctggaaggacattttgcagctgcattaccatataacagctgttattgctcttggcatgtgtgaaatggctttttggtattttgagtatgctaactttaattcaactggaacaagacctatgggcattaccttgtgggcagttacatttacagctgtgaagaagactgtttctcggcttcttctattagtagtttcaatgggctatggtgttgttctacccacattgggtggcataacatcaagagttgctgctcttggtttcatctattttgttgcttcagaagctcttgaacttgttgaaaatctgggaaatatcaatgacttctctggaaagacaaggctattcctagtgttgcctgtcgctgtacttgatgctacctttatcatctggatattttcatccctctctagaactttggagaagctgcagctgcggagaagcatggcaaaacttgaattatatagaaagtttacaaattctctggctgtatatgataaaacggtcaaaggcaatggaaagcaattgcatcatgggaatgagcggaggagcaagagccaagttttatgtcgttttccctcttctatgtggtgatcataaaatagctatatttcaatgcaactgacccgttgagtgaactttggcaacgggcttggatcatcccctccttttggaatgtcctttcctatgccctcctcggcatcatatgcatcctttggtctccatctcgcaatccaacaggttaccctgtgaagaaggcagcacaagcatatattctgaaacagatttacaaacgtattctttataatattcataatgaactttgctgtaaagcaacttctatcttccatgaagatgttccctgttcaactatatat

SEQ ID NO: 33807 - DNA, 2353 bp, Zea Mays
ggaataaggaggagccatgattggaagtccccccaataggccaaaacaagcatgacgcgattggccgtccccaacggccaacgagttgtccgccccgcccctcgctttcgtccccgttttccggtgccttgcttccccctcctcactcaaatgcctcacaggccgaggctccgaggccgcggggaggaggaggagcggcagccagcaggggaggaggacacgaatcgtagtcggcctcccgcccgccccggcaattgttgttgctgctgcgcgcagggcggttctggattgcggtctgccccacccacgaacaatccatggctccatctccgcctcggcgtgctgcgctcctcctcgccacggtgcttctgctggcggcggccgggtccacccccggcgccacggctgctggcatcttccaggtgcgccgcaagttcaccgccggggtgggagggggtgctggcgccaacatcagcgcccttcgcgcccacgatggcacccgtcacggccgcctcctcgcagccgccgacctccctcttggcggcctcggcctccccactgacactggcctctattacacggagatcaagctcgggacgccacccaagcactactacgtccaggtcgacaccggcagcgacatcctctgggtcaactgcatcacctgcgagcaatgcccccacaagagcgggctcgggttagacttgacgctttacgaccccaaggcatcctcgaccgggagcatggtgatgtgcgatcaggcattctgtgcagccacctttggcggaaagctgccgaagtgcggcgccaatgtgccctgcgaatatagtgtcacctacggtgatggtagctcgacgataggttcctttgtcaccgatgcgctgcagtttgatcaggtgactagggatgggcagacacagccggctaatgccagcgtcattttcgggtgcggtgctcaacaaggtggggatttgggaagttcaaaccaagcccttgacggaattcttggttttggtgaggcaaatacatcaatgctatcacaactaactaccgctggtaaagtgaagaagatatttgcccattgtttggataccataaaaggaggtggaattttttctattggggatgtggtgcagccaaaagtaaaaacaacgccattggtagccgacaagccacactacaatgtgaaccttaagacaatcgatgttggtggcactactctacaactcccagctcatatttttgaaccaggagaaaaaaagggtaccataatcgacagtggtaccaccttgacataccttccagaattggttttcaaagaagtaatgctcgcggtatttaacaagcatcaggatataaccttccatgatgttcaaggttttttgtgtttccaatatcctggaaggtatggtttagtagtttacacagttgtaaaagtactaattattacctgcaattccttccatgctgtgtttcactgaaatatatttattgaattattcgatggataatgtcctctaatacttctttcatgaattgacatcctcgtctgtttgcagttgctctgttttcatttgaattggcacaaagacgaatcaccggctgaccggcccatatattagattctcttgctatgattatgattctaactgttgtgttcatttctcttgcagtgtagatgatggattcccaaccatcacattccattttgaggatgatcttgcactacatgtgtatccccatgagtactttttcgcaaatgggaatgacgtatactgcgtgggattccaaaatggtgcatcacagtcaaaggatggaaaggacattgtgcttatgggagatcttgtcctttccaacaagttggttatctatgacttggaaaatcgagtcattgggtggactgactacaactgttcgtcgagcattaaaattaaggacgacaaaacgggcgcaacatctactgttaattcacatgacttgtcctcaggatggaagttccactggcacatgtccccggttctattgttggtaacaacggtgtgcagttatttaatatgctaactccactgtacaggaaatccatctggttcgtatatcctttccacgaaaaggatcggagagatgtagggctatctttaggttgtgttctccgaccacggaaaacaatggaaatagaaaaatactgtaatgctatactgagccattgtttgactagggtaatgccgaggtgaccgcacgtgagttcagtttcccgtttaaaaaatatgcatgtacagcagcaatgtatatggccaaataagaatttcttttgtttgcagtacagcaatgttctgtcatttctttgggaaaacaa

SEQ ID NO: 33808 - DNA, 4271 bp, Zea Mays
tggcgtccgctttgctttctacatgtcaatgactcaaggggcaagcacaagactgctggtggagttccagtcgagacagttttctgccgagagagcatatataattatttgtgtaagaggttcttcgcaattgccaatattgagttatcgaaaccaggaaatctgaggcatcatctgggaagaattttagcgatagatcgagaatctaatttcgttgctgtcagttcatatgaggataagtttgcccttatacatgtttctgtttcccagagtggttctggcagcggtattatttctgagaagaaatatttttatccaccagaaaatgaagatgacgcaaggatcataacttcgtctaggaccagcatccgtggtacaatttggacaatgcgcttcatatctgtgccccaagatgaagaatactatccagttctggcaatgataattaacaggaaaggctctgatgtgaatgacttgtcgttatttggatatgactccagcagctgtgttatcaaccacctctctagttattcagaaattggacctttggtacttgacgtatcagaaattcctgaaacgtttggctttgcacttctgttgcgtgttggtgatgctttattgttggatcttagaaatccaacaaatgtctgctgtatccaaagagtcagcttgacgactaacctgattggagagccaatcactgttgaagatccctgtccaggattagatgttgatgatgatgtggctgcttgtgctttgctagaattgagagattctggtaataacataatgaaggatgatggttatatggacattgatggtgttgacagcagaagtaatgtgaaaccaaggatcgtttgctcgtggagctgggagccacctgaccctgtcaggcgaggatgtgcaaggcttctattttgtttggatgatggagaatttcatattttggaatttactttggatgttgaaggggcgaagctgtacacatttgaatatattgataggactttgccttgtagacctcttttttggatgaaaaacagaatgataatagggtttgtagagatgggggacggcatgatttttaaacttggtcaccgcaggttgcttcataaaagcactattcagaatgtagcaccaatattggatctagcaattgctgattaccatggtgagaaacaggaccagatgtttgcatgttgtggaatgtcccctgagggctctcttcgagttttaaggaatggtgtcaatgtggacagacttctgaaaactgaagctatttaccagggtgtcactggtttgtggactttgagaatgaaggcaactgatgcctaccattcttttcttgtgttgtcatttgtggaggaaaccagaatactgtcagtaggactaagttttaatgacatcagtgatgccgtgggattccagcctgatgtttgcactttagcatgtggtttggtggctgataatctgctagttcaaatttacagcaaaggtgttaaggtctgtttgcctacagtatacgctcaccctgaaggtgcccctttaacttctccaatttgcactgactggtatcctgctatcactatcagtgttggtgctgtaggacataatattgttgttgttgctacatctaatccttgttgcttatatgtccttggtgttagatcatcatcttcttaccagtacgagttgtatgcaacacatcatgtgcaattgcagtatgaagtatcatgcatatcaatcccacaagaggattgtatacatgataatgtatctttcagctgtggagagggtgatgacatttgtaagaacccccctcctaaagttaatgtttgcaagtttgctgttattggaactcatagaccttcagtggaaatcatctccttggaacctggagaagcattaagggtattaactattgggactgtatctgtgaataatgcacttggcgcacctatgagtggttgtatacctgaaaatgtcaggtttgttgcggctgagaggttttacattcttgcaggcttgagaaacggaatgctactcagatttgagtcagaaacacgtgattatctccctggttttctctacaaggactcttctattccttctgttaatacattccttcagttgatttcgatacggcgtattggaattactcctgtactgttagtgccaatacatgattcagctaatgctgacatcattgttctcagtgatagaccttggctattacatgcagcaagacatagcctggcatattcgtccatttcatttctttctgcttctcatgtcacacctgtttcatctgttgattgccccaatggtctactgtttgttgctgagagctgtttgcatttggttgaactggttcatgggaagcgattgaatgcacaaaagttttcaattggagggactccaaggaaagtgctataccataatgaaagcagaacactgttggtactgagaactgggctaaatggtgcatcgtcttcttcagatgttgtacaagtagatccacaaaatggggtattactttccagatataaatgtgaacctggcgaaacagcgaaatgcatgcaaattgcaaaaataggaaatgatcaagttttaattgttgggaccactaagtctgctggacggccgatgatgtcaaatggtgaagcagaaagcatcaagggacgcctgattgttttaagcttggaggccgttgaaagtcctcgtgagagcagttcgtttattccaacttttagttttaatccctcttcacattctggttctcctttccacgagattgttggatatacaactgaggaattttctagtaacagcatgtgcagcagtcctgatgagtttagctgcaaccagatccaagctgaacaaatgacagggcaattgagatcattgactcaatatatattgaatggcgcagttcttgctctgtgtccctatctagatcgttatgtgttggcagctgctggtaatatgatttatgtatttggtttcacaaatgaaaatccccacagaataaaaaagtgtgctgttggtaggacacgatttacaataacttgcctgaagacatttgcatcacgaattgctgttggtgattgtcgtgatggtgttctcttctattcttataatgagagtcataggaagttggaattggtctattctgatcctgctcatagattggtgggtgatattgctcttttaaattgtgaaactgctgtggtatcagatcgacgtgggagcatatctgtattatcatgcaccagattggaagtttcagaaagtccacagaagaacttagccgtgaattgttcattttatatgggtgaaacagccatgagcattcagaaggctgcattcaggtatcggcttccaattgatgatgatactgacccggtgcttgagacagtttacaactgtatcgtggcaagtaccatgttggggagtctctttgttatgattccactttcaagtgaggagcatcagcttttgcaagatgtccaagaaaaactctcagtacacccattaactgcaccggtcctgggaaatgatcatgcagagttccgtcagcgtggtaccccttcggtagtgcctcccattcttgacggtgatatgcttgtgcaattcttggagctcaccggtgaacaacagcaagccatccttactcatgctttgccagggaaggggcaacataggcccctctcggttttccaggttttgcaaacattagagcgcgtccattacgctcttaactgaggctttcttcaatcacagttactacaaggtttggatattagagctggttgaccttcattgtttgagatgccgtcagagctgaggttttagtgaccttcgcaatctagacggccgattccaagtctgccatgatatttatcagaacgtttgattgatgatgcaactggagcttgatactgggaagtctcatggtggcgagtatcccgtggaggcaccagattcgtcgaacctcctgtgtatatacagtcggccgcttttggtagactgttgtatggcgcattctgcatagaaacgaatattctttccgtttgtttcaatagataatgtaatgtttcttacgtcagctggtcggatgctcaacgagaaataagggaaacaatgaattgcattggccgtcctgctctatcacatgccattactgattagtgatgaatgcatgcaccagctgccgcagtgatgatcttgccgcggcagctcctggtcagggacggcgcccacggggacgc

SEQ ID NO: 33809 - DNA, 300 bp, Zea Mays
gcgttcgcccatcgtgtgccgtggccattggagagagatggtgagcgcaggaaaccaacaggggagatccgccgccgcactcggggagagagaaaggggggagttcatcagatcgtgtggagcgaaggtcggggcgctagggcctgccagagaggttcgctgatgagcgtagaagttcatcggggtattgggtttgtttcctatggagtgcatcgtcgcgcgacgggatactccccggggcagccgcaatttctcgcgggatccagaaccagctgggaccacgccgctcgggaccaaccc

SEQ ID NO: 33810 - DNA, 210 bp, Zea Mays
tcgacaacagcctccccaacggctaccttggtggttgggggctataaatatcccccaaccaccacaacttcaagcatccaagttttttgaacatcacattcaatacaagagctctagcattcactccaagacacaatacaaaagatcaaatcctctccgagtcccaaattcactccaaacacttagtggcttgtgagagagagatttttg

SEQ ID NO: 33811 - DNA, 2816 bp, Zea Mays
atgccccgcccgccctgctctccgtcgcgcccttccagggatcctccatcgccgctcccgccatcatcgcgcccgcgctccatcgatggaaggtgtcgccccgccatcctcgcctcgctccccgcgacacgcggcgccagcttgtgtcgcatcttctatctattcaccagcaaggtacctggcacagaacccagccgaatcctagaacccagccggatcctagaaatttcccattggcatctggtgaccgtatccggtggttgggcgtcagacgcagcggggcggtaccggtgcttggagttggaccacccgtgcaaggcaccgtggtgcgacgggccgctcggcgcgctggagagcaacgggtgggtgtactcggcgcactgctccttcaagctctttgtggccgatgcgtcgtggtggtgccttgacgggaagtggctcttcttctggggcgactctaaccacgtcgacaccatccggaacctcctcaccttcgtcctcggcatcacggacacgtctgctgtgacacgccagtttgatgcagtgttcaccaatcccattggtggggcagggactctaaggatcacaagcatcttcaacggccactggaacatgagcatgaactatctcggcttgcattccctccggaacagaggtttccggcagctcatccggtcctacttcatgtccggtgatcgtgttccagacgtcatggtcctgaactctcgcctgcacgatggctgctactggaccagcgtccgcatctacgcgcaggctgcggatttcgcagcacagttctggtccggagtcatggacaaagtccgggctcgtgggcatgcagtgcccagggtgttctaccggacgcagatgcctcagatgcagggaaaaaccacgcgactcccttcacggaattgagagatgaagctggtgtcacatactcacatccgcagggatgggtcacgttgcagacacttcctaatgaagtccttgtagtgctgcgaaaggtaatcagattttgttagtagacaacacaaggaaggaagcacaaggaagtttaacctgtatagcacaaggaagcaagcagctcagcctccattttatttggaaaagtcttatacttatcagaaaaagaaaagctaaaactctaccctctgcgcccaccttcaagggtcgctccctatcttccttcactctccatcaaagctttgctcgcatcaaattaaatttcttttcgttacgaatttagcttcattatataatattttgctcagtgaattgatcaagtttggtgcacgagtgtcatgctcctaggttttgtactaattgaagaagtagcaaatgtagttcgtggtggtggtttaagtcatgtctgatgaaattgatgcttatatagaggggttctttgtgctttcgaaagaattctgcaggaaaatcgactgcatttgttgttcttgggtacacaatgaaagatgggaaggcatattttcccccacatgacagtatctatacatattgcagttgaaatggaaataattgaaatacaaggtatgtgcaggtgcagtctattatattggagttaagagagcgctagcttgcagtcacactcgatgaagtcctatagggctagattttaaaagtaagatccagtacaaggttacttcaattgcaattagcgattagccaaaactttcatcttcggtctcactaggcctcactaggcctttcatcttcaaaagaatttataaagatattatttttcagtctatctctacatccctctctccatcttgttatgcaattatgagttcattagatgtcattgatctaaattaatttctatccattatgaacttatttttaatgaaccatgctccttcttcgttgctcacaacagggtccatgtacttggcacatgatatacatatacgagatggacttaaaaattaacaaaggtcttcttttggtggtagataattttggttttcttatgattctctttatgaagtgggtgtggtacctctaaacaaatagatgatctgttgacttatggcagtcaggcattacatttttttgcatgaaatcgacatctgagaagtgataattttgttttgatcgcttctctattgcaagatttagatggctactatcctttgcaattgatcaagaatggtgagctattctaaggaagcttctgaacaatatacctgttgtcctggagtgtcacagatggcaaagatttgcgcttagagaaggaggaagaacggtcggtgctagagtcatctccaaagttcttagctgatcagtttccactttcttctctgtagtctggttgcaactgttgatgatattgtaggtgtatgaaatcttctaagcaaactgttaaatacattgcacccgatcagaagggatgctctataatgcagcctggtaaacctccctcctgggcccagctgtcctctgctttcagtgtgaaactactgatttgggtgttgctgattttcatcatgattttttcagtttgtctcatcatttatcatccgcactcagatctagccttggccgggagacaccgcgacagaggctggacgtgctcttcccgtcctcatgccccatgccgctgcgcgctcttcccttcacctctcactacacggcggctgcggggcaggggtgaaagaggcgaggcttctccagcttctcgaggccggagaccgtttgctcaagggtgtcgttcttgacggcctcctccgacagcgtggacgcgtggttctcaaccatggccttggtcacggcaggaagcagagcctggtaataattta

SEQ ID NO: 33812 - DNA, 4512 bp, Zea Mays
ccgccgcggcttctgcttctcccctccctagggcgggcgtgaatacgtgatccatcatctccatctccgtctgctgtggtgtgctggtttgagagactcgacggctggcgagacgagactgaagggcacaaatctctccgccatctgttagattccatcgtatcccccacgtcttggcgtcgcttcgtcggctgcgacctgcgagaagccggtgccgccgcgccggtggacgaagacgatcaaggattaggaacggcaaggtcccttgcgatccgatccaattcttcattcttcgattccttccttgggcgggcggctcccctcagcttccttccacatggctcgtcgcccgccgccgtcaccccctcccccggcgcaagggaacgggagtgggagcgggagcctcaccaccagagacgccctcgcctatctcaaggccgtcaaggacaagttccaggaaaagcgccacacgtacgagcagttcatccaggtcatgcgtgatttcaagagcgacaggctcgacagcaccggcgtgatcgcccgtgtcaagaccatcttccacggctacccggacctaatcctcggattcaacgccttcctgcccaaggagcatgccatcaggcctctggacctccgcgaggacaagaagcccgtcgattatcccagggccatcagccttgtcaacaggattaagagccgattccagcaggaggaacatgtctacaagtcattcctggggatcctcaataagtaccgcatgcataacaagcccatccaagatgtttacaacgaggtcaccgcactgttacatggccatccagatttactcgaggagttcagtcattttttgcctgatacgcccatgcctcctccgcaggcaggcactactactaaagttaggcatgatgacaataatgctataatgcattctgtcacgagagctcagacagtccaggtgaatcaacaaattatagaatcacccgtgttcaattccaaatctcagacagtccagagggggagagattttccatcaactgctgattgggacaccagtgctgatcgccttgatcttgagcatgatattcaaaaaagttgtattgagaaggagaaaattcgtgatgcctgcccacgtcagcatagaagaggttataaaaggaatgagaagaatgacgagtatgaaaatgaagatttggatgtggagcaatgcggtcacaaatcacaaagaaagatggagggtactggtgatgatacaccaggggatgctacattgtcctcattcaattgttcacacgcacaagagtttcaattttgtgagaaactaaaggcacatctagagcctgaagcttaccaagagttcttgaaatgccttcacatatacaaccaagatattattacaagaaatgaactaaaaagattggtaaaggatatacttcaacattacccagatcttgtgaatggattcaatgacttcttgggtcactgtgaaaatatagatggttttttggaaggaaccttcaataaaaggcaaacatcgcggatggttagacctgtggaaaaagagagatacaaggagaacgagggggatagcgatcctgagaaagagagatacaaggaaagcaaaaattctgaaagagtattgaccttcaattctaaggaaggagcagctcatgaagctagtacattccctagcaaagagaagtataacttatgcaaaccaatatcagagcttgatctatcaaattgtcagcggtgcactccaagttaccgacttttgcctaaaaattatccagtaccttctgcaagcaacaggactgacactgaagcttccgtgctgaatgatcgctgggtatcggtgacctcaggaagtgaagattattcatttaagcatatgcgcaaaaatcagtatgaagaaagcttgtttagatgtgaagatgacatgtttgagctggacatgctgttggaatctgttactgttgcaattgagcgtgttgagaagttggtggaaaggatggaaggcaattcactgaaaccagacagctctatctccctcgatgaacatttgactagtttgaatatgaggtgcattgagcggctatatggtgaccatggacttgatgttattgatgttcttcgaaaaaatgttggtgtgacattaccagttattttaaccaggcttaaacaaaagcaggaggagtggtcaaggtgccagtcagattttaataaagtttgggctgaggtatattcaaaaaattatcacaagtctcttgaccatcgcagtttttatttcaaacaacaagacacaaagaatttgaacacaaaagctctattatctcagattaaagaaatcagtgagaagaataggaagggggatgatgtgttacttgctattgctgctgggaataggtggccactagttgccaacatgtcatttgtgtatttggatatggacattcatgaagatctttatcagatcatcaaatactcttgcggagaactatgcaattcttcagatcaagttaacaaagtgatgaggatctggacaacatttttagagcctctgttagggattcatcatagggctcatggcgctgaagatgcagatatggtaaaatcaaagaggcgaactagagaagttggtttggcatgtggcgggaaaacaaataatgctgcagcaaagggtggtaatggctctaaaagtgctggagctgagtctgtggctgaatttatgggtaggaatgaaacaattccgtctatgaagagcataaaacatgacaggataacatctttgtatggagtgggtgtacatccatttagtgcatattcggtgtcccacaacaatttaaggcctgaaacagaagagggtgaattatctcctaatggtgatttcaaagaggaacacttctgtgttttcgaagatgaagctgtagatggaacttctaaacaaaatgaaggttctaccagcagatctccccagggtagacctaagaattatctcaagttttcaggcaaggatcattcaggtgcagaaaatgaaggtaacaagagagcccagaggtctgcagaggatagtgaaaatgcatctgaggctgatgaagatatctctggcagtgaatctgctggtgatgaggagtcttctcatgaagatcaggaggaagaagaggatgatatggatcttgatacaaaggcaaaaaatgactgcagagcagaggtaaatagggaggcacagggtttggatggaggaacatcattgtcattttcagaatgtttgcaaagtacagttaaaccaatttccaagtatgtttccactgcattaccaaaccatgaaaagaaactttctcacatattttatggaaatgactcattttatgttctgttcaggctacatcagatcttttatgagagaatattgtcagctaagacaaactgttccacatcagacaataactggaaagcttcaaggcacataaattctccagatcaatattcaaggtttatcagtgcactatacaacttgcttgatggttcttctgaccacaccaaatttgaagatgactgccgctccatcattgggactcagtcatatgttctctttactatagataaactgatatacaaaattgtgaagcagcttcaagcattagcatctgatgaaatggacaaccagcttctccagctttatttatatgaaaagtcgaggtctcctgggagcttctttgatctggtttatcacgaaaatgcacgagcccttctacatgatgacaacatataccgttttgaatgtcattctgatcctacagaattaactattcagctcatggagtatgggaatgaaaaacctgagttgactgctgtctcatttgatccaaccttttcaccgtatctttataatggttatctgtcaagtattgatgataccaaattggttgatgacgtcttccttaggaggaataagcggaagcaagggaggaatgatgactcccctacttccttgaagatcatggacaatgtcatgtttgctaatggtcttgaatgcaagatatcttgcgaatcttcaaaagtctcttatgtcctcgatactgaggatgtcttatttcgtacgagaaagaggagaagctctatctagtggaaccatgcctgcgctgcaaagacaaattttgtgaaaattaacaccgtaaaatcgatagtttcatttatctcttcagaccgtatagggtcttgtggtagagttatgttaattacaatggcatgcactggtgggatcctcgtgttgttgatctgtcacttcactggaatatattggtgattctttgtgttttactcgctaccaattatatatgagcgtgtagcatgggcgagtcacggaggcagtgttccgtatgtgtttttgcagttcaacgcgctgggttcactgtgttgcgttatgacaggtggaccctaaaacttaaggagtagctaatgcaagagtggggcgaacaaggaactatgagtgtgtttggtttgagtaatgaagtg

SEQ ID NO: 33813 - DNA, 1796 bp, Zea Mays
atgattggagctttttgttttttaccccattgcaacatttcacaaatttgcgcacaccaagcaagaggggtgttcaatcgaccccaaactatggaagtgttgttacatctggaacaacacttggctgtcatgccccacttgtgtacaggcgagtccactccttcgctgtctcaacagcttcagcttcgttggatttccagtgtttcgcaatgttgtctgagagaggatcatctgggtttggggcgctcagaagtgcctgaatgctcagtagaactgtacgtatctgaagagctggactccatttgtccttgtcaatattaggatggtaaatttttgtgagaaatctaacctgtaacagcagcagttaaggtaaaagtaccatcagcaaatattacagcaaagtgacagatagatcaaataaacagaacagttgtaaatgaagtcagcactgatccccaaactggtaaataaaaacattcccgatttattaaccatgtccgtgtgataactgctaccagttaaataagaattcagaagtactatcggaccactcaaggacagaggacagacccagcgctcgcggctcccacatgactacatgagtggggtggtccctgcatttttgtagaggttgtgttgaacccaggacctttagcccagtgaaaaggcttctcacgactgcgtcaggcctgtacttctatctaaccactaaaggaaggtgtttaaattatgtgaaaataatacaacctttgttccaaattataaatcgttctagcttttctatatacatagttttttctatgcacctagatatacattatatctagttacataattaaagtaatataaagataatgtatctagaaaagtcaggacaacatacaatttggaatggagcacaaaagatctaacaggagaacaaatatgtcttgatatatgtaaggaatacaaaagaattcagaagtactaaaaaccactctaggaatgctagggcttctttttcaaggaaaagcaagttcctagtacttctgttcattaggattacaatgcaaattagtgagtacaacttcataatgactctacaagaaaaaagaatggataaaactgtagacatgcattagaagaaacaccactgacataaaattgaagcaagcaaattttcattactaaacaactgcgcacgaggtggatcttgatcaaacttccagaagcacctaagcttatagaggcatgctttaatctagtgtttttgtttagaagtgtggatggttagctttcgatttgacaaattgtcaaaccaggaggggcaatgactacctttggccttcaatcagacctgcctctgaatatacagtgaaattactcaatatatgaagacaggaagagacagctagcctacagcaaaatggaagagaggggggggggggtggtggccctgggctttattaagtaacataacataaatatgttcttgataggactttgaagttaatcaagcagaattagatatgtcaaatggttgtagttcggaaatagaagggcagggtgcagtggtgagagctatctcactgaggtggtaccaggtcagagttcgaagtagtgtgtccgcatttgcgggaaaaaggctttgtctcggtttatcccttcactagaccctactcatatgggagcctaagacattggttctgcccagttgtagttaggaaataaaccacaattcgtatcaattgagataaatgaatgctaaagcacatataacatggaaacataaatgtcaattaatgatttaattaaca

SEQ ID NO: 33814 - DNA, 1604 bp, Zea Mays
  misc_feature (1603)..(1604): n is a, c, g, or t
cagttggggagttttctgccttttcttctccccttctctgttttccttcaccgcgccaccgggggcgaatcgcggacgccgctcacctcccccatctcctccccaccacgtcgcaaacccatcgtcaccatcaccgcctccggccgcggctcccatcctcgcgtggccgtcgcgatccactacgagcttctctcgtccggtcttccgagtctcggctacctgctcctacgtcgaatcctcgggccctgctgtcgccaccgccgaatcctgctgcactcgccgcagccggggaacgcggacggcctgcgggagcttggcgcctcctccttcgcgttgcgtcgtcacgaggaactaagtcaacagtctttatgggcttcatgctagtagaggataattccagcactgcttttggaggtcctgctattctttctcatatggattggtagaccagatcctggcaaagcaatgctgatggaccctcctgttatgcaaatggactgcaagttgaaaaatgacgtggataaaacatcatcaattgactatgataggaaggtgaccatctcacatgatgattatgggtgggcaggctctgatgtcaaaccaaaagatgatatagtatgtaaccctgtggaggttagtaatgcttgtcaaacaggcataaatgaggtattagattctgcttccaaaaattcacctcttaacttgggtgatttacctcagggtgcagaactaagaaataagaatggtgacagttcctactccaatgtaaaacttcagttgaactcaagtgctggaaataataatggcttgcaaactgatgatgacaactttactaaacaatattttggtaagaaggatatgcatcatcgacaggaagagatgcatccttcttccaacacagtgtcattaccaacttcatgcagactcaatggagatgccacaccttctgaagaggagaaaatagcagaggatcgtgtcaaagtggatggaaatgtagatgctgtaattaaggaagtcgaaactgacttggtaggatgccatgcacatcagaaagaatttcagtgcacgctccaagatctatcagaaatagcctgcagtattgatttagtacataatacatcttctccacaaggagagaataagaagcctgtctcccctttaaatggcatgggccattatgttgataacaatagttgtaatggtgataccaattataaaggggaggagctcaatatgggggatgctggggatgaggatcatgctatagcactttgggtgaagtggagaggaaaatggcaaactggaattcgatgctgtagagtagattgtcctttacctactctaagggcaaaaccaacacatgacaggaagagctatgttgtcgttttcttcccacgaacaaaaacttattcttgggtagacatgctacttgttcttccaatagaggaatgtcctttgccacttgtaaatggaactcatcgtaaatggagaaagctggtgaaggatttgaacattcctcgacgattcaacatgcaaaatcttgccgtttttatgataaatttaattgatgagcttcatatcgaggctgtagttgatgatgctnn

SEQ ID NO: 33815 - DNA, 957 bp, Zea Mays
ctttagttcatttcaaatcagtcttggatacagtttggatttgttggtgccattgggtattgttgtaattgtcgctgataacaaaaggccatgaatcagtgctcataacccagatgcataccatttaggtatagagctaacaatgatgaaacctctggtgacaaaactaagaaactcgtggaagttctcatgataaattcccaaagcggacctggtcttttgtttccaaagggaggatgggagaatgatgaaactgttgaagaggcagcagctcgagaagctatagaagaagctggagttcgaggtgatatagtgcattttctggggctctatgacttcaaaagcaagacgcatcaagatgcgtgctgccctgagggtatgtgcagagctgcagtgtttgcgctgcatgtaaaggaagagctggcctcatggcctgagcagagcacccgacagaggacctggctcacggtccctgaagctgcatcaagttgccgataccagtggatgcaagaggccttgctgacaggcttctctgactggcacgacaagtggagcagaggcggcggcggcacaaactgtgacccggcctaactgctgacaggcccatctgcagtcgtccaatttgttcatctcctctctttccctaggcccccaaccttgcagaatgcaataatacagtgtacttgtcttgatgctgggttggtcattgacatgttatcttagttgtagtgggacgaggtacatctcatcaagacgagaattctcacaacttttaagtgtcaattctcgtgccctattatttctcggtttcatccgctgtcgtcgcggtgctgcagcctgcaggcacgcgccgcacgcattttgtaactccgctcctgattctggagatgcatatgctatatgtatgaactggtataactttgaaatcaaaagttgccactgttgactcgagtcgcc

SEQ ID NO: 33816 - DNA, 490 bp, Zea Mays
ggcctattgggttgcatgtgttggcagggcgcgagaaggagcagagctgcgtcttggtggggcccacggcgtgggaggcagggcgcgagatggagcagagctgtgccttggtgcggcccacggcgtgggaggcagaaccatggggggagcagagctgcgccttgttggggcccgcggcgtgggaggcagaaccgtgcaccaccccgggtgtggatgcctacgctatggtcttaagtagtagtagagatttggattcccagacatagtgcagattcagactctaaaattgtgtgtttgggctagatttgaagctctttattgctctatctatagagttttggttaatgatcattatgtcaaagttgttgagtaactctaggcgaataaatttcattaagtgtgataaccccaaaactatacgctactagtacaaaaaggcagtccaataacggagtggaagagccctgaaatttcagatcaggaacagtgc

SEQ ID NO: 33817 - DNA, 592 bp, Zea Mays
cacgaaccgagctgggcactggcgctggaagaagagattgccggccaccaggaaggagctcagcgcggctggattttatccacagacggaagcggcgggatttttttttgagctgagcaggaacgaagaacagaggagctgaggccggggacagggaagaagacgcgcagatttttccacaaaagcggtcatggtggagaagagataaaaatgacgcgcacgcacgaaaaaatcagcagagggcggttgagcggatgagatcggcagtggctaagaaaaatcgcagaatgggatagagatggaagaaggccagctgcgcgtgagaataataacggcgggatttttctgtccacgaactgaacggcggcggtagaaaattagggcgtggagataggaactatgacgccaggaagagatagagctgaagaaaaatatcctgaccacggacggctgaaaagatcagagagagagaacgacagaagaggagataaagagatattttctttggttgacgaatggggacagaattaatttgtttcaagaactttagtcgtcgagttcaaattaatttgtccgggataaaaatcatccg

SEQ ID NO: 33818 - DNA, 1197 bp, Zea Mays
ccccaactgacccgcgaccgcgagagcccaggcgccacgcacgccgatgcttagccggtagcgcacgccgatgctgagccggtaggacggggcggcgtcttccgccggcagctcgtctccgctagtccactccatcgccattgttggtccccaccgctgcagcccatacgacgccgtcgtgccggccctacgactgctggtgccctacgacgccaccatcccctactccgccgccgccccctacgcccgtccataggtgccaacagatcgtctcattacagagccatgttcttcgatgaggctgagtaccacacaacccctacgaggtcaccctccaatcgcatgaacaggggtctcttctcagatgaagtggcgttaagtgttcatagggagcagtttatcccttctccgtgatctggtagagtggatgggttggacctcaactccagtggcgtggagttccagaaaattgcatttcatgaacttcgtcagtcccagtcagctgccaactactccgctactccggttcgtgatggtcataggggttgcagtcattctcgatcaattggtattggtcgtggtgttacgggcagaggatcccgagttccacggacgactagtgagggtcctagaggtggtcgtggagcatgaagcatcttctctcgtggacgtggtatgcctcgacctattggtgcttccttctctggtggccgtggtgccaccagtggtcgtggtgccaatatttcagcgccaaatgccgctcacagtcaagaggacaatgacgacgatcgctttgcacaggtaactcatttttctgacttggtcactccaatatggaagagcaaactgcgtcatagatgcaggcactactgtaatttttagcccaaagttttgaactgttttgtttgaaatatgtacataatctgtaatgtttgtgaactgtttgaatggagaggagagctggagagggcacggagaaatggaccgagacatggaccgtttttcttcagcacggcagcccccagccagtttttcatttgtgaatcctgtcgttggttgtttcttcttttgtacgctacacttaaattatcctagagagtgctttaacatgtttagaatgagtaagcatatatttgaaaagtcttcatgatgtgcttgcatcaatatatggattgcagtcaacatgtcagatgcgtt

SEQ ID NO: 33819 - DNA, 977 bp, Zea Mays
ttttttttctaaaattctaagccgcaaaaatccggctccacaatcccgctgttcgcgagccactccctctcacgagtgacgacgaaaccctaggccatggcttggcgcggcgccgcctcccgctccattatcgccgccgtccgtgctcgcgccgcatccccgtcttccaccgccgcctcgcgcctccgctcgacggctccacttcccgccccctcgcgccggtccgtccccgccttcgctttcgcgaccgcgaggccgttggcggcgatgtcggggtccccggcggcggccgtggtgaagctcaccgggcactcggcgacgagcgtgcgggcgtgctgtgagctctcccagggtaccctcttctgccgcacttgtcaggatcgctagcaagccaaaatgggaaggatggttgatgaggagatcagacggaatgattcatatcctgatgaaatgacgacgatgcatgatgcttgggaagcaattttaaagcatggaaaaggcacttaatgcgcacttttgtccttaaatgcaaggattggattctttggaggttgcatcccttggaaactcatcgggcttgcgtccttttccatgcattttgcagagtacttagcgcctcgtgtgtcggcaaacggacagtatatctgctgtaacttacataaataatcatatgttagcctgctgctactcactgccccgcatcgattggaactaagttgatgtttggttcacataattgtataacgttaaatcatgtttgtttaagtctaaccttaatcggattccacactaaaaactgatattggcctattcaaatttattactgctgttatttatgttatattttgttttattttgcgaaccaaacggcactgtacaaattgttcctttgtacgagctcatgaaagaggaagatttttgtcctgcccgtatttgtattgtggttggttgatgttatctaatatattctaacaaat

SEQ ID NO: 33820 - DNA, 3075 bp, Zea Mays
atgggtgtgggggaaaaatagatcgattccttctcatctcctctgatttggttaattgactcttgctgttgttcagcggcgcaagcaaaggcagcccactccaccatgaatctacatctactagtataacttaatcaccagcaacgggcttgtcggccgctcgtgattggtgatcccaaactctcttcacttctctctcactcttttctctagaaagaagaaaccagccagcaatgattgcgaccaccctcccctgttttgtcctaatcctccttttcttcctccttgagattcttcctctccagactcgtgatgattgggcaattattattattatatcgtcgtcgtcctcatcgctcacagcagcagcagcagcagccttttcccctttccaatcaggccaccccgttgatttgcaatgcggcatctccatctcctccatagactgctgccatgcctagatcaccaagcagcattgagcagagttcctcacatccaatctctctttcgtggatgggattctcattctggatctcatccatctcttgccattccttatccctccaaaaaagaaaacaaaaccgtactgccacaacaccttttctagggttcaggacctctgtagcattattgtactacaccttttcgtagcagctgctggcctgctgcacagcgggatgcaaaatccccctgccttttcttttctcctttcgtaggaggaggagaaggtggagcctagagcacaaaaagatggatccaatcagatcacagcagcgtttgcttgtccaaatgcagattttgatctcagtgctccaaatcaatgatcctactgctgcttttagcgcgcaaaaagcacgatccttttttttactcgtgctcttttcttcctttctttccccggtgcggtgtgtgctcgcgtggcgtcaagagcggcggcagctcggcggtgttcacggccgagtgctcccacgccttccacttcccctgcatcgcagcccacgcgcgctcctcctccgccaacggcgtcctgtcctgccccgtctgcgcctcgccgtggcgccaggcgcccttcctcgcctccctccgcctccactgctccttccacgacgacaagcaccgaggaggcggcgacggccgcaagacgtcgccgctcgccaagctttacgacgacgacgagccgctgctggcgcccaaggccacggccaacggcggcggcttcaaccccatcccggaggccgacgaggacgacgaggagcagggcgccgcgtccgagttcaggggcttcttcccgtgcccgaggagtaggaccacctcgggcctggctgtcactgtggcgcccgaggtcgcgctcgtgtcgtcgggccgccgccacggcaagtacgtggtggccgtcaaggtcaaggcgcccgggctgcgttcatcgtcgacggccccgcggcgcgcgtccatcgacctggtcaccgtgctggacgtcagccagggaatgatgggcgagaagctgcagatgctgaagcgagggatgcgcctcgtcgtcgcctccctcggccccaccgaccgcctctccatcgtcgcgttctccggcgccgccaagcgtctgctgccgctgcgccggatgaccaggacggggcagcggtccgcgcggcagatcgtcgaccgccttgtcgtctgcgccgccgcggcgaccacggccacggccacgcaggggcagcaaagcgcgtgcgtgggtgacgcactgcgcaaggcccaccaaggtgcttgaggaccggcgggaccgcaacccggtggccaccgtcatgctgctctccgatacccagcagcagcagtcggcagcaccggaaaactcgtcaaggaagcagtttgggcggccagctgtggccccagcaacgcgcttcactcacgtggagatccccatcggccccggcgacccacctcctcttgtgtccgagtgcgaggaggagcctccccgtggagcacgcgttcgccaagtgccttggcgggctggtgagcgtggtgatgcaagaggtgcagctggagctggcgttcctgacgggggagattacggcggtgtactcgtgcggggccgggcagcaggccgtggcagtctccggtggtgcgggggtgagcgtgcggctgggcgagatgtacgcggaggaggagcgcgagctgctggtggaggtgcgcgcgccgctgggcagccaccccgcactcgctgtcggtgcggtgcacgtaccgcgacccggcatcgcaggaggcggtgcgcggcgcggagcagcctctgctgctgcccgcgctggagggcgagcgggcgtcgtcgtcgtcgcggcggctgcacgacctgttcgtggcgacgcgcgccgtggcggagtcgcggcggctggcggagctgcaggacctggggactgcgatccacctgctgtcgtcggcgcgggcgctggtactgcagtcgccaccgacgcagcagcagcaggagctggtgggcagcctggacacggagctgagcgacatgcggtggcggcgcgccaacagccagcatcaggaggtagtgacgccgacgtcgaggagcggcaggaggaggggagacggggacacgacgacgcccgtggggaccccgcgcggggaggtgctgacgccgacgtcggcgtggcgcgcggcggagcagctggccaaggtggccatcatgcgtaagtccatgaaccgggtcagcgacctgcacggcttcgagaacgcgcgcttctgaggcgtcagacgacctcgtgtctgtctgtaattgagtcgtattgtgtttatgccattttttttcgttttcgtgttggctagtgaaacgatatgagtaccccaacaggagaagaggccgcgaacggtggctagtagaagatgggaagatgaacagaagcagccggagctgctgctgatgttatatgtggattagtagtatcaattaattatgaggacgattaatgaacccagataggatgaagaagataattggtgttatattagctgctgttgtgcttcatgattcattcattcatccatcacttgtcatgctcctctgattccgattccggggcagac

SEQ ID NO: 33821 - DNA, 323 bp, Zea Mays
accgaatatggggacgaggttggcacgaaccacgcgaatcggaccgatggtgatggaagggactcagttgagcaatccttgtcgacccagtcgatccccatcccagtggctctgcgcagaggttcttcgagcaattgcgaactcccccggctccccgatggtccccgagcggcgacgtaggcaggcggtcggtgtttcctccctccctcggcggaacaggcttgcgcggttggcgttcctctctcaacggtggtggctagggcttgtagtggcgtaacaagaggacgagggaagctcaggcagaaatatatgttccccccttg

SEQ ID NO: 33822 - DNA, 2896 bp, Zea Mays
gcaggagcatggtggtggattgataggtggggaaggggctggcacagccgcacaggcacaggcacaggctgctgtgtgctgctgcccctgctcgttggcgtttccctccctcgctccctgctgcggcccccctgcgtgcccccacactactcaccaggccacggccaccacaccccaccatctgcctctgcggagctcgcgtgaacccctctcgctttcgcgctgcgtccgcggtggcatcattgggtgtccggactccggactggacatggaccgtcggaaagacagggtccttcttggctgctgatttcgcgagcgctgccgctgccaccgccgcttcttcttcttcctcctccctgctgctgcggcggcggaattgtgcgttggagggctgtgggctggcgactggtctctgcccctccatcttctccggcttgttcgccgaattgaatctgcgggggttgcgttgcagcgatgcgggcgcgggagccccggatgtggatggggtggtgctgggtggcgctcgctgctctgctcgccttgatcctgccgccgtccaacgccacgctctcccctgccggcatcaactacgaagtggtggctctgatggccatcaagacggagctggaggacccctacaacgtgctcgacaactgggacatcaactccgtcgacccctgcagctggaggatggtcacgtgctcctccgacggctacgtctccgccttaggactgcctagccagagcttgtctgggaagttatcacccggcatcggtaacctcaccaggctgcaatctgtgctgttgcagaacaacgtgatttctggacctattcccagtacgataggaaggctggggatgctaaagactcttgacatgtcagataaccagctcacggggagtatcccaggctcgcttggaaatctgaagaacctcaattatttgaagttgaacaataatagcttgtctggagttctgcctgattcaattgccagcattgatggttttgctctcgtagatctttcgtttaacaatctcagtggcccattacccaagatttctgcaagaacctttatcatagctggaaatccaatgatttgtggtaataattctggagatagctgctcttctgtgtcacttgacccactctcttacccaccagatgatctgaaaaccacaacaaggtattggaaggagccatcatattgctacaatatgtggagcaactgttggttcagtggcttttgtcgctgttgtagttggtatgcttctttggtggcgtcataggcgaaatcagcagatcttttttgatgttaacgatcaatatgatccagaagtttgtttgggtcatctaaagcggtatgctttcaaggagctccgtgcagctactaataattttaactcaaagaacatcttaggtgaaggtggatatggcatagtatacaagggttatttgcgtgatggctccgttgttgctgttaaaaggctgaaggattataatgccgtcggtggggaagttcaattccaaactgaagttgaagtcataagcttggctgtgcatcgtaatctcctccgtcttattgggttctgcactacggagagcgagaggttacttgtttatccatatatgccaaatggaagtgttgcttctcaattgcgggaacatataaacggcaagccagctctagactggccaaggagaaagaggatagcgctaggcacggcacggggcctgctctaccttcacgagcaatgcgacccgaagataatccaccgggacgtaaaggcttccaacgtgcttctcgacgagtacttcgaagcgatcgtgggagacttcgggctggcgaaactcctggaccacagggagtcccacgtcacgaccgcggtgcgcgggaccgtcgggcacatcgcgccggagtacctgtcgacgggccagtcgtcggagaagaccgacgtgtttgggttcggggttctgttagtcgagctgatcactgggcagaaggcgctggatttcggaagggtggcgaaccagaagggtggagtgctcgactgggtgaagaaactccaccaagaaaagcagctaggcacgatggtggacaaggacctgggcagcagctacgacagggtggagctggaggagatggtccaggtgtccttgctgtgcacgcagtaccacccgtcccaccggcccaggatgtccgaggtgatcaggatgctggagggggacgggctcgcggagagatgggaggcgtcgcagaacgtggacacgccggagtccgtctcgtcggagctcctgctccagaagtacatggacttcgcagcggacgagtgctcgctcggcctggaagccatggagctctccggcccgaggtgaccgaccggctggttgaccggacccggcgggcatcgcacgggtcggcgtaggtgtttttgccgtatcaagccctatattgttgtgttgcgttggacacatagggaaggcgatggattgtatggtctatatagctgtggtggcattcatttgtacatacagcagcattgtgtgaggtgagcccatccttgttgcgcgtctacttggtggcaaagagatgaagatgaatgagtatatagagatagagatcaaagttcccagtgcggagcggttggtgcctgtttgtgttttctgctttgctgaaaggcaaggcgtgcgcagcgctgtctgacatgcgccactgcttgtaaaacagcggtccgttacgcattccggagaggatatggtagatacagacgtggtattaggggttcacagaatctgtttctgtgtgtttggttcatgactgtttttttactgtactgagaacttgctcgtttcaccgttgatccatatggatcgaatagtattaagtcggtttaaatc

SEQ ID NO: 33823 - DNA, 3825 bp, Zea Mays
cgctccctccccatgaaacccccttcccccaatctacccctctctgtgcccccgacatccacgctgcctcagcccgccgtccagcgccctctctgcgcctccctccccacaccgcctcagcccgccgttcgccacgctccccacgctgcctccccccgtcgcccctccctcccgcgcggaactccgccatgctccccacgtcgcctccccccatcgcccaccagccgtcgcccaccagcccacactatctcacgccatggatggtggcaacagtccccgcccccgtacctcacacgcatcaggctgggctggccgatcccgccgccgcaaacgccgcgcccagccccgatgtcagcgcggcccgcccgccaacgcactttcggcctccccccgcccctcccttcgcccgcccacccgcaacctccgcgccatccgcaacctccgcccgcttctcacgccaccgacccgacctccgcgccatccgcaaccgtcgtgcgtcttatcccttctctaccgcgcactccgtgtggaacaacctccgcgtaggaagcctcctcccttccccatccccattccccaccacgcgcttcggggacggcgagctccgggcgggagcgaccgccgggcgcttctgctgctggtgcggaggaggaggagcggcgagggtggttcggcgcaggctccacggcggcggtgcccgagccgagttcgactggctggcgctctactgcaacctcacacgcggcgatgggccggacgaagaggagcttttgcagtgttaaccatgagagggattggcctggcactggttcattctacgggaacctcgacttcggtggagaatgtggtgtccctgtccaaactgtgttctacactccaactgaaaaccgtgcaaagttctggtacgcaacagattacgacatgtttagccttctgcattgctcacatggaagaggacttgagacccgggaccgagcagtacagattcatcgagcaatgccacattggcctcatgaagtttcacaatcacagtggtttttacaaggatttcagttcatgggttgggcagaggctttaccttttgcgtcagacagtgctctcctatgcacagaactatcaaaagcaagcaaagatgctctagagtacctgaggaaggctactttgtgctctataaggattgccaggaaagtgccagatttggcagagaacttcatgggcctggatgcatcattgttaaaggagaaacaccatgggtccttatatctgcaattcagctatgcacagaactatgcaaagcaagcaaagatgctctagagtacctgaggaagttgcaaatacattgatcccttaggggttgagatggaaactgccacaagggagggaggacgtgagtcagctgcacgtgccgacatacacatcacttcctgcctcgctgtccttgatcgagacaaaatcagaagagctgtatctatatgtactccataccttgacgtatgcaggggctagatccataccccggcctatctgccctgtgaggaatgtatacttctgcaagtttgaatactttgacaccttgtgaggagcactctttgaaggtggagaaggtgttgttccaagggaagccagactaccaaaatgttatggttttttagcttctcaatagccggcgacagtgcatacgacctgccccgcgctggggctgtgtctgccttctcctccttcgatgccatgacactgtaaagtgaagccttcgagctaggcgcggaggccagggagatgctatgcgcccacatctaccacgccgccttcatattgctcaagctcgcgctccgcaactcctgccccatctgccgccatgagatgcccaccgatgctgccctgcgggctgccgccagcgtcggcgttgccgaacgcgccgccggggaggaacaagcgtgggatgcgccccacgcgcgcgactttcacctgcctcccaatttgatccgtgagttcaccaggaccagaacttcttcgatgatttgttggaccatccctgctgatacaaacacaatcattttgtggcaggaaatcaccatattagagcttacaaccttcgcatcaactgtttgtgcagcaatgagtttatcttaagttatgtttttttggtaatatcggttgactgcacttaagttctaataaagcatctttgatgtcacttgtaggaagagtttgacactcatgatccaaaggagaacactttgctactcccttacttgaggaaaaggtcaaaaatcattgagatagttgcagcgcgtgatatagtctttgctctatcacagttaggagtatgtgctgcttttagtagcggacccaacgtctctgcgagagaccttgggttcccttatccgaaggcaggcaccgctaagcctacagacgtggtggtgaagttctacgtcctctacgagaagtggcggaggggcgagctcctgggttcttcgtcagttgcgcggtacttgaaaagcatcactggcaacaagaatttccgggtgtgggtggacagactggtcacatcgccgatcggtacaagcaactggttggtgaggtttgataactgggagatggaaggtggcgttcggtactgctgccgcactactcttctgctgaataacaaggatcaaggtcgttgtcgtctccaggtccatcaaatgcgacaaggtcgagcgcacgcaattcagctccgaagtcatctcctttcaacagaaagatgcaagtaacaccaagtcacttgcctttgatggttgatacatttcactgtatatcattgcacgacagatccatttagtacctttttctgagttaaactacttcaaacattgctgaagactacaaccagcctacagttgttgtaattgaagcgggtcaagacatagcatttgcaaagatttagttcattctcatcactctgcaatattcgggttctctactatgtgtaatctcatatcaagattaatgagtatcgtgatcgtataattttgaatcctatcaacccatatggcaaggcaaagaaaaatgacagtggacatcattctagattttacaaaatcaaaggagcaaccagacatggctgtcatgatctaagatacttcaacgtgattggatcgaacccaaacatatgactaggagaagctccaaggccactttgtcaagggtctctgcaatgcacctactggtgcatgatttactggaggttgtgcgcatgaatgtgccacacattggtatgggggttggagttgaagcaggtgattttcaccaacattggtttgcgaactggagttgaagcaggttattcatttgatgaaagtgggagagcagtccaaggcaaatttgccatgttggagcagtcacaggagccaaggggctgcagtcacaggtcctgctagccaggatggagcaatcataggacctcctagcagtccaaggaaaatttgcgaggtggagtagttgcaacttttgaaacccacgtgataacatgctcaagcgttcgtatgataaaaaagatggcacataatcaaaagaagatctcatgttctgcgtttgtgaacctgtttgtattttttgaacttgttttgtgaacctctatttgtaaacctgtaaaatctgaggttgtgaatagatttgggtaacttcatacaagtggtggaggcctggtggtaatcctggatgcatataaagcgaggcatgcaatatccatagcactcgtttgacagaaggcaacaccatcaaccttgtcctccacctttaaactagcatgagcaccatccttcttcacatttatattcatgtccc

SEQ ID NO: 33824 - DNA, 1124 bp, Zea Mays
cggcccgccaccagtagctcgctcggctccagatcccgcgccacaccacatagcatggcagaagatacagcgtagcaaggtccggacgttcaccagagggcagtggggatggggatggggccggcccgcgtgcgctctccgtgcgggaggcctcggcggcggtgccgctcccgcacccatcggcggcggctgcgctcgaccttaggcggcggggcggccaggctggcgctgtgacctgaaacggtggcgggatggggaggaggaaggagcacctagagagagtccgagtggaggcgtactgctgggacgtgttcaagccagtggagatggtggagatcgacagcatggagaagcttgacgacgcgttcaggatggcaagttggtgtcagaaatgcatctacctaatgcccagaatggagaagatagcaggacaatatcctggcgatctgtgattgtttatgcccaaagcgtagggttacccgtcttgttagcgctaccttagtgccgcttttttgaaccctagacatctcagaagaggtaccagctgtactttcacgggctttaacaaattatttagaaagccatatcggggtgatctctctggtctggtgacctgatctgagttttttttgccttcattcaggggaagcactcggagatgaagctgaagcagagcaaacgtgagacgcaccgtgggcattctctatccaaggggaaggttgctggaacatgatctggattcaaaatggttggctattgttgatatatcttgttctccccacaattttatgttctacatgagtggagagatcatatagctcatgagaaagatgagggtactggttagtggttgtatactgccaaataaagcttgaatcgagataggtgttgttgtttttttctttatatcctgttataatggtgcaaaattggatctacaactttgctagctcccccccccccccccccaaaaaaataaagcagatacctacagatgttggacattgtaaaagaattgtaaaatcaaaatatccatatgttgagaacaatgttgtcgtaatcgcttaccttacactgttcgtactgcaattgattattcttatgcctttaaagaagtagctgaa

SEQ ID NO: 33825 - DNA, 384 bp, Zea Mays
gaaaaacgctatggttaattcgaggtttgaaccaatgatttcgttggaagaaatttgaagcaccaagtacatacatggagcaaactctggtcgcgccggcaccaccggagcagagcagaccagagcaccacctgggcggctgcccgtcgcgtcgtcccaccgccggcagagaacgaaccaaccgcggcgcgggcggtcgtccttgctccctgatcgattctgtcgcgcgcggatctcgttcgatcctcgcaatcatggaggatggagcggaggcgagagagagagagaggacggcgcgttgccaattcgaggacagctcctcctctcgcctcctctggctctggctgacgcgaatcaatcggaatcggaatcagagcacaggct

SEQ ID NO: 33826 - DNA, 1752 bp, Zea Mays
tccactctcgctttcttctgtctcgcctcgccctcgcctttgttgatcttttcctctctcgcgttcccctcgccttcctcttcctcccccacacccaccggtcgccgcccccgtcgccccgtcctcctcggtccagagacgagggggtccgcgccgttccgacgccacaccgcaaccgcatcacatcacacaccgcctgctcccaccgtccgtccgccctccctcgatcgcgccccccggatcgctggtacctccgcgcgcggctccgacctcatcttcctccatcgactggcatcggcagcggcggcgtgttcccggccagccttcgaaaggatggcaccaattcaccccaaatcaccagtcactgaccagtgggaccaggtaatcaatcgccagacttttgggagctctgttgggggggaccggggggaagagccaagttactgcagaggctaacatttcggttgtcgagtgatggcgcaaggcatcaacttccctgacttcatcggcgccgtgggtggccatgatggtggtgtggactttggtgggaacttctgtgacatggccttctaccagaagctaggggagggcaccaacatgtcggtcgacagcctcaacagcatgcagaccagcatgcatggggggtccatcgccatgtctgtggacaacaacagcagcgttggctctaacagtgactcccgcactggcatgcttggtcatcctggtctcaaggggcctgccattgtgggaagctactcggttgggcacagcatcttccgccctggccgggtgtcccacgccttgagtgaggatgcgctggcacatgctctgatggacaataagttcccaactgagacactcaaggattatgaggagtggactattgatctggggaagctccacttgggaatgccctttgcacaaggtgcctttgggaagctctacaggggaacatacaatgggatggatgttgctattaagcttttggagcgacctgaggctgaccctgagaaagctcaactgttagagcagcagtttgtccaagaagttatgatgcttgcaacactgaggcacccgaatattgtcaagttcattggtgcgtgcaggaagccgttggtttggtgtattgtgacggagtatgcaaagggtggatctctcaagaatttcttgagcaagaggcagaacaggtctgtcccgctgaagttggcagtcaagcaggcattggatgttgcacgtggcatggcctatgtccatggccttgggttcattcatagagatcttaagtcggacaacctcctgatttctggtgataagtccattaagattgctgactttggagtggctaggattgaagtcaagactgaggggatgacacctgaaactggaacataccgctggatggctccttgagaagtggcagttaagaagaggtggagcaatatgggacgaaggaagctttggtctcatttggttccatgaactagacccaacaatgatcgtggtcccaaccacgatgacaacgacgatgaccagagaggagccgacgaacggaagatggacatattgcataatacggtggacatctagatgtgtaaatcgatgacaatttccatttattttgcaatcaatcatgatctagtgttttcatgcgattgctattatgtaattcctttggcaaccaaacacaataattggtattggtgggccttgcggtgcatttagcaatcgatgggcgggccatgtatctaatca

SEQ ID NO: 33827 - DNA, 1139 bp, Zea Mays
ccttgccatacctgtggtgtgcctaagacgtctaagatcttggaaatgaaccctgaggatgaagctgaggaggatggtgctaacattgatttagactcacaaaggaaaggaaaatgtgttgttctgaagacctccacaagacaaattcaagagcttgtagaggcaattgtactgcccatgacacataaagaccggttccagaagttgggtattcgtcctccaaaaggggttcttttgtacggaccaccaggaactggcaagacactcatggctcgtgcatgtgctgcacagacgaatgcaacgtttcttaaattagctggtccacaacttgtgcagatgtttattggtgatggagcaaagcttgtccgggatgcattccagcttgccaaagagaaagctccttgtattatatttattgatgagatagatgccattggcaccaaacgttttgatagtgaagttagcggtgatagagaagttcagcggacaatgttggaattattgaatcaactggatggattcagcagcgatgagagaataaaggtcatagctgcaactaaccgtgctgacatccttgaccctgctctgatgcgatctggacggttggaccgaaagattgagttccctcacccatccgaagaagcaagagctagaatcttgcaaatccattcaaggaaaatgaatgtaaatcctgatgtcaactttgaagaattggctcgctcaactgatgacttcaacggagcacagctaaaggcagtttgtgtagaagctggtatgcttgccctacggcgggatgctacagaggtaactcacgaggatttcaatgaagggatcgtacaggtccaggcgaagaaaaagtcaagcttgaactactatgcttaagctgtttgtcaaaacatatggaccataaggtgtttgtaacactactgtatgaataatcgaagctatgtttttaatgcaagatttttacagcatataagaccccacgccagcacacctgatttttttttgtattttagctcttttcttgaaaagtattcacgtttagaccgttggatgatttaatctcatttttgtaccctttgctcggcgtcacagcctgtggcgccgaggtaacatagtttagcgccacagatttt

SEQ ID NO: 33828 - DNA, 1558 bp, Zea Mays
ccaaccctagccgccactacctgctccctctccctagcagccgacagctgccatccagcgccaccaggaaagccgcccaggcgccccgcctctgcatccgcccgccaggagcagcgcccctgcaacccgctctgaagactcgacgcccagagccgcgcgcaaccccgttcgccgccccgccctccgtctcccgtcgcctcgcccctgcgctccgtcagctgcccctccccgaaccttctgcaaattcctattgtttcaagctgcatagaagtctgggattttctgagtgtggattcacagacatatattttcacagacactctctcagttatccaaatattgtcagtcagtttagatggtcggtcagccaccagggcctccccgtccggccgtcgtgcgtccaacagtcgggcaccggcgggcggcggccgctcgcccctgcggcttgggcgctcggccacagccagtgcgggccgtgcggcagtgtccactcgggcctcggccagctgctagctaatcctaatcagtaattacttttgcactttgtggacaagaagttgtgaatgccttcagtgctgcagtgttgggcctatcttcaggttgtgtttcttctcaagtcaaccaagagcagcctcatgatggttcccctcctctgagagaagatgacaagaatgggcattatgtttttgctgttggagataatctcacatctcgttataagatcaatgcaaaaatgggagaaggttagtttggatgaccatatattctgaaatagttgatttaactcgattgggcatgccaatacattcaacaaattttgtctataactgaatgtagctgggactacttggtgtaacctgttagcccctttgatcttattgtgcacacagaaaaaagataactaattttatgagataattccttgcctttgtttgcaaaagtactttggccgataagctggtgttgactaatcattgtatgttgattatgtattcaattcagcatggagttcagtttacttgcatactggctaccatgtatacagaatgctagtgtctgctgacacgttcttttttgcttgttttttgtttgctcttctcaaaaatatagtctacaggaatcagtggtcttctccgctacgctcctgaaatatttgagcagtctggagtggctagtttgttttcagacattggactttctcctcattcaacatcaattctcatgagtacccttaatgctttgctgatactcccttgtataactgccgcaatgctgctgatggatgtctgcgggagaaggtagaatctgagacaccatgaaaattagtgatgcagttgtggacttttgaacaatagctggagtgatatgaaacattagtgatgtagttgtgggcttttgaactgcttcaagctggagtgatgtcgctgtggtgcttttgtgactgatctagctagctatctgtaaatgatctagttgtgaatgatattataattgtgatgtttttgtgaatatataattgtggtgcttttgtgtttatgtgatggatctataactgtgg

SEQ ID NO: 33829 - DNA, 2909 bp, Zea Mays
tataacaaccaccaccagtgctatagttgcattgcatttccttgccactctctatttcccccagtgctagctctctctctctctctctctctcaaatactgcccatgcggcttgccctcctcgtttgatgaggccaatggccagcaatggcatggcgtccgcaccctcgcccttcttccctccaaacttcctcctccaaatgcagcagacaccctccgatcatgagcatcaagaacagcatcaccaccaccaccaccacaagcaccacctcgctgctcctccccttcatcctcaccacaaccccttcctcccctcttctcaatgcccctcgctccaggacttcagaggtatggcgccaataatgctggggaagcgtccgatgtacggggcggacgtgcaggtcgtcggaggcgaggaggtgaacggctgcggcggcgtgaacgaggacgagctgtcggacgacgggtcccaggccggcggggagaagaagcggcggctgaacgtggagcaggtgcggacgctggagaagaacttcgagctcgggaacaagctggagcccgagcgcaagctgcagctggcgcgcgcgctgggcctgcagccgcggcaggtggccatctggttccagaaccggcgggcgcggtggaagacgaagcagctggagaaggactacgacgcgctgaagcgccagctggacgccgtcaaggccgacaacgacgccctcctctcccacaacaagaagctccaagccgaggtctgtgtgtgatagcgtacacgcatgcgatccgatccgatcatctctcgtgctcgatcgtctcgatctctggcgcggcgtcctccgatcctcgccggcgccgggtagccactcgcggccgtcccggatctaggctagctgcgtgcgcttgccgggtgcgtcgcccctgcgtgcgcgaactgtgatccgcatccgcatcgcgatgttgatctgggcgtgggcgtgggtcggtcgtccatggctggcttcccagctcaatgattggtgggtggcggctcagcagcttagccgcacagcacagctcagctgggatccatgtgggtttcagtgcacgcagcagaaaaggttgttggatgcgtggccctcccggccctgggcgccgctgcctttttcacctgccttgactcatttgcctgcgcgcgtacacgtactatactaccaccgcctggccaggccctgccctgccctgcctgcctttgtggaatcttgctgctggagcaactgcaaaggcagagagagagagagagagagagagagagagagagagagcttttggaaaggtcagcagcagaatatgcaggcagagctgagtgacctgcgtcgagtcttgaacgaggaagatgctgctgctggcgcagtcaatggcttcatcatgcccgttcagatcccggtcctctcgtctcgtctctgtgcctcgtcacagaccatactacacactttctgtgcgccttagcttttagcttttctcgtcggatttgcactgcaaatgacgtgcgcattgtactacgtacgttgcacagcttttgccacagccagtactcgtatgattgggatccgagtgcttgcaaatgtactgcttccttcagtactcattgttttgttttttttttctacccgacgctacgatactcaagctgggacttgggaccatgccatgccgtgcagcagtaccatgaatctcgcatcaagcctgtactagcagctagtagctgctagctaggctagctgcagtgaaccagtgctcactgattagacgatcatctctccggaactcgattgacatcaacacagacaatgccccattgatataatatgccgcattgtgtgcatttacgcttacagccaaaaactgatcggttccgatgcagatactgtctctgaagggcagggaggcagggggctcgtcggagctgatcaacctcaacaaggagacggaggcgtcctgcagcaaccgcagcgagaacagctccgagatcaacctcgacatctcgcgcgcgccggcgtccgaggcccccctggaccccacaccgccgcccggcgccggcggcggcggcatgatccctttctacccgccttccgtcggcggccgtcctgcttctgctgctggcgtggacatcgaccagctcctgcacacctccgcccccaagctggagcagcacggcagcggcggcgccgtcgtcgtccaggccgcggaaaccgccagcttcggcaacctcctgtgcggcgtcgacgagccgccgccgttctggccgtgggccgaccaccagcacttccactgatagatcgcctcctcttgtccccgccacaagaaataataattctcaatgccacaattgcgatcaacgttcgatgcagccagatggaacagcggaggatcgattcttggcgagtggagcagcgagggagagagagagagagagagagcgagtaagcaaggttgtgtatgatctgatcgatcggcgaggtcgtagctgcgagatatgcgatggagctagtagctgatcatggtggaaagtggggtttgtaagcgcaataagcggagatgcggtgtaatttaattaggtaggttttggtttgagttttgatagtatctttatttttgcgtcttcattttttttttggtcttcgcgttttgttcgcttttttttttgttcacacatatataaatttgtgaattgtgatgaagcggtgttgcaagtttgttttttttttctcttttagcatcagcaaagcgtcgtgttactctatttatttctctaaaaaattggagtgggttgtttctcgacatgtgaccaatgatgcagtttcagacaatgtctccgaatatactgggataatataatgttctaatacaaaggatcatcaaaggttaatgagg

SEQ ID NO: 33830 - DNA, 5222 bp, Zea Mays
  misc_feature (1)..(2): n is a, c, g, or t
nnatatggctgataatggtgatgccaaagggggatctggcgcctatgcaattaatatagagaattttagtaagcggctgaaggtattctatgaccattggaaggagcacaagtctgatctttggggctcgtctgatgctattgcaattgctaccccacctccttctgatgatctccgttatttgaaatcatcagccctggatatttggttacttggatatgaatttccagaaacaataattgttttcatgcacaagcaaatacatgttttaagcagtcagaagaaaggaaatcttattgggaccctcaagaaggctgcaaacgaggctgttggtgttgacattgtgttgcatgtgaaaaccaagaatagtgatggtgctgacttgatggatgacatagtgcatgctgctcgtaatcaatcaaaatcagataagccagttgttggacacatagccaaagaggcacctgagggtaagcttcttgaaacatggataaaaaaattatctggatcaggcctacgactcgttgatgtaacaaacggcttctctgagctctttgctgtgaaggacaccacagagatcacatgtgtgaagaaggctgcttacttaacttcatccgttctgaaaaattttgtgattcctaagttggagaaggttatcgatgaggagaaggaagtctcacactcatcgttgatggatgacgcagagaaggctattctggacccactaaaggtcaaggtgaaattgaagcctgataatgttgatatatgctaccctccagtctttcaaagtgggggtaagtttgatctaaagcctggtgcgtctagcaatgacgagtacctgtattatgattcagcaagtattatcatctgtgcaattggttccaaatacagtagctattgctcaaatgttgctcggacatatcttatcgacgctacccctacacagaataaagcatatgagacccttaggaaagctcatgaagctgctattcaacaagtgaaaccaggcaatcagatgagtgcagtttatcaagctgcagtggctgtgattgagagggatgcacctgaacttcttcctaatctaacaaagtcagctggaactggaataggccttgaattccgagaatctggcttaaatctgaatgccaagaatgatcgtaggataaaaaagggaatggtttttaatgtatcccttggtttgcataacatccaggcagaaacaaccagtgagaagacaaagcagttttcactattattagctgatacagttttagtcaatgaaagaggacatgagatcttaacagcaccctgctccaaggcattcaaagatgttgcttattcgttcaacgaagatgatgatgctgttgctgctgaggttaagataaagtcgaagaccatagatgttatgccaaccaaggcaactctcaggtcagacaaccaggagatgtcgaaggaagagctcaggagacagcaccaggctgaacttgctcgccagaagaatgaagagactgctagaaggcttgctggggttggtactggatctggtgacggacgtggtcctgcgagggcttcaaatgagcttgttgcatataagaatgttaatgatgtaccatttgtaagagatttggtgatccaagtagatcagaagaatgaagctgtcctcttacctatttatggtagtatggttcctttccatgtttctactgtcaagagtgtgacaagtcaccaggacaaccgcacctgcactatccgtatcttcttcaatgtgcctggcatgccattctcaaatgatagcaagtttaattctcaaggtgctatctatctgaaagaaattacattccgctcaaaagatccacggcatagcagtgaagttgttcagcagatcaaaacattgaggaggcaagtggcatcaagggagtcagagagagctgaaagggcaactcttgttacccaggagaaacttcagattggaagcaacagaatgaagatgatgaggctttctgatgtgtggatacgacctgcatttggtggtcgtgggaggaagctcacaggaaatcttgaggctcatttcaatggtttcagatattctacttcaaggtctgatgagcgtgtggacatcatgtttggaaatataaagcatgcctttttccagcctgcagagaaagaaatgattactctccttcacttccatttgcacaaccatatcatggttggaaacaagaagacaaaggatgttcagttctatgttgaagttatggatgttgtacagacgcttgggggcagtagaagatcggcacttgatcctgatgagattgaagaagagcagcgtgagagggataggaagaacagaataaacatggatttccagaactttgtgaacaaggttaacgaccactggtcgcaaccacagttcaaggggcttgacctggagtttgatgtcccccttagagagcttgggttccatggtgtcccatataaagcttctgctttcattattccaacttctacatgtttggttgagctgattgagacccccttccttgtggtgagcctgagcgagatagagattgttaacctggagagggtgggctttgggacaaagaacttcgacatggctatcgtgttcaaggatttcaagaaagacgttctccgcattgactccatcccttcagcatcgcttgacgcgataaaggaatggctggacacaactgacctcaagtactatgagagcaggctgaatctgaactggcgccctatcctgaaaactataatcgatgatcctcagaagttcattgacgatggcggctgggagttcctgaacatggaggcgagtgactcagagactgaggacacagaggaatcagaccaaggctatgtgccttcagacgctgagcccgaatccgagtcagaagatgatgactctgacagtgagtccttggtggaatctgatgatgacgatgaggagtcagacgaggactcagaggaggagaagggcaagacctgggaggagctggagcgtgaggcaagcaacgcggaccgtgagcacggtgcggagtcggacagcgaggaggagaggaggcgccgcaaggcaaagaccttcggcaagtcgcgtgcgccggagcgcagcagcttcaagggagcgccgccctccaagaagccaaagttcaggtgaatgctgccttcggcaattcgctcgtgccaaagtgcagcagcttcaagggagcaccacctccaagaaggcagctctggttaatgggactccttgaagctttggcccccggagtagacgtgtctgtaggagtgtggtttgttatatctagattatctgcagtagcttagtccatctaaatgaaatgtgacagctgaactttggaagtcgcatcattggggaaacgaaatttaagtcgattgatttgttaatgccctcgttgatgtaatatttcccttgttcggtggatttccggtctgtataatatttatgcacgcttgcactttatccatggtatttgtatacccgtataaggcagcatggaggatgtttcttgcatgtggacgcattgattgatatatatatatatttaaggttcttttttttttctttttgttgcatctggttgtcgttgtaacagtgtacagccgcaatttgtttgccactaagggtctgtttactgattaacttgtctcattttacctaacttttctatctaagattagttcttcgatccgaaaaagtaactttatataatatgtggcgtaattaactcactttgcctaacttttcaatctaagattagtttttcgatccgaatgagtaactttatgcaagatatggcgtaattagccatcaaccaaacagtccgtaaaagacttgttcctcgaatgttttggtgatggcatctgcctatgatttgaagcccgctccgctgcgtttacagctgggtgtgagtttcctggccgcatgaagcatgaaaagatgggattcacagcggaactttcgttaggaatttgatggcaatcaagtttagttaaatttaattttcaaggctaggattctatgtgcacagccctgatatgcaccggatatcatcccgaatttatattgttatacatatacgaaaagcagtgaactctgctctgcaatcgtctgcatcgtcgtccttgctctctgttgcggcgacacgcacaggccagagcccgtcgggatggaaggcggcggctccggtgggcgggccgctgccgtcgtccccgcgcgtatgaccaccttgtcccggcactacttcggcggcagcgcgtctgagcgccaccacgacctccgcgtggacatcgtcgagaacatccaggaggactacggcatgtttgtctggccatgcagtgtcatccttgccgagtatgtgtggcagcacagatcacggttctctgcttccagagttgttgagcttggtgctgggacctcactgccaggattagtagctgcaaaggttggggcagatgtaacactaacagacattgcgcagaatgcagaagtactgaacaacatcagaagcatatgtgctctcaatgacgccaattgtactgtttcgggacttacatggggagactgggatgaatcggtatttgatttacatcctgacattattcttggagctgatgtactttacgactcagcaaatttcgatgatctgttcgcgacggtgacctttcttctcgaaaattcttctggggcggttttcataaccacataccacaaccgcagtggtcatcatctgattgagtttttgatggtcaagtggggtttgaagtgtttgaaactgctggatggtttctccttcctaccgccatgtaaggctgctttacttcaggggaatattcagcttgtcgaaattgcgcttgacaaggaaaaacataaatgaccctgaggagttgacgaaaagcacagagaaatggaatgccatatttggtcctctgcatacatgtacgagcaactccatgtcaagccatccgtttggactgtcatcataaggatgttcttttaattaaaagaaactcatggggagcatcgttgttcgaatagcctatgcatgcaagaaaaaacagaaaatgttagcagatatgtactcttttgtgacatctgtacagaacatgttggtttcctgaaaaaagatgcagaatgtccttttcttgatgtattcgaaaaaatgagctaaatgcataactttacacaa

SEQ ID NO: 33831 - DNA, 2120 bp, Zea Mays
agtccgagaagaaaaaggaaactgaagaagagacctcgtcgtctcgtgcagccgcaagcacgaggctgtgagcgagacagccaaggtgctcatcgactccagccagccgcccaaagccagccgcccaaaaagccaggcgcaaatcacaacctcgcctcctgtcccctccccggctcctcgttcccctctcgccgctcgcctccccgccgagatcgaggaggcgccaatagcgagagggtttcctcttccctccacggctccaacgagcccccggcccctccgcctcaaatcccacgcgcccggttggccgccgcccccgccatggatgtggatctgtggatctccaaggtcaaggagggccagcacctcgccgagacgaactatattttcatgggtgattttgtggaccgtggcttcaacagtctggaggttttcaccatcctgttgctactaaaagcgaggtatcctgcacacataacccttctgcgtggaaatcatgaaagtaggcagttgacacaggtgtatggtttctatgatgagtgtcagaggaagtatggcaacgccaatgcatggcggtattgcactgatgtttttgattaccttacgctatcagcaatcattaatggtcaagtcctctgtgttcatggcggtctttctcctgatgtacgtactattgatcagatacgaacaattgatcgcaattgtgaaattccccatgaaggtcctttctgcgaccttatgtggagtgaccctgaggagatagagacatgggctgttagtccccgtggagcaggttggctgtttggatcgcgcgtcacagcagagttcaactttgttaacggtatcgagctagtttgccgggctcaccagctggtccaggaaggcttaaagtacatgttccaggagaagggccttgtcactgtgtggtctgcacctaattattgctacagatgtggcaatgtcgcttctatcttaagcttcgatgagaagatggtatgtcagttcttttgtcttcaaggatctgctagaagcattacacacacctgattacttttgacttttgagtcaatttatacaataagtttatctcaatcctcagtaggttttagtgtgcatttttacaagcaacttttgtacggttaattgtttctgatgtgcaaccaaaagatatattatgcaaccagtgtttctggctaatatttttgtgtatttacattagtgtagattttataaaaattaatgctatggtacagctaagtggggtcaccagctgctgtcttttgccataatacatcaagtttgtgctggacatttttcatgtactttcggttcgaaataggttggcttgtcttttctagatacatagcaaaaactgtgtaccaaaaaaaaacgcccaattatttgaaatggactacttgctagtgacatgcagaggttggacctgaaacgagcaatgaaggtatgtagggagagggtttcagtttgactgttcatgaaataaacgaatttatgtataagtgcatcaaccatacttagggcttgttcagttaatccccaaaccgagaggattggatcccctgcaacaagtcaaaactcccctccagcccccttgacttggagttcaactgaacaaggccttattggggaaacaaaaaccatttgagatttagtagttaatcagcattatgcttattgtatctttgctccttctatggtagcaaacggccaacaagttttgtcccactgctttctcaagttgcctactaatgtttcatgagatatatgacttgatgccgacttacaatatgttttgcactgttaccaggaaagggatgtcaagttcttcacagagacagaggagaacaaccagatgcgaggcccaaggaccgcagtcccatatttcctatgacttcaattgtacaattttagaagtctattcgaatctgtaagggctaaagatcaatcagatgtgtttattgttttaggtccagattatagtgcaatctgatgcgtttgatttctgttttcctttaaccacatgtacaatagaccatcgggacagtcatatgttcctgtatctcttcggtgacactgccaaagttttgtttgagaaaaaaaaa

SEQ ID NO: 33832 - DNA, 1698 bp, Zea Mays
cccagccgtcccagcggccggacggcgacaccaaccacgccccgttccgttgaacagcgtcgagtcgtcgccccatatcaaacgcccacgcagcgccggggatggagcgcggccggcaccagatgagagctgcctcccacacatggcatcgtggccagcagcgtcaaggaggcggtccagcggcggcatgaaaagcgccgagctttcgggctccggtgcttcttacggctatggccggacgtcctcctcccctgatgcctgcggctacggccggcagttctcggcctacagcgcccgctcctcccaggtcagcaggagtggctccttcagtgcggcggcgcagcgggtcgccggcgccttcaccggctgcttcgtgccgcgccggcaggtcaaagccggggaagaggaggaggaggaggagaagaagagcaagcgctccatggattcaggatcctatcatggatggaatgaagcaaacttgagtgcagcagcaggatcatggcaggaaggcagggctctcaccatcgctgacgtgtcgaaggcaacatcaaacttcagcgaaaagaacgtgataaggcagggacgctcaagcaccatgtacagaggaaagctcagggatggttctcagatcgccgtcaaatgtgtcacgaagctgaacgaccagagtccgacggctgaactctggagggagcttgagaagatccagcacaggaatctggcgaggctctttggattcttcgaacgcgcagctgatagtctcgtcgtagtcgagtatgtcggcaatggttccttgagggaacatttggatgaatcatgtggaaatggtttagagctcgcgcaacggctcaacatcgcgatcgacgttgctcaggccatcacctacctgcacgagtacaaagagcgtccgatcatccatggcggcatccggtcgtcaggcgtgctactgaccgacgcgctggcggcgaaggtggccggctttgggctggccgggactgcggcctcggggtcgggctcaggctccgacgcaacgccggcgaggagcgccgccgggtacgtggacccggagtacctgatcacgtaccagctgaccgacaagagcgacgtgtacgccttcggcgtcctcctcgtggagagtaaaagctgtgccgtgcaggcgttgcagaagtgcagagcaggggaagccgtggtggccatggaccccaggatgcggcggagcccggcgtcggtggccgcagtggagaggacgctggcgctggcagcgcagagcgtcgcggcggccagggatgagcggccgtccatgcggcggtgcagcgagctgctgtggaccatccggagagactaccaccgccaggaggagccgcgctgcggcgccgtcgctgcggaacgtagcgacgagtgggtcatcaggtagcttagcttgccagttgaatggatatgattctgctttggattgatcggcatggaactgtaactagcctgtaagtggatgcgaagttctaggaagctgcagatttttttagtacgtacaacttctgtgattactatcaaatgatgtagtcattgcagccaatacctgcgaatttctagaaaacagtagacgttgtaacaatcagacgactttgctgaagtagccacttgatccctcaatcaaatataaataaccatcgaaggatgaggatgttgatgtattaaaaataa

SEQ ID NO: 33833 - DNA, 2928 bp, Zea Mays
gcacatagcactagtcacgtccatgtccatcccggcccttggtagcactaacatcgaagcatcctcctccgtccacgacccacaccgccgtgctcaaattcggccttgccagcgccgccgagcgtccagcgccgacccaagcacgtgaggagttggacaccaccgagaggaactctctggtcctgctcgtggtggtcgtcgtcatcgcttcccgggcctgagaactgtggtatttctcttgttctgaactcaccccctgcctttccataattccatctccggttcaccccgcgtgatctgtctcgtgcggcaaggcgtacgcgtcctttccctcccgcggcaaggcaacagccgccgtcgccctaagccaggtgcccagactgtagactacaattgcatcctgaagaataaaatggaccaacatgattccatggctgactcaccaaggaggcggcacaaccttttgcgtgacaaggtccaattggtgaaaaggaaagattcagatcgctatgagatcgtccgcttccatgatccactgtcttttgagaaaggcttctttgttgtgatccgtgcttgccagcttttggcacagcacaatgacgggataatatttgttggtgttgctggcccctctggtgctgggaagactgtgttcactgagaaggtggtcaatttcatgcctgatgttgctgtgatatcaatggacaactataatgacgcaactcgcatagtcgatggcaattttgatgatccacgtctgacagactatgacacactgctggaaaatatacatggtctgaaggaaggaaggtcagttcaggttccaatatatgatttcaagtcaagctgccggactggttatagaacagttgatgtccctagctcccgaattgttatcattgaaggtatttatgcactgagtgagaagttacggccagtgatagacttgcgtgtttctgtcactggtggtgttcattttgacctagtcaagagggttttaagggatatacagcgagctggccaggagcctgaagaaataattcatcagatctctgaaacggtttatccaatgtacaaggctttcatcgaaccagatttggagaccgcacatattaagatcatcaacaagttcaacccattttcagggttccaaaatcctatgtacattctaaagtcaccaaggtctctaggacctgagaaaatcaaggctgtgcttggtgatgatcatacggaaagcaacgaagaaacttatgatatatatctgcttccacctggtgaagacccagaagcatgccaatcttacttgagaatgcggaatagggaagggaaatataatctaatgtttgaggaatgggtgaccgacaattcttttatcatatcaccaaggatcacttttgaagtcagtgttcgtcttcttggtggtttgatggcattgggatatactatagcagctatactgaagagaagcactcgtgttttttctgatggcaaggcaactgttaaaattgattggctggaacaacttaacagacaatatatacaagtgcaaggaagagatcggctttatgttaaatctgtagcggatcagttaggtttggatggttcttacataccacgcacatatattgaacaaattcagctggagaaattgattaatgatgttatggcgttaccagaagatttgaagacaaagctcagcatcgacgatgagctggtctcaagtccaaaggaagccttttcccgtgtttcggctgatcggagaaacaaacttatgaagagtggcctatctcaatcatattcaacacacggagacaaaaatattgtgaaattgagtaaactaacagaaaccaataggaggtttggtggagggcgggcccttgaaccgcctgctatcaaccagggtgcaatcacccagctttcagaacagatatcaacattgaatgaaaggatggatgagtttacctctcgagttgaagaactcaactcgaaatttacagtgaaaaaacatttgcccagtcagcagaacttagctcttccaaatgatgcttgcaatggttccacgcctacaaatctctttgtctctcatttaggcaatggtactctgatacctcattcttcatcatcaaaccaactttcaaaggattccccgatgatagaagagattatgaacataacaagaggtcagcgccaggttatacatcagctcgacaatctgacaaatctgcttcacgagcatttggtcttaacacgccagactaataataccgccagcaggaaccgggtgctggatagcgacacactcatctgtccacttatttgcctgactgttgccagtatcggttacttcatgtttaaaggtctcagtaggggctgagcaaagtgagttggcccaaacatgtgctccgaggctcaccaccaagttttggcagaactggagctaaaggaagacagttcttgaaccgtttacatcaggaagatcatatctaacagcttacggtcttattaagacaggtaaacctatataccagcacatggaacaaagctttcgcttttcagggagttattactcccaaacgcagaaaatggtgtaccagaagcatacacttctgtaacaggcactgacagttcccagtgctaataaattttggaggttaaaataatgctcagataatgtcgaagaaattatgagagatctataagtttaactgaacattgtcgttgtctttgtcgtgatttctgagtgcgagcactatctcatgatgccatctgaattcacgattctacaaaattgtcttttattttattctcacaagtaaccgggattaacaattgctgcatatttgacgttccgtatggtacaactgtcggaaacgttgaaacggaggagagggtgtagaattcgtcgcgcgctaaaaataacaaagaaaa

SEQ ID NO: 33834 - DNA, 291 bp, Zea Mays
atctggggtggcatccaacaacccttatggatcgcccagcccatcgccgcaccagtccagccgcccacctcgatgagatattatctttgttagtgttgttaatactttgtgagataactcggtctgaacttgtttgatattggtaatgctttgtgagatacttgagacttatgttcttgagtgttgaatacttatgtttgtgtttgaacatgttggtaatgctttgtgagcacttgtttgatttacggtctttgtgagatatgtgatgtatatgtgatatcttgatgatta

SEQ ID NO: 33835 - DNA, 3038 bp, Zea Mays
cgtagtccatagtactccatttgcaaattgcattgccacacctcggctcatccccacctcacctcggcctcacttcacaagttcacatcacgaaacaggagcgtcataaagacatgggcgtcgcagggtagcctcagacggtcagaccagtgacgcagcggcagcggcagcgggcatggggtcctgagtgaccgactgcgaaggagatggctggagcgcgacggccccggagccattaatggggtgctcatcctcctccccctcctcgcctcctccccgccgggtcgcggacgcggtcggctccgccttttaaccggcctgtccgggagcggggcgccggaaccctagtgctgctggtggcacgcggcgcgccccatgggcatcgatctcaacatggtggacggcgagggccacgagcgccgcccgccgccggtgacgtgccgggagctgtggcacgcgtgcgcggggcccgtggtcgcgctaccgcgccggggcagcctggtcgtgtacctgccgcagggccacctggccgcggcgggcggcggggacgtcgctgcggacctgccgccgcacgtggtgtgccgcgtcgcggatgtcgagctatgcgcggatgcggcgacggacgaggtgtgcgcgcggctggcgctggttgcggagggcgaggcattcgggaggaatctgggcggtggtggagttgaaggggacgatggcatggaagatttcgatgctgaaaggaagtccgggatgctgcacatgttctgcaaaacgcttacggcctctgacacaagcacgcatggagggttctctgttcctcgccgtgctgctgaggactgtttcccgcctctggattataatcagctcaggccttctcaagagctggttgccaaggatttgcatggagccaagtggaagtttcgtcatatatataggggtcagcctcgtaggcatctcttgactactggatggagttcatttgtcaataaaaagaaactggtttcaggggatgctgtgttatttctccgaggtgatgacggtgaactaaggctgggtgtgcggagggctattcagcttaaaaatgaggccctttttgaagatttcaatagtgacagcacaaagcggcattctttgacggctgtagctgattccttgaagaacagaagtgtttttcacatttcttacaatccaagagctactgcttcagaatatattattccatacgctaagttcctgaagagcctcaatcatccggtctgtattggagcaaggatcaactttcagtgccataatgaagatgttagtgaaaggcgatctggagtggttgttcgcattagtgaaatagatcccatgaaatggcctggctcgaagtggagaagcctgctggtaagatgggaggacggtgctgaatgtaatggccaagatagagtatctccatgggagatcgagatagctggtggttctgtctctgtttctcattctctttctgcatctagttctaaaagaaccaagttgtgtcctcagggaaatttggacgttccagcaatgtatgttacagggaatggttgtactgactccatggaaactggaaagttacccagggtcttgcaaggtcaagaattgatgagttttaggacttgtcatgttccgtgtgctcctcaaactgctgaggctgcaaaacttcaatcttctgatgctagtaggttccttagtaatgcacatggctgcgcattgggtggtccaacaagcagactcgcagtgcatagctctggttttacctaccaatgtgtaggcttcaatgaatctattggattctcagaggtcttgcaaggtcaagaaatttctcgggcggttcctaagttccaaggaatgatgtcggaagcttgttcactgaaagacagatatgggctgcatagttatatgcgtgccccagttgctgttaatggattatcagctacaactcaagaatgttctctcgcactatctactccgccaggagcacaagtgccctctctctaccctggtaatgttgttaaccgaactgtggttccacaacttggactggcaaggaagtttggtggtggaggtacaaatggccagcagtctggcccatttgataggccgagggaactttggaccaggccacagcatgaaacacctgaccaaatgaacttggatcagtttgagactagaagaccttcagtgcctgtagatgctgctaagcttgggtctggtggaggggaggttcgcaaaactagctgcagactttttggtttctccttgactgaaaagatcttgccagcagatgatgatgacgtcaaggaagtgagctatgagactgagtgccagaacccacggatgctggacctgttcgggtacaactgctcaacaccgagtgccgctcttccagctctgtgtgctgccgccccctttggaatgtgatgctgcttcgaatctttcgataactttgctccatgtactcttagaagttttactttcccagtaccccagtgtagtcataagctgcttttgacatcattccctttggtctgcctcaagttaagcagtcatttgcacaagtaaacgaaggttcgttggtgaaccactcctcgacatgcctcaccctgtcacccaaactattgtggttagtctcaggatacccagagacaccacattgtaacttatgtcgatgatccttcagaactgttgtgcgatgaagctaacaatttgctctaaaagtactttgcttgctctaaaagtaccggctatgtatatttaaatcagcacctgtatgagtttttttagccctcacaagccctggttgcagtcgactaggccgtgtgattgtattagtatgctatctttttaaactgtcgcttatgagtctttattctagtgcattgtgtgaatactctgttcatcgcatgcaagtcttgtcttctgtttctgttggcttggtaggagatactctgattttataacatgtcagatttttattggtcaattcaactttgaccatcaatatacaaggaatttggtgaata

SEQ ID NO: 33836 - DNA, 303 bp, Zea Mays
caacaatggcatggttgaacaaggagtggaccatacacatacgaagccaaagttcatttccaatggtgatgatgatgagggtgtcatattcgaagaggatgaggatgatgatgagaacgatggatacctattcgctgggcaatatgatgacaccgacgaggacatcgagatcgatggtactcaagatgaatctactaccactgatttgcctgacccgtatgacaaagtgtacagtaacgtgcctgaagaaacacatatgctgaagtcagttcccaactgcggtcattgcactgcgaagaagtt

SEQ ID NO: 33837 - DNA, 2774 bp, Zea Mays
gtcccgcgcgcggccgccgcccctcatccctgtcccgtcccgcgcgcggccgccgcatccgtccgggcctcctcgtctccccagccccgctgccgccgggttcatcagcagaagctgcttgctccgccgccgccctcttcctcctctactgattttgcttcggggttcggctaaatttcgtcggatggatattgatgccagcgccagcgtcatgtgccagctgctgagccccgagggagaccctctaggctctacgctcacgaggaagacagaagaagcaaagcgacgtcctcctcccctgctgcacagagtgggctggggccacggttgcaggcgcgagaagaaagcagtgtccgtcagtagcagcggtggaggtgctccgcggtcctagttcagtagttctccccctccggcggtggcagcggtcgggtctgcgtcgcggcggcggaaagcagcccccctgagcccggagccgtccttctgaagctcggcggcggcgagatctgagttcggtcgcgcggagaggaggtttcgctgtgccggcgtggtgctcccggagccgcgcgtggaggcggcgcctttgcgcattgccgttccgtccatcccgtccctgcaagctctaaggcttccgaagaattgaaaccgggttcttgggggcgcgacatgcggttgcgttctgacgctacgtgagcgcgacatgcggggagggcgagccccacaaggcaaggctgacgatgcatgcagggagggcggggcgacactgggcatgcgcggaggcaactttcgtaggggaggcgggggcacgaggatggtctacacatagtcttaatagttagtagagatctctttttgttgctcacgtttctggaggctattcattttccttcgttcaccaccatacccaacctcttcttctcgatccttctacctctctcacattcggtgctcaggatgccagccctagggctcgccaacttcatctccctgctccagccgctccctccagactgctcaaccgcttgctggattgcgcaaaggtgtcaaaagagctgctgataaatacaagatgtcagctcaaaaggctaatgtctcaccagcccctaagcagtcctgtcccgcgcagcattcagcacctccttctccagttcaagttttagcttcagcagcaccagcgtcagcaacagcatcatcagcagcagtgcagcaccagcttctccagttcctgcacacacagcatcagattctccagaagcaccagtttctgtttgtccttctgttttttctctcccagcaccagcttgtactgctgtagttccagcaccaccacattctcctcctgctcctgttacctcagcaccagcttctcccctgcaccttctgcagcagctccagatactaaagatgaaccattgcaagataaaacagttgaagaaagtacagatgttgtgactggaaacatatctggttttcctgccagccaatttgatcatagtgcatgggcatacaagggtgccatggtcaggaatatgccagatgacccgtcccagtcacaacatctcgttcaagaagatttagttgatgtatttgacattttggatgacctgaagaatgaccctgtacagcgtgatttgttgaaagaagtcgagaaacacgatgtaaagaatgtttctacatttggttctactgaaaggagcatccccctgtcccaaggtttcacgatgccccggtacgtgtgccagtaataatcagtaattttattcttttaatattgtataatagtattcagtaataaccaattctatgtcagcaggttgtacctgatgacactgacattcagtacacacctcctcagccacgagcgacacgttctcaagctcaacctctgaaatcttcgctccgtaccaatgagactaggcagattaggaaaggccagaagaagctcaagaagtcgcctaagaaagtctcccaagatgttgagcttgatgacaatggtttccccatcatcgactttgctgctctagaccgttttgatcctcctccacatcttgccgtggatgttgagagttatggtggaccagctgcctcaggttgatatggtggactcgtgtcactattcagacctgaatggcgtcgcaaagtggctgcaaagcaggcagctttgaggatggtggcagaaattcttgagaagaggattgctcacccacagttgacatactttacatatgttgaaaagttccttcctgaggatgatccagaagatgtgattgctttggagtacaacctaattggcagtaagcagatttatgaagcatgtgcagatggcgaaatgagaagcaatgaccaagtgtactactacaccatctgcatagctaatgaagacaagctcttcaggaccgaagctgccgattacagaattttccttcctaccaatctgtcattcgcttgggtgatcacccaggccgtcgtcggtgcaagtcgccggagcaacgctgttaggcttgagcacgaacgcggcgtgaccgacaagctcggtgaggtggagcacgatgagcgagacgggacctcaacgcctccagtaggtcgatcagcggcgccgatgggcatgccgccggggagcgccagccctagcatcatgggcccgatcatgtacttgaacccgatctcgtccgtcaccagcgccgcgatgacgacgacaaaggaaccctccgacaacagtgaccccgtcggcgggcgcttgtacgcgatgtactgacccgccgcgcgcgccgcgcgcg

SEQ ID NO: 33838 - DNA, 2203 bp, Zea Mays
atcgcccgcatgtgcatctcgtccgccacgggccacagccggcctcactccgcaagtccgcgaccatgcggtgcaccctctccgcccctctccggcgctgtctctcctccaccggcgccgccgatcctagcctagtctcttcagctgagcatgcgtaccggctcctccgccgccaccactccgacccgcagaggctctccgccgcgctgtccgcgtcgggtctcgacgcctcctcgccgcacctcctcgacgccgtcctccgccgctgtggcgctgcctcctccctcgcgctgcacttcttccactggtgctccccgtcgctgccctcgccgctcccgtcctccctagcgctcctcgccaagtccttctcccgcgcctcctccgcgccgtccccgtccctactcgcgccgctcccctctcaactccttggcccctccctcctctgccccgtcctgcgccgcctcccgcaaccgcgcctcctgccgttcgcgctctcactactctccgcccgccccgaccacgaccagcccgccctctttctttccctcctcgagtccctctccaaggccggccacgtcctcaccgccgagcagcttgtcgaggagctccagccccggctcccgctttcgctccgccactatacggccttgctctacggatggtgccgtcagggcaagctcgacgaggccaagcacgtgctcgctcgcatgaaggctgcggatgttgcccttgacgtcgtcgtatttaacaccctgctcgctggcttcgtcgcggaagggagattcgaggacgcgttcgagctggcggggcagatggagcagcgtggctgtccaccgaacgcggtgtcgtacaccaccctgattcaggggcttggcgcgagggggagagttgatgaggccatgcgcgtgtttgtggaaatgcgaaggaaggggtgcgcgcccgatgctgtcacgtacggcaccctggttaacacgttttgcaaggctggcaagatatcccaggggtacgagttcttggatgctatgtcgagggatggcctgcgggtggacgctgccgtgtaccatggtttctttgtagcacacgagaagaaggagcagcttgaggagtgcttggagctgatggagaggatgcgggagtgccggtgtccaccagatctcaagatatacaatgtggtgattcggttggcctgcaggcttggggagaccaagcaagccatgacattgtggaatgagatggaaagtgctgggctcagtcctgtggtcgatacatttgctatcgtggtgagtggccttgttgggcagggtttgctgattgaggcatgtagttattttaaagacatggttgggagggggctctttgtggtaccgcaatatggggtgctgaaggacctcctcaatgcgttggtcagagatgagaaacttgagcttgcaaaggatgtttggaaatgtattgtgagcaaaggctgtgagctcaatgtgagtgcatggactatctggattcatgcactgtttgcgaagaaacatgtcaaggaggcctgcctgtattgcttagacatgctagaggcaggactgatgccacagcctgacacatttgcaaagttgatgaaggggctgaagaagttgtacaaccgtcagattgctgctgagattactgagaaggttaggaagatggcggaggagagacatgttagctttaagatgtataagagacgtggggtgagggatcttgaagagaaactcaaggcaaagaggagaggacagaaaaagaggcatctgcggcagcctggtcatggtcagtctagtagggatgctggcaatttggatgcttctgatgaagtagaattttccggctaattgaaatagaattcattgggggcaatgcatctctgttcatttgaattgttttggggagtgatagacttactaaacaataaaggagtgctggtgatcatgccttgccatcataatattattcttatgctaaagatgtattgggtttcaggcaagagccaagtggtacatcgattacatgtgaagttgtgtgccaagagttactgaccatgaggaggggactttctgatggaacctccagtaattcatctcattagggagatttcgtcgaagactgtcactacacattaaacgtctagctctaacttttttctcaacgcacatgagagctatacatcattatattatgaaga

SEQ ID NO: 33839 - DNA, 1182 bp, Zea Mays
tctagcgttggtcatgcacgatgtcttccgggggattggtcaccaagaaccatcgtatccccgccagatcgcagatcggtggtccgccgcaccggaaaaagctagctcgggagcaaaggcaaagcagccaacaacaatcagagggacaaacagagagcaacgaagctcgcgaatcgagagcgccaggaagaagaagaagaagaagatgaagatgaagatgataatgataatggagcaggaggaggaggcgtgctcgtcttattgctcctctccgctgcggcagtgcaggatttgctatgacgaggaggacgagcggcgctccgccatggagtcgccctgcgcctgctccggctccctcaagtatgctcacagaggatgcgtgcagaggtggtgcgacgagaagggcagcaccgtctgcgagatttgccttcagaacttcgagacgggctacaccgttcctcccaagaaaacccaaccagctgatgtcgcggtgaccatcagagacagcgtggcggtgcccaggcagcagaacgagcccgaggacgaggaggagcaggtggccgcggcgctgatcggagccagcgatccggagtacgccgagtgcgcccgcgccgccggcaggagcgcgtcctgctgccgctccgtggccgtcacgttcacgatcgtcctgctgctgaggcacctggtcaccgtggtgacgctcggagcggccaaccagcagcagttcgccttcagcctcctcacagtgtacatgctgcgggcgagcgggatcttgcttccgttctacgttgccatgaggctcatctgcgtgatccagcagggacagaggcagtacaggctgcatctgcttcaggagcagaggagacacgcgttgaggcggttggtctggctgcagggtcagggacagcaccagcaaccgcatgtcatcctggttcgctgaggaacaaggcattcgtctagtgctcatacgctcgttcatccaaccatccatcacgtacaagactgtaaatttgtaaaagggacaaaataaagaagaaaaggagaaagaaaggtggcgcaatgttttcgattgccaatcttctcttaacctgtttacttggttttaatccgtattaacttctactgctactgctttgtttttgtcacccctttactggtgaacgcagtgatgtcgtactacca

SEQ ID NO: 33840 - DNA, 3010 bp, Zea Mays
cacagcgcctttcccctgcctttctataaaatccacgtgaggccccgacgcatcgctctccaaatcactcgacgcagcaggcagcacacaacccaacactactctccctcccagtctcgccaacgccaccacccccaccattccaaacccccgtctcccaccggctgccgtttccctcccccctccctccctgcctccctcggcggctcctcgcggacggagagaaccccgctcccttgcctagggttcccggaaccctagccccgatccgtacgcgcgagggtccccggcgacgaggaggctgctgtgaggggagggggcagaaggcgcgggaggcggaggcctgtgctgtatgtcagatcgtgggagccggcgaggcggaggcggaggaggagactacggacacggtcagctcgcgaacccgctccaatggccgcagctaaggaaaaggcgtcggtatgctgccgcgatgcgcccgcgcgtgtcgctggcgccccagtcgtccccatgcgcgcgatcgccgcgtccccggtcggcaaggtcgtcgccctcgccgcgggaggcggtgagcgcgtttctgcgtcggctgctggctcaagcggcgccgtgatcgaggagatcgccgcggtccagcccaccaccgcgaaggcatcctccaaagggataccaataatgacaagagcccagaggtgtcaccctttggacccattatctgctgctgaaattgcagttgctgtagcaactgtaagagttgctggaagatctcctgaggaaagagacagcatgcgctttgttgaagctgtgctgttggagccagaaaagaatgttgtggcactggccgacgcctacttctttccacctttccaaccatcactgctccctagaagcaaagtggaactatctgaagtgcatgccgctactaggggtggacatcacagagggaaggtgatatcatctgaagttattccggatgttcaacctgccatggatgctatggagtatgctgaatgtgaggctactgtcaaaagttatcctccatttattgaagctatgaagagaagaggtgtggatgacatggatcttgttatggtggatgcttggtgtgctggctactacagcgaagctgatgctcctagtcgcagacttggcaagcctttgatattttgcagaactgagagtgatagccccatggagaatggttatgctcgtcctgtagaaggaatccatgttgttgttgatatgcagaataatgctgtgatagagtttgaagataggaagttggttcctctaccccctccagatcatttgagaaactatactcctggggagacaagaggaggtgttgatcgaagtgatgtaaaaccacttatcatcaatcagcctgagggtccaagttttcgaattaatggctattttgtggaatggcagaagtggaacttccgtattggcttcacccccaaagagggtttggttatctattctgttgcttatgttgatggtagccgtggacgtagacctatagcacataggctgagctttgttgagatggttgttccttatggagatccaagtgaaccacattatcgcaagaatgcatttgatgctggagaagatggacttggaaaaaatgctcattctcttaagaagggatgcgattgcttgggctacataaaatattttgatgcacatttcacaaacttcactggtggtgtggagacaattgagaactgtgtttgtttgcatgaggaggatcatgggatcctttggaaacatcaagactggagaactggtttagcagaagtaaggcggtcaaggaggctcactgtttcatttatctgtacagttgcaaactatgagtatggtttttactggcacttctatcaggatgggaaaatagaggcagaagtaaagcttactggaattctcagtttaggggccttgatgcctggggaatcgaggaaatatggcacaactattgcccctggtctgtatgcaccagttcatcagcatttctttgttgcccgtatggacatggctgttgattgcaaacctaatgaagctcataaccaggtggttgaggttaatgttaaagtggaaagtgcaggcacacataatgtgcataataatgctttctatgctgaagagaagttgctcaaatctgagttgcaagcaatgcgtgattgcgacccttcatctgcccgccactggattgtacgcaacacacgaactgtgaatcggacggggcagccaactggctacaggctcgtacctggttcgaactgcctgcctttggctctgcctgaggcgaaatttctgaggagggctgggttcttgaagcacaacctctgggtcactcaatacaagcgtggcgagatgttccctggaggggagtttcccaaccagaatcctcgcatccatgagggtctgccaacatgggtcaagaatgataggcctctggaggaaaccgacattgttctctggtacgtgttcgggctcacccatatccccaggctagaagattggccagtcatgccggtggagcacataggcttcatgctcatgccacatggattcttcaactgctcgcctgcggtcgacgtgcctcccagctcgtccgatgcggatgtcaaggaagccgagtcgcccaaggccatccagaatagcctcatatcgaagctgtgagctttgctgttctgccgaggaaaaaggatccgcgcgcggctgctctccctactatttttttatcgtattccgcgagtaaaaaggaaaactgctcgatgtccttttgtttgttgcttggtaataccgttctgtttgctataattatcgatcagcgggatgtgaagtactgtttacattgctcgcgttctaataaagtactgtttggacttgcttaaaaaaaaaaaaaaaaaaaaacaacaacaacaacatggctcatgcattgaatcccttgcatgtttcagcctattgctgtactgaactgaatcccttccctcccaacagagctcag

SEQ ID NO: 33841 - DNA, 2779 bp, Zea Mays
cccacctcaacctcacctgccactgccatcctttctcacactcgcgcaccggcgcgcgtccgctgcccgcaccccgtcccgttgtactgcagggcggagcctcgctcgccttttgtactgcacgcccacgcgtccacacgcgcgcgcggcccggacctggctacgaagcgcaggcagtacagacagcaccgcctggtttgagcggctgccgccgctgcatatactccctccctgccttccagtgccaggggtgaccggcgtgcgtgccattccacgctctcgcggctcgtgtgccagcggtgaccagcgctcgtgctcgtccagtccaccaggcgctgctgttccggcaagccagccagcagcagccgccgccgccgccgtctcggagctcgagctcctagtcccccggggccgaggcgccggcgccatggaccagctccggcccgagccggccgcgggcgcgcacgagatcgagaagacggcggcgccggacgtggagtcggagcccgcggcggcggtgccggagccggagcgcgtgccgccgtggcgcgagcaggtcaccgcgcgcgggatggtggcggcgctgctcatcggcttcgtctacacggtgatcgtcatgaagctgagcctcaccacggggctcacccccaccatgaacgtctccgccgcgctgctcgccttcctggcgctccgcggatggacgcgcgccctcggccgcctaggcattgcatgccgccccttcacccgccaggagaacaccgtcgtgcagacctgcgtcgtcgcctgctacaccatagggttcggcggtgggttcgggtcgttcctgctgggcctggacaagaagacgtacgagctctccggggtgagcacgccgggcaacgtgccggggagctacagggagcctgccatcggctggatgaccggattcctcctcgccgtcagcttcgtggggctcctcaccttgcttccactcagaaaggtgctcgtcatcgactacaaactcacttatccaagtggaacagccaccgcggttctcataaacggattccacacacctcaaggagataagaatgcaaaaattcaggtccgtggattcctcaagtacttcgggatcagcttcctgtggagcttcttccagtggttctacaccgccggcgaccactgcggattcgcccagttccctactttcgggctccaggcttttaaccagacgttttccttcgacttcagcctgacgtacgttggtgctgggatgatctgctcgcacctcgtcaacctctcgttgctgttcggtgccgtcgtttcctggggcgtcatgtggccactcatcggcaagcagaagggcaactggtatccggcagatgcatctcagaatagcatgacaggcatctacgggtacaaggtaaactggccttcctttgcattgcccttctcgtgggagacggtctctacaacttcgtcaaagtcatagctatcactgtcaagaacatacgcgagagatcacgtcgcaagaacctgaacagagtggcggacgcggacacgatggcgctggacgacatgcagcgcgacgaggtgttcaacagggacaacatcccgacgtggctgtcctacgcggggtacgcggcgctgagcctgatcgcggtgatcgccatcccgatcatgttccgggaggtgaggtggtactacgtggtggtggcgtacgcgctggcgccggcgctggggttctgcaacgcgtacgggaccgggctgacggacatgaacatggggtacaactacgggaaggtcgcgctgttcgtgctggcggcgtgggcggggaaggacagcggcgtggtggccgggctggtggggtgcgggctggtgaagcagctggtgctcgtgtcggccgacctgatgcacgacttcaagacggggcacctgacgctgacgtcgccgcggtcgatgctggtggggcaggccgtgggcacgctgatggggtgcgtcctggcgccgctcaccttcatgctcttctacagggcgttcgacgtgggcgagccggacgggtactggaaggccccctacgcgctcatctaccgcaacatggccatcctcggcgtggagggcttctcggcgctgcccaggcactgcctgcagctgtgcgcggggttcttcgcgttcgcggtgctggcgaacctggcgcgggacctgctgccgcgccggctcgcgcggctcgtgccgctgcccatggccatggccgtgccgttcctcgtgggcgccagcttcgccgtcgacatgtgcgtggggagcctcgtggtgttcgcgtggcacaagctcgacggcaagaaggccgcgctgctggtgccggccgtcgcctcggggctcatctgcggcgacgggatctggacgttcccgtcgtctctgctcgcgctggccaaggtcaagccgcccatctgcatgaagttcacgccagggagctagagggcgcgctgacgatgcgtacagaacagagggcatcgttcgtcgtttgtggggtggaatccgtgtagtagaattacataccaaccaggcctgttctaatgtccatatgagcttaatgtacggtgtatatatatgtaaaaatggaaatctgaaggatgacaggatgaattgcctgttgtctagtagcacgcatattattattattatagcatagcactaagagcaagtccaatagactcggtaaacagtctctgctcggtaaaaaaatgaaaatcgtcgtgaaaacaaattccaagagactcgccttcgtcctcacttctccatc

SEQ ID NO: 33842 - DNA, 2939 bp, Zea Mays
agccaatgaattgcaccagttccctgaccctgagtctgcttgttgctccttgacggttcatccacacctgtggtggaataagcatcgcccacagacccaatccccaagcctcaagatacagcagtgatggacattgagcgatgcaggatatggtggccacgccaggagctgcagttcaagcagaaacccttctcaccgaggctcatcctgtttggatggttcttcagcagtgctggttctatcgacatcgtcatctctgcagctgtgccccaagttcacatcctgcactcttttgccacactggacaccctccagaccatcatcctttcctcaaataaaaggatgccagtaagcctgcaagaatctgctgcatttaccattcttggggattgtgtccgacacccccctaaagagttagaaggatactgctttaataaattggagcagctgcccttggatgcaaactttgttcagaaagaacattttggcacgagaagaaacaatgtcatgattggatcagttgggaatggggatcagggtccaagttatgatcataggagatggggatgcgattgttgtgtgttggatggttttctggaagtttgcagaaagtctgcagtcaaagagggcagttgggtgcacttgtattggaagtttggagagaactttaagagcaacctgaatcaagttccagttcttcaccatttgtatcttgatggccaacagattgaaaacaatcgttgccatgtcatactgtatgaggttccgaccattggcagaaaccatttctcactgggtttggatgcaccccgtacgttgaatgtttctttcaaaaagccaaattggataaatgatctacaaaagcaaccatcatttcttgatttggattcaattgttttggcgcttaattgttcaaatgcagctagactgccggacactcaggaatgttctactacatgctcaggggcttatttcatctttgcatctgtatacgatgtcttagttcaagtaacatggcattgcgtggggatatttttggcttcatcatcaactattctctacatcatgattctaatgtcccggaaatgtttaagccatatgccccagtacttgatgctaaataaggttttcagacattcatggaacaacattcatcttcgcagctgtcaaattctctactggccaattgtcttccaagatgcttccttaagcattcttattaaatacagagactatttgtatttggactattgctctcgtccaccacatgacagaagcaatcttgagatccggttgtgtgtggctgatgggtgttccagctggatttaagctgaatacagagttagcagagctcttaggcatgatttctcttaatgcagttcaaatttactctaccctttggtttttcgttggaggctacctgagacatataattcaaggcattgcagtctctggaattattttaggacttacagctccagtttcattctttattgacattatccagcttgctacgttgcatgttaccatccttcactggttaatctcatcgttatattcaagacaaattcagacagtagcatcattgtggcgtcttttcagagggcgcaaatggaatcctcttaggcagaggttagatagttatgactacacagttgaacagcacgtggttggttccctgttgtttacaccaatcctacttcttatacctacaacttctgtattctatgtattcttctctatcttgacaacaacggttatctgggtgtgtgtgatgctggaaattgtcattgctctaatccaatccactccttatgctgagttaactctatgggtgatgaggaggcacagatttcctgctggattatttttctttcatctgccatcaaatgggcatacttttgaagatgacgacctatcatcccattcagtcggatgttgcaatgaaacaagaaaggaggatctaatcgacaaactatcagaatcattagtttcagaacttcattgcagctatgcgacttttgttcaagtaatcagatcaaattacgagagagttttcaacaggactggttactccttttgcaaacaattggcatacgggatccttagcggtgaaagggtgccttcatcgcttcatctgcagacgtctccctcatttccctggatgaacatcggtattacggagtattggatgcactgctatgtttgtgtccttcagtgtgcaccaaagagagatacatgatgattgcatttgaacgaaccttggttcttttcggcggttttggtttcaaatagaggttttctatagtggtggttgattattctggaggcaagggaaggtcatctgtacactcatggagccttttccctcgtaacaatagcgatgcgagttttttaagtcagctgtaattttatagttatatgggatttgcacgattatggtgcttctacttgagtacttgacactcgtgtgctagctgtgttttcatgaaagaaactgaatatcagctagactgacgggtgagagaaaaggactcatgctccgctgcaaagatgaacctcattgttgcttcacgataatagcttcttctgcacgtggcaaatagctggcatgtagcaggatattttcttttcaaatatttggggtacctgaccttgcttacccaaaaagccgagtagatttagcttactatgcattggtgatatttttggcaatgaacacgaatcgagaagtcgtagcgttatagcgagctgggccaatgtaagtcagtgttgcacgggatattgtctacatcacatgcagatttttttttcccacgcgaacgatgcagtgaacatgcatttaggttaaactcttaggctcatttggaatgcaacaagtttatagagattgtatttgaattttacagcaatcagtttatttttcatatgaaaaacac

SEQ ID NO: 33843 - DNA, 1783 bp, Zea Mays
gcttcagtgtaggcgtgcacactttgtgttctgcctccgacaccctctcgcccgccctccgtcaatcacgcaaggtctgccacccgaccaccccatccgcagcgccaacacctccgtcggccgccagatccggatcccgtccccatcatcaacgcctccgcccccgtcaagctccctctacgcgtctgcctcctcctcggcctggatccgcggcggccctagagcgcgggcgcgcaggcacggccggcgcggctacacggcggcgcggacgccgcgtccccggccccggtcatggcgcgggtgcaggagacctgccatggcggcaccggtcccaagccctagccctggtggcggcgcggcatcaagccccggccccaccggcgggcgtggtcccgacggcgggcgcgatccctgcgcaggccttctcctggtacgcggtctgcagctggtcctcgagccttgcgcccctgcgcatctcctcctcatggctggccttctctgcggctaggaggccctagagacgctcgacctcggcgcggagcatggcggcctcgctctcgttggtggcgacgacttgctcggcggcggcgacctcctcgcgggcctggacacaactagccgtcgccttttttgatgtgacggtaacaatcagcaaacaaaccgtgaataacaatcctcaccgaactcgcagcattctctcctctaaagctcccgctgggcagctctctgcaagacatgctgatatacgacaccggcgacattcgccagccgccctgcgccccgttcgtgaagaatgcgtcagccatgttcagtttctcgcagggctgcctttgttggaggcaagaagtgcccgcagatatctggtgctttgttgtggcaccgcctcatgcatgggcaccaaggtcctctcgacgctcgacggcattcaacggcacaaacaagatccgtgcctacgcacactgcgcgaaaaactcgagatcgctctgctcctgatcaacctggacggcatcagcacgaaccgcatctacgtgacgagccaaggcgcgcacgcccggagcggaaggaagaaggagagcaggacgtccgacgtccacatcatccctgcagggctcggcgaagcagcagccgcgctcacgagacaggagtaccatctaactcccaaggacgggaacctgcagagccagcagctgctgctgaacggcaacgtcctggcaaccgacgccgacggggagatcccggagctggagcccgtgcaggtggaggggacgcagcccataaccgtgggcccttactctatcgtgtttgctcacgtccccagcttctacgctcctgcgtgcctgtagctagagttttcgactggattttttttcagcctttctcggtgtgcatctcgtaggttaggtaagtctgtccgggtgaacggcgaagcttgttcatctctgcccatagtccgtgaagtgtaagctgctaggctggaaggtttgtggtttatgattgtttgggaaaggagtggtcagatatataatgtgtgagcaaaagaaggaaggaagctggaaatgagataataaaagaaagggttttgagttttagtctcattttgtttgagagagcagcagaaaaagcgtggatggaaccatgtgaagaagaaagagacgggagggcacaaccgcacgagacgcctccacccggaattccggttgccgaagacaaggcaaaaatatgtacaaggacacaagcagggatctcagcctaatcaatagtaacaagttacgtgctgcacaga

SEQ ID NO: 33844 - DNA, 2321 bp, Zea Mays
cagacgcatgcatgatgcatcgagcccccccagctcgcagtcgcaccggaggaatgctaactggagagccacgcctgccgcggaggaccgggactaactacgagctgccgcggccgttcctggtgcaggtccagggtagagagagagagaggggatggtgtgagggagggaagggagcaaaggcaaagcagccaacgaccagagagacacggaggctcagagagagagagcgaggaagaagaagagaagaagaagatggagcaagaggaagcgtgctcctcctcgctgcggcagtgcaggatttgccacgacgaggaggacgagcggcgctccgccatggagtcgccctgcgcctgctccggctccctcaagtacgctcacaggggatgcgtgcagaggtggtgcgacgagaagggaagcgccgtctgcgagatttgcctccagaactttgagccaggctacaccgttcctcccaagaaaacccaacctgctgatgtcgcggtgaccatcaggtgcctccttctctatctctctctggtaactgtgcgcattaaggctatctatcagggcgaatgctgtgcttaattgtaggtggtcactggtcagctgtagttgttccataatatagtaactgtcatcagaacatccacttcgcccatttcattcattcatccattccttcgttcatttttgtttggcatcaacctcatctcatctgaaccgagcgcggttgctggccaacccatctttatctcccattccatcgattgattaaacggaatctgccagcgcgacgggcactttaggcgaccaagaccaaccacccgctcttgatagctcgtcgtcgcatccgcatactacccaccagcaaaattccaagacgcgtcccaggcggcggcccccctcgttctcatccgctgacgcagcacagcatgcgctctcacccaagcccctgatccggtcgccaccatctccagaccaagcaagagaccaaagcgctctgatcgaacagtggtgctggtggcctggcgcacattccattctggcagtggcagtggcagggcagctgtctatgtctatcgcagcatgttgttcttcgggattcccgaggcggtcgggggtgggagcccctgtgtttgtgtgtgtgtggcgtggctgccaggtgggtccggcccagctgtttccgttagccaggccaaccaccgggtcccaactcccaatcattctttcgccccgcatgagatgatgatgccctcgcactgttgctgcacctcttctgctgtagtggactacaaatgcaagccgtgccctgcactgcactcactcctccctgctgtcctgcacccgttggcacaggagtcaagcccgtccgttcttgttcatcggtggttgcaggcagcacggccgatcaccgcgtctgcacttttaatttgtaatgtgactgacggagaaaatttgtggaatctgtcgatcctggttggctgtctgtctgtctggtcagctcagcaaccaccaccgatgatcagtttacgaccactacctacctaccattaccactaccagccagagcctggcaaccaccacgcgcgttgctgatctgggctttcgtggtgcatgcgcagagacagcgtgggggtgcccaggccgcagcacgagcctgaagaggaggaggagcaggagctggtggacgtggcgttgatcggagccagcgacccggagtacgccgagtgcgcgcgcgccgccggcaggagcgcgtcctggtgccgctcggtggccgtcacgttcacggtcgtcctgctgctgaggcacctggtcaccgtggtcacggtcggggcggccaaccagttcgccttcggcctcctcacggtatacttgctgcgggcgagcgggatcctgcttccgttctacctcgtcatgaggctcatctccgtgatacagcaggggcagaggcagtaccgcctccggctgctccaggagcagaggagacacgcgttgaggtcgggccggctgcacggccaggaacagcaacaacagcatgtcatcctggttcgctgaggaacgagccattcattcaccttgccttggtgtccatacattccattcatccgtcgtacgcgtacaaggttgtaagatgtaccgctccatttttttctttttgttcaggcctttacaagcctaaaaaaagcttatatgtaccaccacttcatttgtaaaccctcaaaatttgttgctgagaagatcgacatatcatgtatagaattgtaaaaagaaacaaacaaaaaaaaaggggaaaagagaactggcgcaatgttcgattaccc

SEQ ID NO: 33845 - DNA, 322 bp, Zea Mays
tgagcatctcgatcgccacggccacctgcttgagacgcttggggacgacgcgaaggatcttcttcatgacgcggtggtcctccagcgtctcgcccatctctcgaaggcttgcgacgaggccgttgatccgcaacgcgaagtcgccgacgctctcaccatcacggaagccgacgttctcgtactctttccacaagcgttgcacgctcgcggccttcacccggtcatcgccgatccttatcgacctcaccgcctcccacgcttctttcgccgtcttcttcacggcgagccccgccttcatctccggcggcactgcgcgcaggat

SEQ ID NO: 33846 - DNA, 1421 bp, Zea Mays
ctgggttatgtcagcattatgcctacgtcgctgaacaaagtgtccaaaacgagcactagtgtattttttattcctactcccagtcgccgcctgcatttgtctctcggtcaggaacatggaggggagacggctttcacggcggcagttacgctcgctaccggacgccgcgtccttctcgccggaagtcgcggccagcccggggctcgtcggctccggccagttgggtctcggtctctcggcggcgttcgagactctgccgccgggtaaaggaagagcattttgtgctggaggtgatgttgctgcagttgttcgatctatacataaagacagctggaaatatggtgctgatttcttccgaaatgaatttttgttgaattacataattgcaacttataccaaacctcaggtttctcttcttagtggaatcgtcatgggtggaggtgctggcgtttctttacatggaaggtttagagttgccactgataacacggtttttgcaatgccagaaacagctctgggtctctttccagatataggggcctcatattttctgtctcggcttcctggattctatggagagtatgttggtcttgctggtgccagattggatggtggggaaatgcttgcatgtggtctggcaactcattttgtccagtcaaattgtgtggtatcatcgatcaatttgctcaacaaccatcactgaaagaaagcagctctttgaataggttggaaatcatcaacaaatgcttttccaaaaggacagtcgaagaaattatatccgctcttataagagaagggaggacacaaactgttggggagtgcttgcagcgggaatatagaatggtctgccatgtcatgcgtggtgacttcagcagagacttctttgagggatgcagggctatattgctggataaagaccgaaacccaaagtggatgcctccaaggttggaacaagtgcatgacgaggctgttgaacagtatttctccagaattgatgatccacagtgggaagacttgaacctacctgctagacgctcccacggaagaaatatcgagtccaagctttgatcgaaggtcatgggagaaaggtggaactctggaacggagccttggtagtggtcagaataacacattattgcacatcatctcaagtttgaagagtctgcagactattgataaaataaacatgaatgtgccatataggtcaacttatatcacagaaagaaactctttgctgtttatacgtggagactggagtcatatgcatttttaaataattataagtaataaaatcgaaaaagaaatcgttggaaagacttttcttggagtcagaccctacttgatggtgataatcgatgagctttctacacgaccaattgttagatgaacgcgtagggctgtggagctggcccatgtacggc

SEQ ID NO: 33847 - DNA, 4140 bp, Zea Mays
agtttggtgcggcacaccacaaggaagagcacagaaaatcccaaattcccaccacgcaggtcgcaggcgcacccgtctctcccttcttcctcctctccctcttctacacccgacaggcacaggcacaggcacaacgcatcgtccccctccctttccagcgccccaaccacaaggaacagccgaacaggtcggggtcaagccatcggaccttgattccgcttgccctcctgctttatcccgccgccgccgtcgtcgtctcaaccgcccactccttcctctccctgccgctcctgcgaatcgcgaaatcggagacccccggaccgccctccaatgacgaccatgagcgacgatggtgaccgcacctgcccgctctgtgccgaggagatggacatcactgaccagcagctcaagccatgcaaatgcggttatgatatttgtgtttggtgctggcaccacatcatagacatggctgagaaggaggaaacagtgggccgctgccctgcatgccgcacatgctatgacaaggacaggatcgtcaagatggctgccacttgtgacaggacagtggcagagaaaaatgcagagaagaagcacaggacccaaaaggttaagccaaaggcagcaccttcagcagcagcaacatcaactgtagaatctaagaagcatctggctagtgtcagggttatccagagaaatctggtgtatataattgggctacctgcacatttatgcaatgagagcgtacttgagtgtagggagtactttggccaatatgggaaaattttgaaggtttcagtttcccgtccgactgggcctccctctcagcaggcatcagcaaacagcaatattagtgtctatattacttatgccaaagaagaagaggccatccggtgtattcaagctgtacacaattttgtcttggaagggaaagtgttaagggcatgttttggtactacgaagtattgccatgcatggctgcgaaacatgacatgtgggaatccagattgtctctatttgcatgatgtaggcagtcaggaggatagttttactaaagatgagatcatctcagcatatacaaggactagagtccctcagatggcatctggtgtttcgcaaagacgcacaggcactgtgttgcctcctccaggagatgatttctcttacagtgcggtggtttcagccaagcatacatttaagaatggaacacttaataccaccagtcagcccagactttcacctccaaacagtagttctgggaggtccacgcttccatcagctgcctcatgggggcagcgtgatttgaatgccaggacaacagctactggagcgacatcgtcacaatctcatacaaaaccaaaatcagaatcacaaagtaatccattttcaagttcttcagtattttcctgtacaaaaacaccctcttcatggaatgatgatacaagtacagcagcaaaaatatctgaaggacagcaactgtcagaaaaagagtctagaaccttgcagccgtataagcctggtatttcaaaggaaacacaagctttatcatcactggagtcatcactggacatagacttctcaacaataccttcagcttggaatgacgatgacattgtagtaccagatgtgatgccaaaaggaagtgatgaaaatcaagttgcaaataaaaatggtgagctaacccatccagcatccaagtcactggttttatctaagaaagacataaaaatgaacattaccagcaaaactccttcagattttgtatcaagtccagcaatatctaaatcagatgtaagtactagtgatggtgaccactcactcaccaatattactcctaaatgccttgcttcaaatgctgtagaatgccaatctagtcatactgctgtggagaaaatgttggaggatattggatccaaggacactgacatggagaagctatctgctcagatatcttcagtaacattaggtggcaacgacgagattcagagtatggcaggaaatcaacaaccagatgtaatgccatgcacatctgttgatgtgctcatggatcagaattttggcagagacctagctcatcccaatcctgacgagctcttattgccttctgaaaataaggatagtattgtttcttgtcaatatagttctgataagcgtcttgattggagtttggagatgcaaaattgtagcgttactcctttaaatgatagaatggactctgcactgctcactgacaaaattcatagtagacagctggatggttcagagcaatcatcatattcatcatttgttgaatttcctagtacagtggatacctcattgtggaatgatacagaaaataacgctgcattgacgattgacaatataacttcttcacagatgcagccagggttttcttcaactgataacacttatgccttgctaaatggaggtcaagatgggctagtttgctaccccagaattctcgaggaaatatttaccagaatggccttgcattccaatctctagagaatgaattttcaaacaataactctcctggtgtattagatatggcaactactggtacatcgatgtctaaaatatctgcccccccaggattttcggcaccaacaagagtaccccctcctggattttctactgcatttccatcccaggatagtttgaaccccactcctgtgtttccttctggaattttgtgccatggcgggtctatcccccctcctagattctcttcattttcttctggaatttcaactcaggaagtgtctaagcctcctactagaccgccttctccattttcttctagattttcatcacaggacggtcttgacccctcttctagattccctttttcttctggattttcatcacatgatgggtctaatcagtcgtatggctcaacgaacccaggtttgtttcctgcctcttattttcctagaactagtttgatttctcatcatgccttttgtggtgcttcgcagaaaatcttctccggggtactgttcagggtggcaacagtaatcattatcaatctcagtttggaaggcactcaagtgacatggagtttgatgatcctgctatattagccatgggcaaagggctgatgcctggaattggcgattcagggctggagatgaaaaatactcctgcttttcaagcacagttgcaaccagcaagtagtgatccaagatttcagttacatgtacagccaaatgtgcagtctcgtcaaaacatgagattcacagaccctatgcaagatggtttgaaccatatgaacgataattacctggcatccagatttttagctcagaaccagggtcctctatctccttatgtgcagattccgcaacaacccagaaactcgcaggttataaatggtcactgggacgggtggagtgatttgagacaagggaataacgctcctatgtcagacatgtccaggatattatatccaagtgaagtgaacaagttgcatatgctgggttcaaatgatgtccataacagagcctttggaatgtgatcgtctcctgggataatgtgcgactttgagctgacatgttcaacttggggcgttttgtgcaagtaactggttgcacaacacatagtatacctgaggtggttaatggtgttgtgctcatgagctggcacacgactatttattgctgttggagttgaccaaaatgaaccttagttttggtccatccatttggaattaccaggttcattctcgtctatgatttgtgaagcttgaatgaaaagaaagattacgtgcctgagaagaacaaggcagctgaagttgaaatagatagagatatgtctattatgggatgtggtgtgacttgcgagcgaaagagatgaagaagattaggtgggcttggcttgatggcagcttgttttttcttgtgtcttgtacatgatgatattggtcggtggttgtatatgacttgtgatcgacggtggctgcattaacctgtagtggttgcccttgctccttcctgcctgttttgtttgcagctcctcctgttttgcatagtttatgctgattaagggaattggtgaaagtctagtgttacccatggtataataatagggaactggtttctttgttagcattacttcatttgtctaaaaaaaatccgttaaccg

SEQ ID NO: 33848 - DNA, 2640 bp, Zea Mays
ctacctgcccgccgccgccgccctgcgcgcgccccgccgccccaccgcgcgccacccagcacgccaccacccagcgcggcccgccctcaccaccccgcggccccgccgccgccgccagcgcctagccacgcgcgccccaccctcgccaccccgcggccccccgccgccgccagcgcctagccgtgcgcgccccgccgccccatcgcgcacctgctagcgcgccgcccagcacgtcgcccgccctcgccaccccaaccgccgccgcagccgccgcccgatgtgccctcgtgcacgagacctctcgaaccctctcagaaggcggtgcgatccggtttgggtcgccgtgccgagcccaatgtgcccgacgcgcgcgcggctgagtcaaagccgaaactggcgctcggagacgacgatgataggccgccccttgaggagaagcaccgctgcagcggtgagggcggattcatcttcctctgcgcccttgttggacacaccgaggctatcggtgggatttctatgccgtctggttcgaacaagctctactccggcagcgtcgacggatctgttcgcatctgggactacaattccggcaaggctaccaacaatctctttgattatggacgagtaacgggctgcttccacggaggttccagtgaggaggttgtcattgttcgtggtggttcatgtgctgattagcaatgtgtgcaccctatggaaccaaccataaccgaatggtgactcctaattttttctgattggttgtgcctaaatcaccaatcgtcagcggatttcttatgattagttgggtgatcctgtgctcctggtttggattggatgttatctgtcaggctagccttgttgctatatattggaggctcttcgcctgattcggttacccgtttgcctgggatcagtttgtggcgctatctggttggttgtcacttggttgatacatatgattgcatgatctgcaagtgaatcttcagagattacaactatctcattagtggatagtcatgcatttatgtaaaaatatagcaatgagaaaaaggaacaaagtaaagaaaaagagaaaatatagatggagatatgtgggagtatatccaagaggatggaaaaaatataatttgttatcatattacaatttttgttcttaatgtttctgcaatagtgtgttgatgtcatcaagatgggaggcaaggttagctgcatgatcacccatggcccatgggtactcattggaattccaaagtttgtggaggtgacattctgattctagtgagagtacacctttattttgtattatgtatggtgacattgaggggtgactttgcttggtacaaggcattgaacacaaagacagggatgaaactaagatttcaagggccttctagtctagtttgttccatggctatcacgaatgagatgttgtttgctggtactggagatggtcgcatcatggcctggagatttcctgctaaggatagtaacactgaaccagtgttgatcctcagtggccatcaacggccagtgatttcactgtctatcttggcaagaagactttactctggctcacttgacaagtccatcaaagcatgggaccttacaactcggcagtgtgtccaaacactctctgagcataaagcttctgtaacatctgtgctttgttgggatgagaagttattatcttgctcccttgacaagactgtaaaactctagactctgtcagagtctggaaaccttcaagtcaaatatgcccatgccgaggagaatggtttgcgcacactcttcggcatgcaccgagttgggaagacaccagttctcttctgctccctccacaacagcaattgcgtccgcttgctcgacttgccatctgtggaacatgcagaaatgcaggctgccaagaggcaaacagttgctactggatcaccgaccccagggcgcactgcatgggttggcaagggaacagtaacagcactaatgataatctgcaaaatgaagacgcaaatgatgcttctaggtggcccatatccctggtgctttgttctttgatgttgatggaatatccgacagaacatctagtttaccacacatgctgccatctgaaaaggcattttcagttgctgtatctgctcttggcatctacaacaaagatgggatagtagtttatgatggaaaggggatgttcagtgctgcttgtgtttggtggtggggaggactgcacagttcgcatttggagcatcaaaacaggcgagctaatctttgtgcggagcatggcagacagtcccttcacgacatcttgttggcccaaaagcagccatggcttgtagtccttggctgtttgatgtaaaccacagctgggaagtcagacatcacctagagctagggtgtccattcttgacatgtttctcttagtgataggtggatactgtctaggtaggaacagagtcttgagggattgatgggcgcatgcatcttcaattcctgtgtgttgtattactactggtacaatctccaatgcttgtgaacttatgtgtttggactgtgaatttgtgatatgaacatatatcaatatgtttaaaatctgtattgtttgtgatattctgtgttgcatgtgatattatgtgtgtctaattttta

SEQ ID NO: 33849 - DNA, 3640 bp, Zea Mays
aaaagtaaattaaattgtcgacacatctctgcctttccttcacaagtgcacactttccaattcagttcaattttcattcgaattcgttttcgtttttcgttcttttttgtttttccccattctcacacgaacaagacgaacacgttcgtccccatcgccgtgttcttcgcgccgccgctgcccaccgatcgaatccgcccgccgcctcccagtaacctccggatccctactcctccaagcttctgtacatctcatcctattcgatttgtctctcgattgccatcatcagtcgcaacccagatatgagtttcactaccaaattctagggtttggggcatatggcctcgtgggtttgggagtgtgatcgacgggcagtgtaatttaataattagctaggatgtcaagagatgatcacgttgaaatctaagtcttgaagagatgattgcggagaagccaaactggattcgtcacgagggcctacagatcttctccatcgacatccagcccggcggcctccgcttcgccactggcggcggcgaccagaaggttcgaatatggagcatgaaatctgtggacaagaataataatcacaatgattccagccaagggttgctagctacaatgcgtgaccattttggatcggtaaactgtgtgagatgggcaaggcatggccgctatctggcttctggatcagatgatcaggttatcctaattcatgagagaaaagctggttctggaacatctgagtttggtagtggggaacctccagatgtggaaaattggaaggttattatgaccttaagagggcatactgcggacgtggtagatcttaactggtcccctgatgattcaacattggctagtggtagcttggataatactgttcacatatggaacataaccaatggtatgtgcactgccgtcttgagagggcattccagcttggtcaagggtgttacctgggatcctattggctctttcatcgcaagccaatcagatgataagaccgttataatatggcgtacaagtgactggagtcttgctcacaagacagaaggccattgggaaaaatctcttggttcaacattttttaggcgacttgcgtggtcaccttgtggccacttcattactacgactcatggcttccagaaacctaggcattcagcccctgtgcttgaaagaggcgagtggtctgctacatttgactttctaggacataacgcacctatcgtggtggttaagtttaataactcaatgttccgtaagagtttctccaatggtcaagacacaaaagctgcaccagctggatgggccaatgggacatcaaagatatcatcaaaagaacagcaaccatataatgttattgctattggaagtcaggacagaacaattactgtttggacaacagcgagtgcacggccattgttcgttgctaagcattttttctctcaaagcgtggttgatttatcttggagccctgatggttattcactttttgcatgctccttggatggatctgttgccaacttccactttgaagcaaaggagcttggatacaagttaagtgattctgatctggatgaattgaagaggagcagatatggtgatgttagaggacggcaatcaaatctggctgaaagccctgcacagttactgctagaagaagcatcagcaaagcaatcggctagcaaaaaagggactccgattgtccagcaatttcaagcaccccaaaaactttctgcagatgtgcttaacccagctcctgttgtgcaaaatcagaaagctcctgaagctttacctgaagatgagaagaaatcatcagatcctgctgctgatggtatgaataaagttactcggttatctagtccagtgaagcagagagaataccggcgtcctgatggcaggaaaagaataatcccagaggctgttggatttccatccaaccaggataacatacccagccgttctcagaaccacgttatagatttttcatccttagatcagcgaatgaatgggataagaccatcttattgtagtagcagtaactgtaacaactctggagttaaggactgctctggtgtcacagcaagggctaacattacagaaagtcttgttattcaaaaagcttcaaccaatgctagcagtgatggaaggctgactgtagaacgcactggatctgttgttccaggctctttgaactgccctgcactttctatacatgtattagataagaaagacaatgaggattccttgccagtctgccttgaggcaaatcctgtagaacacgctgcaggtgatatgaatggtgtcggtggtgccttttcaacaaaaggaacagaaataaggtgtacaagaggaacagaaactctttggttggatcgtatatctgcaaaggttactgccttggcaggcaatacaaatttctgggctgttggctgtgaagatggttacctgcaggactcattggctgctttggttgcatctccagatgagtcatcagcaaatcatgcaggtgcagtaaaggttatatctgctaaattctcaagatgtggttttcccttagttgtccttgccagccgtcatgcttttctttttgacatgagcatgaagtgctggttaaggattgctgatgattgttttccggcatcaaattttgccagctcatttatttttccccaagctggagagctaggcaagttgcagattgatgtaggcaagtttatggctagaaagcctatatggagcagggttacagatgatggtttgcagacacgtgcccatttagagacccagttggcagcttctttggctttgaagtcaccacaggagtaccgccaatgcctcctatcctacatacggtttctggcaagagaagcagatgaatcccgtctacgtgaggtttgtgagagcttcctaggtcctcccatgggcatgcttggatctgagtcatctacggatcccaaaagtccagcgtgggattctgatgttctcgggatgaagaagcaccaactcctcagggaagacatacttccatcgatggcatctaaccggaaagtccagcgtctgctcaacgagtttatggatctcctatcagagtatgaagctgctaagagcaaagttgacccaatggatatcacaccggcgctaccacaacaagcaccagaagccaatgccaacgtggtcacctcgtagctgcaccagttccgttgatagttccgttgctggcgacttactgacctctcggtaagtatgataggatagcaatcttggtaagtccttatatgaatcaatcaattagttgtgcttgtaactggtagattgtttagcgagggaggcgacctcaggcaaacattgatattgaacccgttagctgtaacgctgtgtaacagtagaagaaagaagctgaggtcgccaggtaatttattgttaaactgtaggaggccgggtaaactcatgcccttcttgttccaagctaccgtatgcagtggtggcccactggccgtgtgtattttggcgaaaacctgcgtcgtcaaaactggcattgacatcttttagaggaacaggaacaatgagcatttcggcggtgatgattgagcgggcacgccataaacatgtgatttggataattctttatgtagag

SEQ ID NO: 33850 - DNA, 1981 bp, Zea Mays
tctgcctcccgcgatctcgctcgtgatattccagccccgccgccgccgtccccgcccccatccgtgacaccccaccatcaccgccgcgccacgcgcgacaactccatcccccgtccgcacccctaccccgagcatcgcagcgcctcccgcacgaggtcgttgcgcttgtcgatctgatggcggcccatggcaaaggagcaggtagaaaatggccgatgccgaggatatccagcccctcgtctgcgacaacggaactggcatggtcaaggctgggttcgctggcgacgacgccccgagggccgtcttccccagcatcgtggggcgcccgcgccacattggtgtcatggtcgggatggggcagaaggacgcctacgtcggtgacgaggttctgcaaaccgatcatgacaaaaccaaaggtagctttgaagccgcagactctgtctccacaacctgaagcccaagcacctcatgatcctcaaacaccagagcaacaacaaagcgggactggtgtaggcgtgtagctggtgagccgggtagtgaaggaggtgtgtaccaggcctccagtgagcaaatgggcatggtgccggatgcatctgcggccggtggcaggaaggtcgagctggatggggacatgcgatggacatcacagggatgaatgaggctgctcatggtggacagaacagaagacgaaatgaatcgcaaggggaaactaacatgcgagagaggaggagctagccacaaccaaagagcttggttcaatacttcaatggctagaataatgaacgatatgaagatcaggtagcattatatatgtcaataagaagcagaggagagaagcagcccacatcgcaggagacaaggacttcacttgtttggccagttcaggacttcaggatgttgtcgatgatgtccatgctatattccctcgcttcatgcttaacaatgagggagagactaagtgaggggctgaaggccgttggtgctgtcagaatgtttttttggagttttggtggatgatgctcagtgactgcaatgcaaaggatccttctgttttgtatattgaatgagattacatcactgtttttttcttagcgatatgttgagctcatgtgctcgtttatgttagtcgatctctggctcttgtagtaacttggaaagcttgctgctttttttaagggcatacatgcctgtgatgtgtggtcatgatcatttttttctcctgttattttagttgtcgtatcataaatgccatgtttgcattggtgttccaacatgtcaatattattgaataaatgtttgcattggcggcagcggggacgacgctaagtcgagcaatggcgaagcggcccgtggtggcagtaacggtggagagaagcagggggatgaatccaacggtggcgggatacttagcgctgtggcttccaggattggcgtggtcgtgtccagcgccaacggggaccgcagcggcagcgctgaggatggtgccaagacgagcgctggcgacgctggtcacggtagcaagggcgaggagaaggggcgtggtgtgaacggtggtagaatagtcgagcagatcatttccaatctgccctcagatgatcaggcgcctgatgccgatgaagcttccttgctcatcgccattatcgaagattagctccatgttccgaaggctctctaggtcgtcctcaacgccaggatcaaatcatcagctgagccggagactgaaaacaataaagaaaagcaagcagctggtcatagtaaacatcatgtagcgaggcttagcagattgcttttttttcccgttagaatcagtccacatgtcctcgacacgggctagatttgttctaggattatttttccagtagtaagccatgtatccatggacagtccacagcgcgacgtctaatgtaacatcatcaaggttcttttgactatcccataagaaaccattccttaagacaaccgatattgtgagttgataacc

SEQ ID NO: 33851 - DNA, 2630 bp, Zea Mays
cagcgctcccgctccttgctcgcctccacccgcggccaccaccgccctgcggcccccgccgcttgctagcctccaccgcgccgcgagtcacgccgttcatgcaccggctggtcctggagcacgggaggacgagcatgtcctggttcggccccagccccaaggtgaccatcgtcgacccggacctggccaaggacgtgctgtccaacaagttcggccacttcgagaagctcaaggtcccggcgctgtccaagatgctgggctccggcgtggccagccacgagggcgagaagtgggtcaagcaccggaggatcctcaaccatgcgttccatcttgagaagctcaaggtactactaactactacatataattaattgcatataattaattgatccttggaattatctggcaatgtgcagcgcatgctgccggcgttttctacgtgctgcgaggagctggtgagcaggtgggcggcggagtcccttggctccgacggctcgtgcgagctggacgtctggccggagctgcagaacctgacgggagacatcatttctcgcaccgtgttcagcagcagctacagcgaagggagaaggatcttccagctacaggtcgagcaagcttcgcttgtcatgaccaacattcggaagatcatgatccccggctacatgtacttgcctaccgcgaacaacaggaagatgcgcaggaacaacagggaggtggagtcaatcctgcgagagataatcgggaagaggatccaggcgatggaacaaggcgagggcaccaaagacgacctggtgggtctactgctggagacaaacatgagagacgacatggggatgacgatcgaagacgtgatcgaggagtgcaaggtgttctacttcgtcgggatggagaccacgttggtgctgctcatgtggacgatggtggtgctcagcatgcacccggagtggcaggaccgcgcgagggaggaggtgacggctctgttcggcagggacgacaagcccgagtatgacggcctaagccgcctcaaagtcgtgaccatggtgctctacgaggtgctccgactgtacccgccggccacctccgtcgtccgacaaacgtacaaggagatggaggtcggaggcgtcacctaccccgccggcgtgatcctggagctgcccgtgctgctcatccaccacgacccggacatctggggaggcgacgcgcgcgagtttaggcccgataggttctccgagggcgtgtccagggcctccaaggaccccggcgcgttcctcccgttcggttggagcccgcgcatctgcatcggccagaacttcgcgctgctggaggccaagatggcgctctgcatgatcctccagcggtttgagttcgggctcgcgccatcctatgctcatgcgccgcataccatgataaccttgcatcctatgcacggtgcgcagcttaagctcagagcaatatgatctcgacacgatgggtgtcccatcgttgatgccattgttatgtataaccttacaattcagataggcattcggccctgttaatgtctgaaataagtatcttcgcgttggcattttgtaatgtgcttttcacgtaccattggtgctttattgccttttgtatataaacatgtggatatatgtaactcatacattacacaaacaaacacaaacacaccagagccagagctatagggtggagctataaactgtggctctacttttgtacacaaaactggctccacatgttcttccaatcctgcaactgcgtttttcgcatccccgtttggtacagcttctctggctcttcctgtgttcttgatccctttgttccctttgatttcatctccgctcactttctttctgttcgattttgacgcctgcagattgcaaaaacgggactgctaagcaagctaagatttcaatggcatattccttcatacataggccattgagcgacgaggcacgccgcgtcagcactcccttggtggtcacttgcaatgaccagagacgggaggtctccgttgcccagaacatcgctaacaaggaaattgaccgcaccgttgcattcgacaaggtgctaggtccaaagtctcaacagcaggacgtcttcaaccatgctgttgtgccacttgtcagcgaggttttggacggttataattgcacaatatttgcatatggccagactggaactggcaaaacatacataatggaaggaggagggggcaaagcactggtgcaatttttattatatatattcacatgctacacatgtttctgaattctgatgcggttagtttgctgcttcaactgacgccataactctactccatttctatagaatgctgacctcccgactgatgctagtgtcattccaagtgctgttaagcgcatatttgacatcctcgaggcacagagtgcagagtacagcatgaaggtttcttttcttgagctgtacaatgtggagctcactgatcttctagctctacaatgagattgcaagaacgggactgctaagcaagctaagatttcaatggcctattccttcatacataggccattgaaccggaagattttgtcggtattcgatgattgcaataagatatcatgaggcgcgccgaggagaacaggggcctc

SEQ ID NO: 33852 - DNA, 1213 bp, Zea Mays
tgacctctctctacatccttttgtttgttgccctcctccccatatcatcctcccttgttcgtcatcgtctctccctcagctccctccagccgccgattaatcgatcgatcacctattcacctagctagccggccagttgctggttctcttcttcgcatgctgccgattaatttattccacgctcgattgcggtggcggctttagttaatagttatagggagcttcaagatagcaagcaagaaacggtgcaggattattggaggaatagagcttcaattcagatagcagctgcaggctgctgttgattcggcgatcggtcgatcgaggatgtgcacgaggggccactggaggccgtcggaggacgagaagctgaaagagctcgttgcgctgtacgggccgcacaactggaacgccatcgccgagaagcttcaagggagatcagggaaaagctgcaggctgcggtggttcaaccagctggacccgaggatcaaccggagccccttctcggaggaggaggaggagctgctcctcgcctcccaccgcgtccacggcaaccgctgggccgtcatcgccaggctgttcccggggcgcaccgacaacgccgtcaagaaccactggcatgtgatcatggcgcggcggtgcagggagcggatgcggctgtcgaacaggcgtgccggcggcgctgctgctgctggtgctggtgccgtcgtcgtcgccaccggtgctgctgccgaagatggcagtaaccctaggagcgccaataagaagccgaggcctgacgcgagcggcatggcctccttgctagacaagtaccgaagagaattttccgccgtcccgtttgccattaaccatgatagcaatcagcagcagggctattgttcaaatactaacgaagacgcaaacaaatcagtcgaattctacgatttcctccaagtgaacgcgaactcgagcgacaccaagtgtggttcgagcattgaggagcaagaggcggagagccgggatgacgatcaagccgaagggttgtaatgctttgtgaaagaggcaggcatgctgcaaatagcaatcgtcgtctaacaccaaacgtacttgtagaggaagcaaaatgcaccgtgcatatgacatattgtaatttattgttgtatacatatatctgtccatatatatccaccgttggggggacatgtgcaaaattattctgagatgtataaacgag

SEQ ID NO: 33853 - DNA, 2613 bp, Zea Mays
attttaaataaaaataaagctcgacgtcgtcgtcacctctctcgccgtccacgagtcacggcgagcggcgtcgacggcgggcgggggtcctggccgttcactgccatgcctgaccccaccaccaaacccccttcgccacgcccccgccgtcgccgcaggctctgcggcctctgcctcggcaccgcgctcctcgcgctcctcgtcgccgcgctcgtccatgtcgtcgccccgcttccgcgcgccgcttccgcctccgcgcgcttctccgtcatcatagacggaggcagcacgggcacccgggcccacgtcttcgtcacggggcacgacggcagcccggatctggcgctatccaccgtgatgcgcgtctccccgggcctctcgtccttcgccgccgacccggcgcgggccggggagtctttgaagccgctgatagattttgcgagggataagattgacggcgcgggcagcgccgctggggaggcggaggtgcgactcatggccaccgcagggctgcgcctgctcgaggagcgcacccaggaggcaatcttagcgtcctgcagggacgttctacgagcctctgggttccggttcgaggacgcgtgggccaaggtgatcccaggctcggatgaaggtatctatgcttgggttgcagcaaattatgctcttggaagacttggaggggatcctaacagaaccgttggaataattgaacttgggggcgcttcagctcagcttgccttcgtttctgatgaagtacttccacccaaactgtcatataattatacttttattgaaacaacatacactctctataccaacagctttttaaactttggtcaaaatgcagctcaagactcgttccatgaaatgctgaggtcaagaggtatttatttggatttaaatgttccttcctctatcaatatagccactccatactttagcactcttgtaagctttgtttttgagaccttgtggtgtcctgttcctgtgtcattggggagaattcagtacctgatgtacaagggaactaagggggtgtttgatttctagggactgattttattccattttagtctctaaattgccagaaattttagtttttctatttggcaatttagagactaaaatggaataaaatggagtgactaaaaattagttcctggaaaccaaacaccccctaagtctcacaatatatatactctgaatgaagagttcattcacagcactagacactgctgaatgaacactgtgcctataagtaattcttactacaactatcttggtattctatgttagtgcaaatgtacctggaccatagttataggataggagctattttagcagtttgacgaagtgggcacttgactgaaaaatttctgaaacagttacttgttccattggcttattatatacttggtaactaaacagagtgtaagatgtgtgtgaaacaggaagggattaataggttgtgtttcctatagttgcattatagtatatggagctactaagtactaattactccatccgttcttttttatttgtcgcattttagttcaaaaatgaactagcggacgacaaatattcgagaatggagagagtaccaagcaagtatctcttcaagttcaccacccacatttgcaggctcttctgaaaatgctacacttgctgatccttgtgctcccagaggatattcacgcaatgaagaaatgatgctgaggatgagtggtgcttcaaggtcaacattagagaaccagtatgttgataatgggactggaaactttacagaatgcatatcttcttcactgcttttactgcaaaaaggaaaggagaagtgccagtatcaacaatgtcacctgggatctactttcgtacctgagctgcgtggatacttcttggcaactgaaaatttctattttacatcaaagttctttggacttaagaagtcttcatcactctctgatttcatgtttgctggagaacaattttgcaatcaggatttgtccacccttagaaaaaaacatcctaataggtcagatgaagatttttcacggtattgcttctcgatggcatatattgtggctctactgcatgacagtcttggtgtatcactggatgataagaggattgagtattcaaaccaggttggagacattcaggttgaatgggctctaggagctttcatcacactgattcaaaatgcaagtttaaagccattacacaccgctgtggaatcaacccatagcaatagaccattgtttgctgtgctgggaatgtttcttttatgtggagtactttttgtatcaagatggaggaagcacaagacgaaagtcatatacgacttagagaaaggccggtacatcataacacacatcagctgatgctgaaccttgtgcagaagaactatatttatacgacaggaatagatgttgtgttgtacaacaatgtaccagttcaattatttgttttattttaggtagcagagctgggtgggtagagcatgaaatatagcacaaatgcgtatagaagaatgtgtagaacaagttgccatgtgttaattgaattattttggtgaataattatacctgttttgtttatcttatgagctccacattt

SEQ ID NO: 33854 - DNA, 2357 bp, Zea Mays
ggcccctggtctcctactctcctccccactcctccctcggcctggagtccagtcctcgactccgcctgccgcctgctgcctgacaagccacgcgctgcggcagccgtacgggcactagggttttcttccacttcgaccgcgggctcgggatctcgcgccgcaccgcaatgcagcacacgtgccgctgatcccgtggccgcctccttcctttcctcctcctgcggtcctgcgccgcctctgctgcagcgggcagccgccatggcgcggcgccacgggtggcagctccccgcccacaccctgcaggtggtggctataacagtgtactctgtgctttgtatagcattctatgctttcttctctccatttcttgggaaggacttgtatcaatatatcgctgtcggtatttatagttttttggctttatctgtgctgattctatatgtcagatgtactgcgattgatcctgctgactctggcatcctgatttccatggatgacatactaatttataaatcagaagcacatgtagacactcaagatgaagctggtaagccaggattgaggaacgatgaggatatccgaaagcataaatcatgctttggaagggtttgtttttgttgcgctatttttacaactggggactgtcgcggaggggatgaagctaaccatcaagaagattatggtgaagaggcactcttttgcaccctttgcaacgcagaggtgcgcaaacatagcaagcactgtcgaagttgcgacaagtgtgttgatgggtttgatcatcactgccggcttgctgctgagtgtggagttggtattgctgtttttgttcgttgcttcactgacaagacagtcatagaagatcagattggggaaaagctgggttacggtctttcacgtgcaccctttgcaaccattgtagccctggctacagctctttcaatgcttgcttcagtaccactaggagaactatttttcttccatatgatattaatccggaagggcataacaacttatgaatatgttgtggccatgagggctcagagtgaacctcctggaccttctgtcaatgatgaccaacaaagcttggcatcttctccaatgagttctgcaccaacagcttttagtgggagctcgtttgcacggcactacaaaggcgcatggtgcactcccccacgtatcttcattgaccaggacgaaatcatcccacacctggagcctggccgagttccttcaactgttgatcctgataccacagacccaatggaaagaaccaaaacccatcctaaacggccagtccgcatcagtgcgtggaagcttgcgaagctcgattcaaatgaggccatgaaagcagcagcgaaagccagagcctcttcgtccgtgctgaaaccgatcaatactcgcaaccagtatgaggcagacagtgatagcctcagtagcagaaacagtgtcataagtgctgataccggacaccataggtaccctcggtcttgcgggaattcgcagtacaagccctcttatccaccaagcagagcaagtgcagatgacatcgagttgtacccccagacaccgagcagcttccagagcaactcacggacttcaactcccatagccgagcaccatccatccaagcatttcaacccaatctaccagacatcagcaaacaggtctccattctcagcaaaagcaagtgtcagtgaagctcctgtctctgaaatcaccaatgcagggaggtcctaccccccaccacaagcggacagatcctcccggtcatctgtttactgggatcaggaagctggcaggttcgtgtctgctcaggcaaaccagggatctagctctcgccctgcctatcctgatcttctatacaccgggcagaatatattctttggtggacctctgattgcagatcccgcagcaagaagcttcagagatcctggtggctcgagccaaaggtctgccgggcctcggtcgcaccagctcccggtgttcgttcccagtgacccccagaaagatcagctgtccaggttaccgtgaaatgctatatcttttttttttggggggggggggggggtagtagtcttccgaaacacatgttgccctgccgggttattaatgtatagttattagctcttagacctgacagaatagttcatgactttgtatcgggttcatggaaattaagacctatttaggcactatcaaccataagcactgaagttatggaagtgctgcggagtagtagtgaagtgaaactgacaaggatgttctgtcaccaaacctaattagcttcacctcgccatatactcaaaacaaggcgataactaccaacgtgctccttattaaaaaaaactacaaatgtg

SEQ ID NO: 33855 - DNA, 242 bp, Zea Mays
gtttctactggcaagtttcagtcattcactaccattttagaacggaaatcaactaaaccaatgtcctaggtgcataccagtaacttcattagtccttacctctgagaagcgagaaggagattagcaagtgaacaacttacacaaatcagagggtaaggagatcatcacagcatacatgaataaggactacgatcatgaaacgaacaaagcatattattgcctattcataaaaaatagctaag

SEQ ID NO: 33856 - DNA, 2874 bp, Zea Mays
cctagacgctcatgggccggttctgccttatctccctccctcctagtcctaccacttcctcattccccacgtactctctcggctgctcgcttatggcgatcgaagctgcgcgcctctcaccgtccatcgccgccgccgccttcctcgccagccgcccccctcttgccctccgcccgttctcccttcgtcgcaggtttcccctcctccgcgtcctcgccaactcatcgggaggggacggacgcgtcgtcgctctgtcctcgtctgagctccgaaagcgccgaggcctgtcttcctcctctggggctgcggactccgcatctgacggggatgagaagctacgctcgcttcgtcgactcttcgcgcggcccgacgttgctattgacgcctacatcgtcccttcacaggacgcccaccagagcgaattcattgcagaatgcttcacgaggcgtgcctatctgactgggttcactggcagtgctggtacagctgtggtcacaaaaaataaggctgctctctggactgatggccgttattttcttcaggcagagaaggaattgagccaccactggacactcatgcgcagtgggaatcatggtgttccaactactagtgagtggttgaatgatgttttaccatctggttgccgagttggtattgatccggatgcagtttcttttctcatttgatgctgctgaagaactgaaggattcaatcgccaataagaatcatgagttagttttggttcagggcatgaacctagttgatgagatatggggagatgcaaggccaaatcccccaaaagaaccaactagggtgcatgacatcaaatatgctggtattgatgtgccatcaaagttgtccttcattaggtcacaacttgctgaaaatgggtgtgatgctgtggtaatttcaatgctcgatgaagttgcttggttgttgaacatgagaggaagtgatgtcccacattcaccagtattttatagctacctcattgtggaggttagcactgctacactatttgtagacaacagcaaagtttctaaagatgttctggagcaccttgagcaagctggtgtgaaacttaagccatatgaagcaattatttctgaagtagaaagaaaaaagatcttgcgacaattcaatagggaaaatataatttttgcaatgttgctgttgatcaaaacattgatcgctttgtcaagactggcagagaaaggtgcaaagctctggttggattcttcaagcgtgaatgcagccataattactgcatttaaatcaagttgtgacatgaaaaagaaaggaaaagcaggtgaagaagttggagaaaaagaagcatcttcaaacgaccggataactggagatcctagtgtccacaatggagtcataagtgctgtatacaatgtttcaccggttgcacttgccaagtcagttaaaaatgatgcagaaattgagggaatgaagaattcacacttaagagatgctgctgctttagcagaattctggtgctggctggaggaggaaatctgtaaaagtgtgccccttacagaggtgcaaattgctgaaaagcttcttgagtttcgtcaaaagcaagatggatttatcgagacaagcttcgacactataagtggttatggtgcaaatggtgctataatacactacagaccaaccccagagagctgcagctctgtaggaagtgacaatctgtttttgttagatagtggtgctcaatacattgatggaactactgacataaccagaacagtgcattttggtgaggcttccccaaggcaaaaggaatgcttcaccagagttttgcagggccatatagctctcgatcaagcagtgttccctgagagaactccaggctttgtgctagatgttctggcacggtcatctctgtggaagattggactggattatagacatggcacaggccatggagttggagctgcgctaaatgtccacgagggacctcagagcattagctatcgatatgggaatttgacagccttacagaagggcatgattgtcagcaacgagcctggttattatgaggacaactcatttggcattcgtatcgagaatttacttctggtaaaggagcttaatctggcaaattcgttcggtggaatttcataccttggttttgagaaactaacctttgttccaattcagagcaagcttattgagtcatccttgatgtcaccttcggagatcaattgggtcaatgattaccacgaagaagtctgggaaaaggtttcccctttgttgagtggccattctcgcgactggttatggaagaacactcgacctcttttagatgtgtaataataactcaacgcacagcacggcttgactgcgtaagtgaaagaaatgaacagacatgtttggctggagcatctcttgaagatctgatggccttcaatggaatgcaactatatggcagtaaacagaggcaagacaatagatgcgtaggctggccagggttcagcggatgataggttgaggctggtgtatttgacatccagccaatttggtgcaacacttgaaaaatgaattacatgcaagccttttctatttattacactatcgacgacaccgtccattgtttgatgaatttattatttattacatttggtacctttttttatacaaaaaaacatctttttagagtgatgaagccatttgagaccatggtttcgtatatggaatcagtcagattcttagggtgctcttggtagggctatggcgaaaacaatttgagctatgatttttgtggtgaattatgatggagctgaagctattttgaagaaaacgattgataaaatagtttggtgacttggcgttactattaaaaaagactgaaatatccat

SEQ ID NO: 33857 - DNA, 1779 bp, Zea Mays
acgtactctgtcaaacgatacgccgcgatgcttccagacgagcgccatccccttcctcgcctcacacgccgtcctgttggtcgtgcctctcttcaacctttttttcttgagcattagcgagagccccttacatggtgcagtgctagcatcgttgctggcgacctcggtgaggtcggatctgcaaaggttgcagctagcgcgcctacactacatcaacatggtgtggcatctcctttcgcagatccccaacatgctacgccgccggctgcctcattggaactcctgtgcaccgcttgcctttcttctcccattcaacccgcaggcgttccctggctcaatagcgcaactaggggatgtccgccgctacctccatataggaaacgacagatttagattttcaggtgatgcgtggtcgggatcccggatcaatcaaaataagtgtgaaataagtgtgaaatttgagaggctgttgaacttccagatcaggtaccaaccaaaaaaagtgacccttttgacggcgtattgcgtgggcaaggcatgccagtgcgacaatagagaaactaacggggagctctgttcgttctgctgattgcttatgattaggctcgcagtggtggtagctgggagagcttgggactggccagacgcgaccaactcacccatgtaataagacaacttttatacatagccgacagtacgcaacctcatgcgcaagatccttaatgaaaccaaagagctgcagcagataaccaacgacaagcagaaaaatcaggttgtacgcatccaacattttactttcatatttgctgaagatgtcaacaaacaaaatagacaagcagcccagacaatggagatgatgtatacgataattgcagatgagttcaagtcaatggacaataaggacatgcgccctgaagattacttgaacttcttttgtcttggaaaccgggaagaaccaccatctaatggcagcccagaatcagagaaatctacatataaaagtgcagagatagatatagagttcatgaaaaagaaacttgaggaccttgataagccaatgaagaggaggaatgataagctgctcaaaattgagcatgaattatgtgagaggattactgaattagaaatgcagattgatccagcacaatgccgaggagactggagactaaacttggaggtgctactgaaggatgtgactttgagtcaaaggacaataggtagtcagatgaagattgtaaaaaacaagcatgcttaacccttcaagaatgcacagtttgagcttgaatttggaaaggggatatgccacagttcagagttttttgaacagaatttctggagcagttgttcctataaaataatattttaggtcttgaagccaccaccgtttggattgacatgatctgtggtattctggtgatctcattatagcagacttcatttcttattgtgcttatacagtagtgtagcgggaagagaattcacattgcatgaaatcatgttgatagctaagaggtggaagttgaagtaagccgggaagggtgaggtattgggaactgtggcatttaaagttcagtaggcagcagtaaactgtagtggtgtggtcgtgtacataagatgtgcacattttgaactcaggcattctttattgagtgctgctagaattacattgagctccctccacttctgatacttgcctggttttgcgtcaattggatctgtttgtccgtcctcaacactgttgtctgtttttgctaatttgggcattatctatgacagaag

SEQ ID NO: 33858 - DNA, 919 bp, Zea Mays
acgtcggcgtcttccatcgaagtggccttttcggcggcgagtgagagggcgaggaataaaactcgcgtcgcgcacgcaccgcaacaataatatccttccacgcgaatattcgccgcttcccacctcccccgccccgcatatccttccgtccgtccgttcgtctcccccctttcccttcccctctatttcaccaccccatcagccgcccgccaccgcgacgatcaccggcgcaatccgttcaccccaccactcatccactccccctccgcgaatctcatttctttactgcggctaggaggaggcggcggcggcgatgaagttcggcaagagcctgagcggacagatcgtggagacgctcccggagtggcgcgacaagttcctgtcctacaaggatctcaagaagcgcctcaagctcatcggcgccgggaacggggctgagcggcagccgaagcgggcccgccgcgacgactccggggaggctgacgcggccgcggccgcggcggcaatgacgccagaggaggcggagttcatgcagctcctggaggctgagctcgacaaattcaactcttttttcgtcgagaaagaggaggagtacatcatccgtcagaaggagctgcaggaccgggtggccagggcggccgggcgggagtccaaggaggagctcatgcgggtgcgcaaggagattgtcgacttccacggcgagatggtgctgctggagaactacagcgccctcaactacacagcagccggcggctccttcctcccgcaacagccaccggccgcctccaacctctacagtcgtcgccccgggaggctcatccctcatccctccctcccggggcggctcccttcccagccgccggccatccctccagccgctcctccccatctctcggcagcggccggcgctcagatccgc

SEQ ID NO: 33859 - DNA, 3089 bp, Zea Mays
cggggaaaggagaaaaatccacctcgccccttttccaccaggtcccagcccaagcctcttcgcctccgctagtacgcctccatggacgcgtaccagcaccagcgacgcttcgccggcgccggcgacgcaccgccgccgccgcctcacccctcccacccgagcgctcagtggtacccggcgcccccactgccataccatcctccccaccccggacacccctaccctccgcagcaccaccaccagtgggccccgccacccgacatgcagcaccagcaccatccgccgctgccgcagccctacgtgtaccaaccgccacccccgcccatggcgatgcagcaacagccgcccccgcctcctgggaacccctggccccctcaccacggcgccgggcagcacccgccgcctacctaccctcctcctccgccggggcaggcttggaccaatcactcatgggctcagaatcatggatatcaaggtcaacagagagaaacaaaccatttattagatagaggtccaatggtgtctccagcaaagaattttggttcattttcgtccacctatgagcaggaggtactgggaataatatgcttcaatatccaaactctcaagcacagccatttccaaccacggcagctgttcaaggtggattctcacagggttgccttagtatgcctgttcccttgacagaacagcctctttttgggcatgaaagacagccaattgatccaagtgaccaacctttggaatttaacagtaggaaagctcctgatttggcagtacatataaatgtcaattccaatatcccagctcctcaaacactagcacctaatcatgatgtagctgcaacctctacacattcatggacgccatctgctacagtagggtacctgcctcgagctcctgtgccaccacaaacagcacagatggatccttctgtgcatgctgcaccactttttggagcagcatctagttctagttatgtttcacctgcagcatttggtgttggtaatgtaacagaagtgttccctacagatccaaacactccttttagtgttgcagataaatcaaagaaacctccagtacctaactggcttcgggaagaacttttaaagaaaaaatcggaaccactgagtgcttcagcgcaaaactcagaaaacttaaatcccatggaagctaatgaggcagtacagacaataggaagacctgaccaaagtgacagcagaagcaatgattccgctaaatccactgaagacgatgacgatgatgaggatgaaattgaagcagctcgaatggcagcaatcaacaaggaaattaagcgtgtgttgactgaggtccttttgaaggttactgatgagctttttgatgagatagcaacaaaagttctaaatgaagacgactcagctgaatccaatgaagccactggtgttttcggatcaaaggagactggtctgggaagatcaagagccaaggcctcggctaaagttgttctccctgctaagtcaacaaatagttctgatcataaagatagtactgggttaagttcccctaaaggtgctcttctcggcctggctagttatgattcagatgatgacgacgatgctgacactgacagcaaggataagatgccaatatcaaatttatcttctaaagataatgctggtgctgtaaatactgaaggtgataaaagcactcttggtaaaagaaatgggaatcacaatgaacagaattcttcacttggaagttctccatcaggggaagatcttaaatctaataatcaaaactttcaaaggaatgcgaatgcagaacctgaacaaatgcatattcgtgatacagagaatggggagttccgtttcaaggccaagactcgtactgagccaaagggtgcatttgacagaatggatgagaaggcacatacgtatgcagaggtagatatccagaacagaaaaacctcttttggcaataatgctgaaaagcacaatgatttggaaagcagtcacagacattcagaaaagagcagcaaagaggactttgttaatgagttgaaggctgatcatacaaaagaactcgaatattctagagcagaaaaatataataacgatgacaaatacagcatgtatggaaatattgacaaaaggggtagctgcaaggagggaaaaggttctgatagtgctgcaaagcatgaatccgatacaagggagccacattacagaggtaactctaagcttgatggtgcaaagggagattggaaggatttgccgaaggatagagagagaaatagagatgatagaagggggaaaggaaaggatgaaaaggacgacaggttaaggcagatgacaagtcataacagcagaagttcacggtcacgatcaccaagggggagaagtcgtactagaaaggagaactcacatgttcgagggagtgtttcaagtgatgagccttctgatagtgtgaaaaagagaaagcattattcccataaaaccagcatgtcaccttcacccccaaaatctagaaacagacgaatttcgcggtctccacatagcaagcattctcaccgcaggcattcgccttattcatcggctggcaggaagaggcggtcgagatcgagaactccggtcaaaaggagatagaaggcatggacagtttatccgacgagatctttgcctaaacattcctctgaaacaaccaaagacatttttgcggttctgctgttgtctatctagtgcgtcttttgctccgacaacataatggtagaacagcattcctacagtgacaaacatgaaggcgaggactggatgtaccttgatataagatgcacattgaactgtatcttgtttgatagatgagctatataactagctcacgcagctggctgtatgatctgtagttcccccgttatctgaattgttcatgtattaggccatgtactgctcagcagagctatgtagttagttgcacttgtatgacttcagcatgcctgttgccagttgtttgtttgtctatgcaggatttttttcccgtttcctacttttttgataaaaataaactgattcctgtgaaatctatatatgatttctctcaaattcctgcca

SEQ ID NO: 33860 - DNA, 1174 bp, Zea Mays
tgccacgggtcagataagcttttctctccccttcgcagctgcaaccgctcgccgcgtgctccctttgtactgaaccgcatcctccccgcgccgacctgctccggcgagttaaacatggccgtcctcctccgcagcacctccgccgccgcctcgactgctggcccctcctcggcgctgctcgccaccaccttccgccgctcccgcggctgccttctgccccgtgccgcgccgcagcgccgcttgtatgtggcccgcgcctcggcccagcccctcgaggtctgcgctaaggagtccatcaccatccctggccgcctcggagactgtcctttcacacagagggttttgttgactatagaggagaagcatctgccttatgatctgaagctagttgatctagctaataagccagattggttatttgaaatcaacccagaaggtaaagtgcctatcgtgaagctcgaggaaaaatggattggtgattctgatgttataacacaagcattagaggagaaataccctgaaccacccttggcaactccaccagaaaaagcttcagttggatcaaaaatattttccactttcattggtttcctcaaaagcaaagatccaagcgatggaacagaagaggcactacttaatgagcttacttcatttgatagttatctaaaagacaatggtccatttattaatggtggaataatttctgctgctgatctctctctgggtcctaaactatatcacatggagataactctgggccactacaagaattggtctgttccagattcactttcttatgtaaaaacatatatgaagtcgattttctcaatggattcttttgtcaaaactcaagctctgacagaggatgtaattgctggatggcgcccaaaagtcatgggttaaattcatttctaaagttagacgttaaggggcggatgtagtacaggtgcatggggatacaggtacaagcagaacagaacaggctcttgatcagttcattaaggataacaaagaagcaaaaaaactcatatgcttacggtgacattggcaatggctatacttgtggataaatgttggtgaatttacttattctgtatccttctcaatggatcccactaattggcactccatctgagctgctagtgaatgtctgttggaaaataagaatctgcca

SEQ ID NO: 33861 - DNA, 2433 bp, Zea Mays
cgtgacacggccacgtagcccccgcgccgccccgcccgccggccgggccaatgagcgaccgagcgtttcaaaatttgaagaccctgttagaccaggcagtcaaaccaaacccaagatctcccgtgtcccgccctcctcgccagtcgcctccctgctcctgctgccggcagtggcggtggtgtcgcctctcctcagtcctcactcctcctcaccccagcggaagcgcgggcccgactccgtccgacctcgccgtctcggccccgagggcggggagaagccggcagggtgagcccgacgctacgccacgccgcgccaccatgccgctgccgctggccaaggcgaggagggggtcctccccgcagccgtcaccgcagcccgcgcggtcctcctgcaggtcgcagctggagcaggacgtgaagaggctgcgcaaggcgctgcaggacgagacggcgctgcacgccgtgctcgagggcgccctgggccgcgccgccgtcacgctcgccgacatggcctacctccccaccaacgcgcaggagctgctctcgaccatctgcatcctcgagacggcggtcacgaagctggaggaggagatggtctccctgcatttccagctcacccaggagaggaacgagagacggctcgtcgagtaccgcctcaagcacctgcccccgccgccgtccgcttgctcctgccactccgggaaactcggaccagacgaccccacaggcgaaaaatgcagtagccaaacggaggaggtttaccctcgcgccgtcttgcatgaacaggctgtgaaactgcagaggcagatctctgtcaagagcttcgtcgatcctaaccagctttccgaggacatcgtccgctgcatgaggaacatctttatttcgctgtcagattcctgcagggactcctcaaggaactcgaacatggagaatcagcagtccattccatctcccaccgggaactattcgatttctgccttctggactctgtcggaaccgtcgtccatttcttcttgggtacagagccctcaagtggatttgaactacaacaacaatgtattagcttcggagactgtttttgacccttacaaagctcgcgagaagcttagctgggctgacataggcagctacggtgcggcggccgaagtttcgtggatgtcagttgggaaaaagcaacttgagtatgctgcggagtcacttcgtaagttcagattgttcattgagcagctggcagaaataaaccctattcacctcagtgatgatgcaaggttggcattttggatcaacttatacaatgcgttgatgatgcacgcttaccttgcttatggtgttccacggagtgacatgaaactgttttcactgatgcaaaaggctgcatacaccattgggggccactcattcagcgctgcgtttattgaatacgtaattctgaagatgaaaccaccaagccataggccacagatgaagattaaggtacccgaggagcagaaaaagttctgcattgcggcacctgagccacttctgacgtttgctctcagctgtggaatgtattcttctcccggggtgaagatttacacggctaacaacgtgagggaagaacttcaagacgcacagcgtgatttcattagagcatcggtaggagtgagtcggaaagggaagcttctggcccctaagatactgcactgctttgcccgtggctttgtcgacgacaacagcttcccaatctggatctcgcatttcctaccccagcagcaagctacgtttgtcgatcactgcgtgtctcaacggcggcaaagtctcctgggcacccgtactttcggcgtcgttccatttgattctcggtttcgctacctcttcctgccagatgcgggatcgttaaattaactgctatccgagattcagatgcttccctgcctagacaacctgaatgacagcctaactgccatctgccaacagaagtgatgaagtccaaagccctgatagaccgctcaacagtgtaagagctgtctctcgagttaccatcatgtctggaaaagtaagtttatatccagcgaccatgagagtatcaagatttgagatagcagtcactggattgacccgtgtcattggaagtcagatgcatatctttggaattccttaatcggttcgtccgtctcgacatcttgtcgagtttcattaaaagaaaaactgtacataactcctactcccagataaaaacttaagttcatcatggtgctatttatgcattgtatctgttcatcatggtcctgacgttcatcgcattaacggttatcaagaccactacgcatcactcttaacagcttttctcggattttgttgctagcaaatgtctctggatcctatatgttactgactggtttactgtaccttattacccttgtcgcctctgaagttctgcttctggaggcctggc

SEQ ID NO: 33862 - DNA, 2668 bp, Zea Mays
ccgcctccgcctccacttctccttcacgccccgccttgccttcatcctcctcctctcctccatctctcctcgccccagcgcgcgcgcggcatcgccgtcgagctacttactcgagcttcagttccagctactggagcacgcagttcatattaatacacagcttagctgtaccaagcggcatcttgcacgctagctaaactagaggaactcgctgcgcgcatgtctccaataatggcgctccaggcatcgtcgtcgtcgccttccgcgttccgtgcggtcccggccaccgccaacgcttcctgccggcgtcagttccaggtgcgcgctcaggtagccggcggcagcagcagtagcagcatcggagccgatggtgggaagatgatggtttccaaggagccggcggcggcggccacgtcgtcgggaccgtggaagatcgacttctccggcgagaagccgccgacgccgctgctggacaccgtgaactacccgctccacatgaagaacctgtcgatcttggagctggagcagctggcggcggagctccgcgcggaggtcgtgcacaccgtgtccaagaccggcgggcacctgagctccagcctgggcgttgtggagctgtcggtggcgctgcaccacgtgttcgacaccccggaggacaagatcatctgggacgtgggccaccaggcgtacccgcacaagatcctgacggggcggcggtcgcggatgcacaccatccgccagacctccgggctggcggggttccccaagcgcgacgagagcgcgcacgacgcgttcggggtcggccacagctccaccagcatctcggcggcgctgggcatggccgtggcgcgggacctcctggggcgcaagaaccacgtgatctccgtcatcggcgacggcgccatgacggccggccaggcctacgaggccatgaacaactcgggctacctggacgccaacatgatcgtggtgctgaacgacaacaagcaggtgtcgctcccgacggccacgctggacgggccgtccaagcccgtgggcgcgctgagccgggcgctgactaagctccagtccagcaccaagttccggcgcctccgcgaggcggccaagtccgtgacgaagcagatcggcgggccgacgcacgaggtggccgccaaggtggacgagtacgcgcgcggcatgatcagcgcctccgggtcgtcgctgttcgaggagctcgggctctactacatcggccccgtggacgggcactgcgtggtggccatccacgcggccatgggcggcggcacggggctgaactacttccagaagcggttcccggagcggtgcttcgacgtgggcatcgcggagcagcacgcggtgacgttcgcggcggggctggccgcggaggggctgaagccgttctgcgccatctactcgtcgttcctgcagcgcgggtacgaccaggtggtgcacgacgtggacctgcagcggctgcccgtgcggttcgcgctggaccgggcggggctggtgggcgccgacgggcccacgcactgcggcgccttcgacgtggcgtacatggcgtgcctgcccaacatggtggtgatggcgcccgcggacgaggcggagctgatgcacatggtggcgacggcggccgccatcgacgaccggcccagctgcttcaggttcccgcgcggcaacggcgtcggcgcggcgctcccgccggggaacaagggcgtggcgctggaggtgggcaggggcagggtgctggtgggcggcggcacgcgggtggcgctccttgggtacggcgccatggtgcaggcgtgcctcaaggccgcggaggcgctgaaggagcacgacgtgtacgtgacggtggccgacgcccggttctgcaagccgctggacacggcgctgatccgggagctcgccgccgagcacgaggtgctgatcaccgccgaggagggatccatcggcgggttcggctcccacgtcgcccactacctcagcctgaccggcctcctggacgggcccctcaaactgagatccatgttcctgccggaccggtacatcgaccatggcgcaccgcaggaccagatcgaggaggcagggctgacgccgcggcacatcgccgccaccgtgctgtccctgctggggaggccattggaggccatgcagctcaagtgaacgacgacgacgacgataacgacgacctagcttcaccatcaccaccaacagataaataaaaagcaaaccaaaccaaggcgtttgtacagtacaggagatgggtccaaggccttgggccggcctgttggcaccgtagtagcaaggatagcaaatgcttccaaacgcaggctgtcaagtgcaggtggatatgtctttctcctagccagtgacgacatagagcatacatctgcgcgggcggtcccacaagtcagctgatcctctgctagttttttttatttttattttaaagaacgtctttttgtataggatgctgcaagcatgtacgcatggtactagctacaagcatatatagaataacaaatcaaaattcatgtgatgatatacgtacccagtggccagtgctccatccatacacatacatacacaaagctagcatagaatatgaacgggttgtctcttcctgactgctgagagagagatggatggatacatgcatagttctagctgcttg

SEQ ID NO: 33863 - DNA, 2469 bp, Zea Mays
cctcgctcttcacctgcccgcgcctcggtaggcgctagtcgccttcctccctggaaggaaaaacaaacaaacacgaaacgcaggtccgaatccaaatctagcggcacgcttaacgtcgcgatcccgcggactccacccacgcccgcggcggcagcgcggatcccgcctagggctcgcgtgtcggtcgctccggcgctaactagtaactaccccctcgcggcgacgggaggtcggtagcggcgatcgcgctagcggagccgcttcttcgccctcgacgccgccggcctcgatcaggccccgccgacggaatggcatccaaagtccgctttacagtgggttctcaagtttgggttgaggatgctgaggtggcttggattgatgggttggtggaggaggtacaaggagatgaattaattataaactgcacttctgggaagaaggttactgcaaatgtctcaagtgtgtatcctaaggatgcagaagcgaagcgctgtggcgttgaggatatgacgaggctagcttatcttaatgaaccaggagttttacagaacttaaagtctagatatggaatgaatgaaatatatacttatactggcaacattttaatagctgttaatccatttcaaagacttccccacctttataacaatcacatgatgggaatctataaaggcgcagaatttggcgagctgagcccccatcctttcgctattgcagatcatgcatataggcttatgatgaattgtggaaaaagtcaagccatattagtgagtggcgaaagtggagctggtaagacagaaagcactaaaagccttatgcagtatcttgcatttatgggtggtaaagctcaatctgggggaaggtcagtgcaacaacaagtactggagtcaaatcctgttcttgaggcatttggaaatgcaaaaacagtcaggaataataattcaagtcgttttggaaaatttgttgagattcagtttgacaagaatgggaagatctcaggagctgccataaggacttacctcttagaaaggtctcgtgtctgccaaatatctgatccagaaaggaactatcactgcttttacatgctatgtaatgcaccagctgaggaccgtgagagatataaactgggagatgccgcatcatttcactatcttaaccagtctagttgtattaagcttgatgcgatggatgatgcttcagaatatatcataactaggagggcaatggacattgtgggcatcagttctgatgaacaggatgcaatatttagagttgttgctgctattcttcatttgggcaatgtggaattttcagaagggagtgaagcagattcttctgtacccaaagatgacaagtcccagttccatcttaggacagctgcggagcttttcatgtgtgatgagaaggctcttgaggaatctttgtgtaagcgtgttatggtaacacgtggtgaaagtattgttaaaaatttagatgcacgagcagcagctctcagtagagatgcactagccagaattgtttactctcgtttgtttgattggcttgtaactaagataaatacttcaataggacaagatctaagctcgaagcttttgattggtgtactggatatatatggttttgagagtttcaagacaaacagtttcgagcagttttgcatcaacttaactaacgagaagctgcagcaacactttaatcagcatgtgtttaagatggaacaagaagaatatacaaaggaagaaattgattggagttatatccagtttgtagacaaccaagagattcttgatcttattgagaagaaacctgggggtataattgctctactggatgaaacttgcatgctgcgaaattcaacccatgaaatatttgctgaaaagctgtatcaaaaatttaaggggaacttgcacttcagtaggccaaagttctcacggtctgatttcactattcatcactacgctggaaatgttacgtaccaaacagatctgttcttggataagaacattgattatgctgtgaatgagcatcaagttttgttacatgcttcgagatgttcgttcgtttccagtctttttccacatgaagtatcagctaaatctacgaaatttacatcaataggttcaagctttaagcaacaattacaagctttgctggaaactttgagcgcaacagagccacattacatccgctgcataaagcccaataatgttctcaagccagcgattttcgagaacagtaatgttctccagcagcttcgatgtgggggagtattagaggcaataagaataagctgccttggatatccaacaaggaggagatttgatgaatttgttgaccgttttggtgttttactacctgaagttcttggtgaaagttatgatgaagttactgctacaaacatgcttcttgacaaagtcaatctcacaggatatcaggggaaataatgattgctgaactgtgataactgaa

SEQ ID NO: 33864 - DNA, 2926 bp, Zea Mays
tctctgaattatgaaggtgtattcataagttttgctttattgtttgttaggttgttttgactaagtgaacgaggaagcactttgcttaataaccaatattggacaccacactcttgattacttctgcatagaagtgtatgcattgtgttcgctgtcaattttttcaagatatctgctcgcaattggaaaacgacttcaggaaatcattagagactgaggtgaccgatgatcatgaagaagatgctattcggcctttgccttggtacccgggtaatcttgcatggcatttgaacttttctcgaatgcagctgaggagaaatcaggcacttgagagttttcatgaattcttgaagcgagagaacgaagttggcaacataactaggcaagaggctgttagtatggtcccaccactgtttctgaacgtgcaacctgatcatcatattcttgatatgtgtgccgctccaggatctaaaactttccagttacttgagatgattcaccagtcaacgaagcctggactgcttccaaatgccctggtggtagctaatgatgttgatgtgcaaagatgcaatcttcttattcaccaaaccaagagaatgtgcacagctaacctgattgtgacaaatcacgaagcacaaaactttcctggttgtaatcttgcaaagttctgttcaaaaatgtgtatggatgaggcaaaggtgcagaggttggagtttgatcgcgttctttgtgacgtgccttgtagtggcgatgggactgtccgtaaggctcctgatatgtggaggaagtggaatgctggtatggggaacggacttcatcacctgcaagtggaaattgctatgcgtggtatgagcttgctcaaagtgggtgggaggatggtttattcgacatgttcaatgaaccctgttgaaaacgaaggcgttgttgctgagattttgcggagatgtggggactctgttgaacttcttgatgtttctaatgaactacctgaattagcccgtcgtcctggacttagcacctggaaggtacgggatagagggtcttggtttggtgttcatgaagatgtacctcgctacaggaagcatgtgatatcagcaagtatgtttccttctgggaaaggcagcaaagatagtggtacggggagcagcagcgttgaggtcaacacagatgtagctgatgcagacatgaaggattcaacagacatgggagagggagaacaagaaacaactgtaacaattgatgacagcaataatggtgacaatctgaaaaccgaagagggaactaaagttgattgcgagtctggtgaagtcacaactagtagtagttataaaaagttaaattctacttccatccgtacggaacattcagattacccactgcatcgctgtatgagaattgttcctcatgaccagaacagtggggcatttttcattgcagtccttcataaactctctcccctgaatgagaaccaggtggtagatggtgtcagaattgaccagaatatctcaaaagacaagactgagaaacttgagaaggatttagtatcacataaggcatcatctgaagaaaatactgtgcatcagcaagtgattgataatgcaaatgttctggatggagaacagaatagagacagggataacaaaagttcagaagataagagctcagaggattctaaggtcaatgttaatgaggcagcaaagggtcaagcaggaacaagggataggaggaggcagcaaaaccaaggcaggtggagaggggttgaccctgtgatattttttaaagatgaagtgacagtcaaaagcattgtatctttctatggtatcacagattcatttccacttgaaggtcatctggtgactagaaaccctgatactagtcatgttaagagaatatactatgtgtcaaaatctgttcaagatgttttggagctcaacataaaaattggcgaaaggctaaagatcacctcactgggcctaaagatttttgaaaggcagtcttcaaaggaaggctccccatgcacatttcggttgtcatcagagggattgccgctcctgcttccatacatcacaaaacagattctatatgcatctgcaattgacttccaacatcttttacagtacaggactattaagtttcctgatttcgtggatgcaaaatttggtgaggaagcttcagctttgcttccaggttgctgtgttgtagttttacgtgaagggcatcaggatataggatccatagctacagatccctcggccattgccattgtttgctggaaaggaaagaccaatttgtgcgtcatggtttctccgctagatggtaaagaattgcttgagaggatttctttgcgccatgggctcaaaatccccaaaggggataaagagaaacccagccaggagattgctggatcagacgagctgcttgattgtgccactgaggtggacgatcaagagtctcttcctgaaagcaaagcatctgacatcgaaatttcagatgctaaggaggctgagtagcttttgttttatgtcactacgcatattacacaggaggtagctgtatcctcgagatggctattagcttttttaagtcacttcggttgccaagggagagagatgatagcccaccacatgggaatgacagactcaaaacaccatctggtaatcgttcacggtgacacagaatctatagacttgtaacttcttggttttatttcttcgagaggatgtattgcatcgattttaatttgttgcactcaacacagaatctagtaaagattgagaaaaacattttttttgagatatctctgtgtaggttcactacgaatgctgaaatctgacattttccgaggctatctagttactatgctatatgccttcgtttgtggtggttttgttgagcaccagccacagaacgaataagatgattgcca

SEQ ID NO: 33865 - DNA, 805 bp, Zea Mays
cttatatcggcacgctttgatgtcactgtggtgaatcccatcgctgtgaatagcaagtattgcaatgtattcactgagaataaaagagttgtatcaatgatatcaacttcagagtttggaaaggtagcatttgttgcgattggagcaaccatggtaggaagcatcacgttcttgaaaaaagagggtgactacgtccgcaaaggagatgagtttgggtatttctcctttggagggagtacagtgatatgcgtcttcgagaaggtttgctgatacttccttgcttactatctgtttgtccatttgtcgtaattattgctctctgcgtgggcaggacgccatccaatttgacgctgatctcgtggcaaacagcgaaaggtcactggagacccttgtttctgttggtatgaccctgggcatctcgacaaggaacaaggagatgcaagtcccggatctgcagaaagtttcgctcggatgacagacagagctgtaaactgtgtgcaggttaacagtagcgtatatttgatactagcaactgccactggtaggcaatactattatcacataatccaagactacatgtatagtcaggctagaggagtctggtttacggcggtgggcgtgggcatgggcattggcccagctgtcatcggctgagagctcactgcatggctcggtggtttttgcaatgacgatactaaccgtgcagttgctcccatacgccattatccgaacacgacacaactaacaccaagacaccagaacatcgaggatagcgtaactcatttaatatcagccctctggtttc

SEQ ID NO: 33866 - DNA, 2615 bp, Zea Mays
agctctcctctaccagaaccagactcccacgcccccctcccctcgtgtctcaaaagcatagcgcaccaccacgggccacggcaatacggcatcatctccaaactcccgaggggggaccatcaccgctgctgagcacgcccgccgcctgcccttcctcctcccacccgtgccgcagctttcgattcctgcccgcctcattgctacctggtcgggccgcggaattaatgtcgcgcggaggaaatccggtaagctccggcccgattttcaactctcccctccctcatcctcgattggggttgagaaattgaatcaaaccccccacacccacccacccaaaaaagtcgcccttcctcggacgagatccccccaatcagttcttattgtggccgatagattgattgcctcacttgccttccgctcgcttttggggtgctaacctaatcggtgaccctccttgtgtgctcggattgggttctcgttctcatcagcattgacctcagcggctttcttttggacaatgctgctgttttactgcttgtttctaccatctacggccgtgtaggtgtgtccgacacgccacaaaaacttttcgttatgttcagcaggtaaacaagtctagctgaagtgacgattgccagcattgttcgaccgtgcggcttctgtttggctggaaccgtgatggatccagaaaaacaaaatgagatgagcctgatcgacaagagagaactagtatacgaagttgcaagatggcctcaaggtgccatggagattcttcggtgctggacccgcagggaacttcttgagcttatttgtgttgagttgggcaaagagaggaagtataccaatgtcccaaaagctaagatgattgcttacctattgaaattagtttcacggaatagtggaaagaatggacaactcaagaatgataatccgaatgttatgttattagggcaggataacaaagatgaaatacaaatgaaggaatctgatgaacaatcacgaccactcaaaactgcaaactctgactcatcaataagcagagaggcttgtgccggtagttcagtggtgtgcagcaatgttgcatgccaagccacaccaaatgcaggagataaatattgcaaacgttgctcttgctgcatttgcaataaatacgatgataacaaagaccctagtttgtggttggtttgcagctctgataatccatacagtggttgttcatgtggtgtctcttgtcacctaaactgtgctctaaagaataaaagggctggcattgtcaagaatgggtgcaacaagttagactgtagtttctactgtgttagttgtgggaaaatcaactggctaatgaggtgtttgcagaaacaacttgcaattgctagggaggcaagaagagttgatgtgctttgtgagcggttgtcattgagccataaaataatacaagggtctgaacgttacaaggaaatagcgagcataatcagctcagctgtgaaaacacttgaaatagaagttggtagtgcattggatcaggtctctgtgatcacggggcgtggcatcgtgaaccggcttacttgtggtgctgaagttcagaagctttgttcaagtacattagaaattgtagactctaaagtggataacatcttggagttcgagtccaataatagtccaaaactcctaggtcctcagccccaaatcctttttcatgagatcactccattttctgtggttattgtgttgaactatcagcatgacatcggtaaggagcagattgatggttccaaaatttggcaccgaagtgccagggtttgcaactattcatcagagcccacatgccacatactgaggccaaacactaggagcctggtttctggtctgagcccttcaactgaatacttcttcaaggttttgccttttagcagcacacatgggtttactgagtgggagacaaaatgcagcacacgcagcctggaccatggcagcagccagtgctcaactcagaactctgagagcatgtgcctcaaagacgattcaatgcagcatcacaaaaaggatttgaatgtgcagaatcaccagagaaccattcaatatgattcacctaagggttctacaaattcaagtgagaacaatttatcatgtgatcggtattccaagcgggctaaggttgcaaggctagatggtgcaagcgacaacgatgaaagccagttgccgccaacttctgaagttttaccatttgcaagctccaactcttctccttccgaagctccaagtaaacctgacttgcttattggcaccccagattcggcctccaagaactatgtggagcagcagtacgagtactgcgtgagggtggtcaggtggctggagcatgaagggcacatggacaatgacttccgtgtaaagttcctcacttggttcagcctgaaggcaacaacacaggacaggcgaatcgtgggcgcctttgtagatgttctcatcggtgatcctgcaagcttggttggccaactggttgatgcattcaaggatgccatctgtatcaaggagaagccctctcaagcacaacagaaagatgcatgctgcaagactgattgggaaggtggatatttcccagtcactctccattt

SEQ ID NO: 33867 - DNA, 1177 bp, Zea Mays
ggttctgggcctattcacggcattcagggggaaatgggtgagtcccaagctcttcctctcatcaacttcttcccgttccacgcagaccaaccagacattaagaattgagatcctgcaaccgcaacaatggcggccatggcgaacacctctcgtctccccaccccctgcagcctcccaaccatcagcatcggcgctaagagcaggaggctagctgtggcggccgtcagatgcggtcccggcggcagcaggagccaccggaggagccttggggtcttgctgtgtcgatcctcgtccacggccggagcccaagggagcacgaggatggaggactataacaccgccatgaagcggatgatgcgtaacccctacgagtaccatcacgatctcggtgcaaagaacttggcattcagcacatcaggagaccggccgtggattttgatccagactcactgaggtcgcaactgccgaaagcagtttcggcgctagaatgggctacgtcgcagcgcaaagggcgggtttatgtccactgcaccgctgggcttgggagagcacctgcggttgcaatcgcttacatgttttggtttgagaacatggatcttaacacggcttatcagaagctaacctccataaggccctgtggacccagcaagagagccatccgcgccgcaacctatgatctagctaagaacgatccatccaaagagccttttgagaaccttccggagcacgcttttgagggcgttgcagactgggagaggaagttgattcatgaccgggtgcgtgctcttcacgaagcatgagcagaagaaactttctccacgcgtcaagaaggggggaactaagcttcctaatgaggcaatggctgtgcttcggcaccagatcattagatgtcgaaacgataaagtttgttctcaataaagcttatacgacgccatatttgttgctgggtagtttgtaatagtcactaataggaaggaaataaagagggccttgcatgagattccagctggtgtcttcacctttgtggtgactgcaaatgagatgcccatccattaatggcatggcgcattgtaggtatattgtgtaaataaacctgtggatcttcatttgaggaacatcacttctgtaaaagtttatttgaagatacggccagctttgcaaatctaccatacctttg

SEQ ID NO: 33868 - DNA, 3433 bp, Zea Mays
ctgcctccgtttctgtttgtgtgcgtgtctcggagaagctctccctcgcctcgcagatccgcggcctgctttgttgctgctttgccagcaagctgccgcgctcatcctcgcgcgacgccagcggcggggtggcccctctccagtgacccggcgactgctcccgtcggtgccgccgccgcctcctcctccgagatccattcccgtgcccgcggcaaggaccagatccatcaccgcgccacgagctacagcaggcgacatccgccccggggtcgcacgccgcctgctagccgcggacgtcccgggagccccgttcgcagacgcctgcacgcgcgcggcgcgcaacgagctccgccacctgccgtcgtgaagcagcgggcttactaattttgagaggtgtctgacatagactaaaaaaaaatcagcgccagggctcagggagcgacctaccccaaggtggggagttggttccttttccagtaataatgagggcaaattcatatcccatcatgatggaagaggacatggaaaatggaaggtcgtatcaagaaagaccaagggctttttcaacagtacgaagcaaatcatctgtaccgctggccttccgtttgttgatgaggtctattcttctctgtctaccttacaaagtgggttcttgctaaggacgaaggacctccagaaatgtccgagatatctgatgccataagagatggcgctgaaggtttttttaggacacaatatggaactatttctaaaatggcatttattctggcctttgtcatccttggcatttatattttccgcactaccaccccacagcaggaggcatctggcttgggaagggcaacattagcctatattacagttgcctcttttctccttggagcgttatgttctggaatagctggttttgttggaatgtgggtgtccgtacgtgcaaatgtacgagtttcaagtgctgctcgtcgctctgcaagggaatcattgcagattgccgtccgtgctggtggtttctcagccattgtggttgtttgcatggctgtatttggcgtggcaatactgtactcaacattttatgtttggcttggagtagattcacctgggtcaatgaaggttaccgacttgcctcttctccttgtgggatatggttttggtgcctcttttgttgccctttttgctcagttgggtggtggaatatacacgaaagctgctgatgttggagctgatctggttggaaaagttgagcagggaataccagaagatgatcctcgtaacccagctgtcattgctgacttggttggtgacaatgttggagattgtgctgcccgaggcgctgatctttttgagagcatagcagcagaaattatcagtgcaatgatacttggaggaacaatggcacagcgctgtaaaattgaggatccgtctggctttattttgtttcctcttgttgtgcattcatttgatttggtggtgtcatcagtcggaattctctcaatcagaggaacacgtgactctgggctcatttcccctatcgaagatcccatggcaattatgcaaaaaggctactctgttactattatgcttgctgttcttacatttggagtgtctactcgttggctcctgtacacggaacaagcaccttctgcatggctaaattttgcattgtgtggcttggtggggatcatcacagcatatgcttttgtttggatttcgaagtattacacggattataaacacgagccggtccgccttttagctctttcaagttctacaggacatggaactaatattattgctggagtaagtttggggatggaatcaacagccctaccagttctagtgataagtgttgccattatatcatcctattggctggggcagacctctggcttggtggacgagtctggcaacccaactggtggtctttttgggacagctgtagcgacaatggggatgcttagcacagcagggtatgttctcaccatggacatgtttggtcctatagctgacaatgctggtggtattgttgagatgagccagcagcatgaaagtgtgagagaaatcacagatgttctagatgctgtgggcaacacaactaaagctactacaaaaggatttgccataggatcagcagcactggcatcattcctcctgtttagtgcatacatggacgaagtagcttcttttgctcaaatgccgttcaaggaggttgacatagcagtcccggagatttttgttggtggtttattaggctcgatgcttatattcctgtttagtgcatgggcttgttcagcagttggcaaaactgcacaggaagttgttaatgaggtcaggagacaatttatcgagaggcctggtattatggactacaaagagaagcccgattatggacgctgtgtcgcaattgtggcctctgcatccttaagagaaatgataaaacctggggctctagcaattatatcacccatggccgttggcgttgtcttccggattttgggccactccactggtcagcctcttcttggagctaaagttgtagcctccatgcttatgtttgcgacggttgctggtattcttatggcactcttcttgaacactgctggcggcgcctgggataatgcaaagaagtacattgagactggtgcccttggtggcaaaggcagtgagtcccataaggctgcggttacaggcgacacggttggagacccattcaaagacactgcaggaccatcgctgcacgttcttatcaagatgctcgccacgatcacactggtcatggctcccatattcttgtgattaaccaaccagatttatcaagcttgccattaaccctgcggagatgtatctatgcgacttgtagatgaggtgtttacctgcatgtgatgtaatgatccaatcggttttagtgtgactacatgttgtacccaaagaaagaaagaaagaaagcagcgatctgtacccaggttttaatggtccaatcggttttagtgtgactatatgttgtacccaaagaaagaaagaaatcagcgatctgtacccaggtttgacggtagatattattctgaatttctgacgggtagtgatggtgcaaatgccatattttgtgacggacgtcactgaactagtagcccaagtgttttgtatttgtttattgctgggaacattatgacatccgttgagcttagctgtaagaaaggaacgatccacgatggattttaggatcgtgactgggtctacaccttacctttgactcttcacattaacaaagaaactgatgttatgtaatggtgttaatatgaccgattgtgagcacttctaagaggattaatatttaatagcttccagcacagaaaacatgcgcagataacaaaagaaacttcatatcaatctcaacagaagctgcatccttaaccatcctgcatttgtggtgcttgtt

SEQ ID NO: 33869 - DNA, 802 bp, Zea Mays
ccgacactcttaatttaagagtgtcgaggtcccgcagaaaccgacactcttatgtaatttaccctaatccccaatcctcttctaccgtcgcgcgtctcctacccactctgcttgccagtccgcccgccgtctgctcgttttgacctccgctgcgcgcgctccctgtccggcggtgcagaatcacccagcggcgcgcgctccctgtccggtcatggtgggggccggcggcgtagggcttcgggcagccatcggcctcgccaagtcgggcggcgagcggcctcgccaagctggacaccgggcggccatcgctgagccgggcggcctcgccgagccaggcgacctcgccgagccgggcggcctcgccgagctctaagctccgggccgcgcagtgcctcgccgagccaggcggccatcattgagccgggcggcctcgccgaactccaagctccgagcggcgcagtgcatcacccagatcttccccactcgctcgcacaccgttgcggcacagggttctggctcacatcatgctagtccgcctccggatcagagcacgtttatggacttattgatgaacacaagtggcggcggctccaatgacccaccaacggaatgaattaatatggaggcttgtgtggaacttactatcattgcgttttgtatgaacttgaacttgtttcaaatggatttgaacttctttcttatggatttgaacttgtataaatattgaatatggtgcttgtgttatgatatattgaatatggtgcttgtgttgtgatatattgaatattgtgcttgtattgtg

SEQ ID NO: 33870 - DNA, 3575 bp, Zea Mays
attatccacggaatggaatcgaatcgtccaggaaaggggaggaccggagcgagagcgagatggtagtggtggccgccgcggccgcacgcggccgcgctgtaaagcccctgttcctcgtcctcgtccaccacagccgccccgcgccccgcctcccccgccgaaccgcccgcgcccggccgctgcgcttcctctcctgctcgacctcagcgccgccgctgttcgcagccgtcgcatccatggactcgccgccccagggttaccgcaccaacgtcggcatctgcctcgccgacccatccctcaccaagattttctcggcttctaggatcgacattcctagcgcgtggcagatgcctcagggtggtatagatgcaggggaagaaccaagggcggctgccttcagggaattgagagaagagactggtgtcacatccgcagagatcgtggctgaggctcccgtctggttaacatatgatttcccgccagatgtcagaaccaaactgaatgccaggtggggaaccgattggaaaggccaagctcaaaaatggtttttatttaggcttactggaaatgacgatgagattaaccttaatggtgatggatctgagaagccagagtttggtgaatggacatggatgacacccaaggaagttatcgaaaaggcagttgatttcaagaaacctgtatatgaggaagcattgaaacactttgccccctacctgcagtcagatccagccgcttcatcatagaagatttggccaatttgcttgcatccctgctgtatctggacccccaataatttgacacgacgcaatgtagccatgaggtgtgctatacaatttgatagtgtgtggcctgtttgagtgaattatatatgccagcattggatcctcgccctctacttagtcacataagtatacaataagtggtggaaacagtttcagccaatctggaacatggtggccagtgtatcttgtctgccaatgactgaatgctttaggttgaagcaataccataattccagagagactgcggtacagcaacctcaggttatgtggggggtcgtcggcaaaacgacgctcgtttggcattggctacggcagaaactagtgtctggctgccattggttgtgggaggagcagaggaaaacaaattgttggttacactctgtactactgcgtcatgatattgtcggctttcgctttgtggcttttggaggaaaactggagatgtggcagctttggctttacgcatcttggaggaacaggagatataaacacacgcatttcgtttttttttttgttgagttgctgtgctccgtcttcgctgcagaatccagatcaaatgtggtggtggtggtgctgctgctgctggctacacgaatgtggatagcagcatttgtcgtccttgaatgcctgccgagaaaggttggtggtggtagagagagagagagaggagttcttctctcctctcgtctcgtctacctctgtgttctcttctctctcgcctcctcagatgggatggcattacatgtttccttcctggagaagaggctaccgaggccttttcttggtgacgtcgatgcgccaccagccccagtcactgccactgcccactgggaccaaccccgcggacggaggaccacttgtacaccaggtcgatcacgaccataccgtgggctggcctgcagatcttcaagtatacgtgccagtctttatcttggcataaacagatagtaccagtgcacgtagcctctagccagagtgcatgagtcaaagcgctatattctctgtagtgaagtgaagcacgcacgcacgttgcttttccttcactccatcggccaccaagttattaatgcattgcatgccagctggcccatctgattcctagcgacaggaacatcattaagcaactagtactagagtaatgtaggttgatgtcgatgatgtgtcccctcagaatttttgttgacactcgttgctggacctggacctgactagatggcggatggggggccattaccatcatccattcattgtgcgtgcagtactcctgctaccgcctccacggctctccatccatccatccatccatttgcatgcatgacccatcaagtatggaggaagcattacactacacatgtcttggccgaccatattctgctcgacggaaaaaagccagagattggagtctcaacactgactggaattacacatgaaaaaaaaaacaaatgagatgcctaccaccaatgccaaaaaaaaaaaaaaaaactaggaaacatatcatcatgatcatgtatctacaaagcagagcaggagaagaagaagcataaggttgtgcacatggacgacgttcgtttgtacctacagcaacgaattccaacactgtgcgaaaacaggcaagggggaggaccgggagacaagagagacacatgtactgctgcttattatcccatggatggaatgatggatgcatctgatccgatcaccggccgtctgccgaggtgaaggactcggcgaagccggcggggcgggcggggatgctgcccttgctgtcgtccaggctcatgacgctcccgccgccgtccgtcaggccgccggcctccgcgtcctgccagctcttcaccatctgcagcagcggcaggtgcaggtcgatgcccaggtagtcctcggcctcgtccttgacttggcgctggaaagatgaagctcaacaactttatggagaaatggaagagaagcattccttcaggaatgtgctgtccggatcttgagatgcttgaaggggaagtgttgtgtgaaaagcttggggctgagacctgggtgcatgctttcagtgttactgatctgccactggcgcctgctgagaggttcgcagcacttttccgtgatcaggacattggaatggtagaaaaaatagctatggaccttgcagatatagcttatggtgataatgcacactggaagttggtcaggatgtctcatgcaaactatcattcatcatgtctttgctgcggaaccttgttaaggaggggcatcatgtcttaatcttttcgcagacccgtaaaatgctgaaccttattcaggaagcaatattattagagggctacaagtttttgcgcgaccaaggtttctgagcgcgaaaggattgtgaaggacttccaagagggtcctggagctccaatatttttactaaccacacaagttggtggacttggacttaccaaggcagcacgcgtcatagtagttgatcctgcttggaacccaagtacagacaatcaaagcgtagatcgtgcttaccgaattggccagaacaaagatgtgattgtatacagctatcttgtttgtgccctcaggagattccagagctttttagtttgccacaacaaggttttgatgtttccctcacgcataagcagttgcaagaagagcatggtcaacaagttgttatgtaagagatctgttttagctgaacttcctttaatcgagcacggttaatttgattttgatgatagtattatgtgccactatcacataaatttgaaatattagtggtgtcaatcagacagaacctgcgaatcg

SEQ ID NO: 33871 - DNA, 3434 bp, Zea Mays
cagccgttctcctctcagccgtcgccgtcgctctcctctcctccacactgctctcctctctcctccgagccgcagctcttctctctccctctcccctgcgcgccgccactgcgggcatctacaccgctgccgctcctctcttctccgagccgcagctcttctctctccttctcccctgcgcgccgccgctgcgtggccctacacgccaccgctacgggtgccctacgcgccgccgtcactgctccagctctcctctgtttcccagccaatgccgccgctctaactccccaaggcatcgccccgacgacggctcaacgacgccccgtcgacgcctcgcggacgccctgcgccgcagcgggcgctttacgctccatggcaaggcgcgttagatgcctcaggttccacgcgcgccttagcccctaagcgacgctaaggcggcgcttcaaggacgccttgataagcatgattgggaggttatctatgcttatagcttttgctctggggtgaaaacatggattacgactttggtggcacctcacccgatccctatgggggtggaagcatccacctagtgtgtgatcattgcggtaccagtgacaactacaccactgacgacgctgatgatggccaattcacgtgccgtacatgctctgccgtgcacactacacaggcaactgctgctgatcctcatgacttccccgccactggcaacatctctgtccgtcgtgttgccacccagcccacccccaagcttggtgcccgcacacccgcgccttacctgaggacccctcaggctgctcccgtgcctgctactgccgcttttgatgacttcacagagctgagtgagccgcgggactttgtgtctggatctggcacgtgtggggagcctgaggatctggcagtgcaggtccgctggcgctatgtacggggtctccaggtgatcctgcagcggcagctggaggtgctggtggagcggcaccaggtgcttgaggaccacaaggccgtggggagacagaagtgttatgatgacaagaaacctgatgagatgaagtatgaatgggatgatgatatgtcgctccaacgaaaagacaggcacaagctggagtttgcctttttgcgttcgttgaggatgatgctgccggtttactcaacattggctgtttgtttcttggcctgtcatattgcccgtgaagccatcttgccaagtgacatttacaggtgggcaatggaggggaatatcccatatgtggctgcttttactgaagtagacaggttccttgggagctctttccaagactgccctttggatgcaaggcagctgttcaggccggtgcgagttatcggagcatggcaactggaagctgcagctggatccatagcacaaagagtagccttgaggcttccttcagttaacttctatgcaattgctcaacgttgtttgaaggacttgttactgcctatagatagaatcctcccccacgcatgccaaatttatgagtgggcaatgcctgcagaattatggttgtctagtaatcctgctagagtcccaacacgggtttgtgtgatggctatcctaattgtggccctacgacttctttataacatcaacggtcaagggatatgggagaagatttgtgaggaaggaagaaacccaagtgaatctcactatgatgcaaattcatctacttccaggaagcttgaggctagtaacagtgaggagtttggcacaagagaactgttgtgtgctatttcagttgcctatgataaaatcaatacgtcacatgactactcgagtgatctccgctcttatctcaaatactgcaaggaagttgtttttgctggaattacatcttcagatgaacagactcatctaatagagatcttttgggatatgtacaaagccagggaggatgataatatagaagatcatgtaaaatcccagtcccattctatggcagacattccaattacaaatggagtgaggaaacactaccgagatggagcttttgttaaagcaagttccttttctgcatcttcaggtcatgatgcaatgcaaatgctcaagtcagagatgcaagatcatggatttcattatatgccacctaggaaaccaaggaaatcagatggttatcttcgttataggcggcggcggctaagtggtggctttatttttgttgcacatgctgattattacttgttgctacgtgcttttgcaaagcttgcagaaattgatattcgtatcatgcatattagtgtgttgaaacttgagaagagactcgcatgtattgaggagcgaattgaaagaagcttgaacaccttacataacttttctactggaacagtagatgagctaagatctgtatctgactgaagttcctagtgtagtctcatactctgctagcatggaataccccctccattccttctggaaaaaaacatgtggtgccattgcgtaactgtggttttgaagaatatacgtagcttgatacctcaggaattgagggcttctttctgtggcctcttggcattggtaagcaacctgagcacaaggacagggcaggatgtgggtctgtatttgctgaagcaatatgtaccaagaattatgccccccttctttagaacggacataattatatcagggtcctaatcagtactgtggtagattcagcaacagttccagtagtagacctcagtgcttggcagcaatggcactggggatctgcaatcatgaggcagtttcagtttgggaactggagtggcaagaggaaaaaggctggaacctgggctttttaaagaggctaatcagtactgtggtggattcagcaacagttccagtagtagacctcactgcgcggcagcaatggcactaagggatctgggttctgcaatcatgcggcagtttcagtttgggaactggagtggcaagaggaaaaagcatggaatttaggctttttaaagaaatgctatcagtattgtggtcgattcagcaacagttccagtagtggattcagcaacagttcaaggttagtacaattggtcttgtcaaagctgccgacagaactaaaaagatatccagcatagtgtaatgcatcttgatgtactgccgacatttatttcgttccagcttctgcagcaagagctgatcgtttcaaaggtgacgagaaattggtcgtactagagatgtactgtctattcgctgtatttgcaagtttaaaccaattattcgaactactgcagctgtaatccagagacaatataatatagaaaaaatagaagtcggtggttaaagccgtaacaaacatgctaacaaacatgctagtaggcttcaattgttaagggcttctttgtttcagcttttttgatgaacttttatgagaatctaactatggtgaaaatctgagtatcatgtgtattacatgcgtagaaagataaaa

SEQ ID NO: 33872 - DNA, 1012 bp, Zea Mays
cttcatatcctactgcgaatctattctatcctcacattgtggatataaaaattgcattgagggcagcaatggtctccaataatttgaatttgagaacaatgggtaatgctatgatggaaaagtttaacaagtattgggaagaaaagaataatgttatggtgattgctactattcttgatccaaggtataaaatgagatttattgagtggtgcttcaataagatatttgatgaacatcaagttttgtttgaattagaagatgttcgtagtgagttagaaaaactttatggggattttgaggtgcagcatagagagagaaaagagtctcaaagcaaatctaatgcttcctcatctttgagtattgaaagatcatgtagtttgccatccgcttcatgtcaatttcagtctttcttgtcatcaactcagtctaacccatcaaagagcgagttgcttatctatttggaggagactaatgtgtgtttatcggacaaagagtttgatttgctgaattggtggaaggttaattcacatagatttccagtggtgtcgagaatggcaaagaaattcctaactataccggcgacatcagtgtcttcggagtctacttttagcacgggaggtagaactcttgatgattatcgtagttctctaaggccttcaatggtggaggcattggtatgctcttctagctggatccgaggaacacatgatggaagcatgatatatgtggaagaagatgatgaggacaatgttgagaacattctatttccaaaaagcttggtggaaagcaactaaatttggaagaattggatggagacaagtaaacaaagtcaagactcaagagaaaagatgcatcatttgaattaattttgtcgttgaaactttgagatactgaatattttgagcttatcaatggattatgcattgctcttgtatactttgagatactgctgctggtttaaaatgtcttattgtatgttttgaggagtagcgtatcttcttgtatgttttga

SEQ ID NO: 33873 - DNA, 1657 bp, Zea Mays
gtagtggggtacttgcactggtctgagttgcacaccggtaagagagattcctgaacaaggtgtattccgtcagtgttgagactgttctcaggggaggatatagtcaagtcatggaccatcactccttgacagttgtcaaacttaagatgacactgtgagctgttgacaatagtgataccagccactacaacgttgaaactaccataaaacctcaatgcctgcatcaggtttaatctgtggcattctttcaaactccacatcgtactgcaggaaagcatccaaagtccaccattgttgccctctgccatttataatgccgttcccttgaataaccattccatttagtttggtgaactcgagccactggagcaagcctgaaccccaggatttagcactggttggagctaggattgttccttccagctgcaaataaggcccagagaacgagattggcccaactaggaactctagttctggtggtacgagaactgtacatgccccctttttgcaggcagcagcccacgctccttcaaaagcctgtatgcaaatgcacgtacaattattagctctagatttctgaaaagacaatccctggaatctagcatcacaaaaaataactgagagtccagacccctaagcagggtaatcagctgttgcactcttgtcttatatctttttggtcgctgtgccaaaacaagaatcagtttgtgaccccccaccccacccccaccacacacgaaggatttgaaaaaaacgaagttaatttacttgagatattaaaaaatctataggattgatagagctttcagataatgagacaacgcatactggaaaatatcgttaagtatggcttatttcttgttaacctggtacaaaacttccatgaactttctatttcgctttgctgtaagaacaaaaaaatatggtgttattggtgcatgcagtgtgctgttgcaaaagaaagaaagttgtgctctgttaatgtcatagagagggagttcgctattctcttatctgtaaagcctgagaatcacaatattacaattgggtttgtttgttttctctgtacacagaaacgtcttgtaagagctgtggaaagggttctgcattatgtgtattctgacttgcttggtgtactttgttctcttccatggcttaaaaaataaaaaataaacttggccaggctggtgtgtctatgccgctatatgccacaatcatgtgagacggaaagaacaagacaaagcagggaacagatcgaaacaaatgcaaataagactgcagaaacgtatggtgcccgtgacaacttttcgggctttctactgcaaatcatgtgagaaagtgagagtaaaactggtatggtcataggcaccttcaaacgctcactatcataagctgtggtggttctggcaaatgaattcatggtgcattccagtttctaagaattctggagagagagagagagagaaaaatacgcatggccaattggaatctcaagatgtcattgggacgacaggtcccctggatggatgtgattgacatcactgagttctcatgcaagtcatgtaaagatcagtttgaaacagagcatgtgaagcccaaacccacaaaagggattgcaatttgagatttctggctcaaagaatgcatgatgcttgac

SEQ ID NO: 33874 - DNA, 2691 bp, Zea Mays
gatgtctcgcgaagttcacgccgcagaggatccgaacaagttcaagcgcgcttcgtccaatggcttctccctcgtacaggaggaacagtcctatgaacgcatccgcgggcaccacgaaaagtccaaatccatccgccccagcaccggaacgcagctagtcaatcaaaagcacaaaaagcccaccaccactccgcaagtccgcaaagatcaaacccaagaaatctgagcaccagctacgctgctaattattccatcccatccatctctctccatctatccaaatattccatttaatttcttttcctcgctgctcagcagcagctgccgccgcacaaacacaaaacacactccactctgccacggaagaaaacaaaagaaatacaaagcctgagcgaaaagggaaggcggggtttggtttttattagctgcacacaatggcagcagcgatccaaacccaatccccagcgccgcagcgcgtgggtaataatcgtcccagttcgagcagttgcccttcccgttgctgttcctggcttgcggcttccccaatctctcctccacatccctatccttgccctcttcttcttcgtcgccttttacccacccatccgtcgcggcggtgttcgtggtgttcaagttattgtttgtgtcagtgttcctttcctcctcccggttcggtcatcggtgctggtattcttcgccacggagatccggccacacatcgattcgccttctttttcctcgctccgcgacgcggggtacaatatcgactggactgcgaggcatttggtgcgggcaggcgctacgaggtggggcgacaaaagttgtgaagtttatgcgccttgctttgcagaaggtgctcggatctaggtttccaggccgtcgatcgccgccatggacgccggcagggacggggacggtgccgggaaggcgccgccgaagggccccgccgatgccacgaccgtgcctccggcgccagtggcggcttctgcgcctgggtcgagcgcggggacctcagggtcgggggagaagccggtgaagcgggtgatgaaaaccccctaccagctcgaggttctggagtacacctatgcggtggagcattatccgtccgaagctaagcggctggagctgtcagcgaagatagggctttcggacaggcagctgcaaatgtggttctgccaccgccgcctcaaggaccgcaagccaccatcgaagcggcaacggcgggatgaagagtccgcactagcaccagtgatgcctccaccgccggtgttaccagcacctgtgatgccagtggcaagcagtgaccttatggtgggcgctcctgggccgtatgataagctgctgcagccggttcacttgcgaaggggtgctgggcggtcctcagcagtccctaggatttccatgccggatctcgggaggaggtattatgagccaccaccagttatgataacgccgttgatgcagctcacacaatatgagctccgtgtgattaattctgtggagtcacagctcggggaaccgttgagggaggatggtccagcacttggcattaattttgatccccttcctcctggcgcctttggtgcaccgattgttccagagcaacaaaagcagcctgtgcaatcttatgatacagatatattttctaggcatgatcaaaagctcttaaaggcttcagcatttttacctactatagaatccccatttgttccaaattcgtttaccgggaagagaaaatcaactgttggtaattctcccgtagtccaacctcatgttggatcacgggctgtccatgagtaccagttccttcctgagcaaccaagtgatacatatgagagggcaagtcctcactactatgacactccagtggaagcttcaaattccaggataccttctctcacatcaggatcacaacttctccatggatctgaggaggctgcgcctagttatgcttttcaaggtcacacatctggttctagcctgttgcctccttccagcaggccccaggtgtttccagtagcaccaacagattatgagatgacccagtttaatagcaaccttagttctgttcctgttgaaggccagtttgatacgtctcaggttgctgcatttgaagacccacctgtatcgtctgaaagaagagcttatcatgatgaagatacttctcgagtggaaagaaaacgaaaacataatgaagaagcaaagattgcaaaagaagttgaagctcacgaaagacgaattaggaaggagcttgagaaacaagattttttgaatagaaagagagaggagcaaaggcacaaggaaatggagagacttgagcgtgagagaagaaaagaagaggagagattactgcgtgagaggcagagagaagaagagaggttccaaagagagcaaagacgtgaaaatgagcgcatggagaagtttttgcagaagcaatctagacgagaagagaaacaaagacaaaaggagcaactccgaaaagagaaagaggcagcaaggcaaaaggctgccaatgaaagggctgctgcacgtagaattgcacgggactatatggaactggtggaagatgagcgtttggaattaatggaattagctgcacaaaacaaagggttgccctcaatgctgtatcttgacagcgacacattacagcagcttgattcttttcgagaagtaatatttcatttcaaatga

SEQ ID NO: 33875 - DNA, 3187 bp, Zea Mays
acacgaggctccagggcctccatcgccacaccggtgcgtgcgagcgcgattaccagaggcgggcggcagggacgatgctgctgcaaaggcgcggcggcctcctctgctgcgggtgcggcgccagcgccgtggccgtggccgtcagtggccgcgttccggaagacgacggcggtgccgtcgtcgatggccagccgcctgacgccaagagcgtgtctggtaccagtgtctccgctgccgtgacgaccgcaaacgcgaggcagctctcgtgggcgcaggtggaggccatgacgggaggcttcacgtcagccatcgtcggcgagggcggcttcagcaccgtttacctcgcccgcctcgctggctccctcgccgccgtgaaggtccatcgtagtagcgagcgtcttcatcgcgcgttccgccaggagctcgacgcgctcctccgcgttcgccatccccacatcgtccgcctcctcgccttctgcgaccagcgagacgaaggcgtgctggtgctagagttcgcgccgaacggcagcctgcacgagcagctccacggcggcggcgcgggcgcggcgccgatgccgtgggcgcggcgggtgccggtggcgctgcaggtggcccgcgccctggagtacctccacgagcggtgcgagccgcaggtggtgcacggcgacgtgaaggcgtcgaacgtgctgctggacgcgggcatgggcgccaggctgtgcgacttcgggtcggcgcgcgcggggttctcggcggccgtggccgttgccgctgcaggcccgcgcccgcgcgccgtgttcgggtccccgggctacgtcgacccgcactacctccgctccggcgtgagtccagcagatagaagcagtcaaccagcagcagcccaagtcaagcctcctcgcgtgtccctcggctcccacgcccacaccgaaatttcccccacggagctcaactgccggtgccggcgcgcgacaggcggcacacacgcccgctcctcgcgtatggcgaccacgttgacgcccacgcagcgctatgcggcggggacgctcctggcgctggcgctccgccaggcgcagatccaccagtccgagcccctcggctccggccccgacgacgaggagcgcgccagcagcgccagcgggagctcctcctccaccatatccagcaccggctccgacactacctcgggcgccggcctctggacgcacgattcccgcggcctcctccgccccgtcttcaggttcctggagatcgagcccaaggcatgggcggggatggaggagacggccgcgtcgccggacgccgccaagcatcacatcggtgcgtttataagcatactctttgaggaagacggcgagagctcttcagacaggctagagcaggagatcgcattggcgaaagcagttgatgtgatggtcatgagcttgggcagcgacactgcaccagatgagaatatcaaagacgagtttaaatactccacggcctgtacctatgcgaccttggagtctacggaggcaggctcatccgagaacttgcttggaatcgtcaagctgtccttggaaaatgttcctgtgaatgagcaccgcaagatggtgttgctgtatgcgcttctctctgcatgtatcgctgataagcctgtatcgcaagaggaagaggacaggaagtcgtctcacttcaggaagggctatgatgctcggcatcgtgttgctcttcggttgatagcagcatggcttgacgtcaagtggatcaaaatggaagctatggaggtgatggtcgcatgctctgccatggctgcggcaaaagaacaagaacaagagcgtgaaaatgcatcaccaagaagcaagtgggagaaatggaagcgtgggggaattattggtgccgctgccttgactggtggagcgttgctggctattactgggggtttagctgcaccagccattgctgcaggatttggtgctctagctccaacactgggcacacttgtccctttcataggggctagtggatttgctgctatggctgctgcggcaggatctgttgctggctctgtggcagttgctgcctcatttggagctgctggggctggcttgacgggtaccaaaatggcaagacgaattggtaaagtgaaagaatttgagttcaaacctattggtgataaccataatcagggtcgccttgctgttggcatcttggtttctggatttgcttttgatgaggaggatttctggaaaccttgggaaggatggaaggataacctagagaagtacatccttcaatgggagtccaagcacataattgcagtgagtacagcaatacaggattggctgacatcaaggcttgcaatggaattgatgaaacaaggtgctatgagaactgtcttaagtggccttcttgcagcatttgcttggcctgctacgttgcttgccgctacagattttattgatagtaaatggtctgttgctatcgacagatcagataaggcaggaaaaatgcttgcagaagtgcttcttaagggactgcaaggaaacaggcctgtgactcttgttgggttctcgcttggagcgcgagtcatattcaagtgcttacaggagctagctttatcaagcgacaatgagggacttgtcgagagggttgtactccttggtgcacccgtttcagtgaaaggtgagaggtgggagcctgccaggaagatggttgcagggagatttgtgaatgtgtactcgagagatgactggattctcggtgtaaccttccgagcaagcctgcttacccaaggactggctggcatccaggccattgatgtgcctggtgttgagaacgtggatgttaccgggcttgttgatggccattcttcgtacctgtcagctgcccagcagatcctggagcaccttgaactgaatacctactatcctgtttttgttccccttccggaggtcaacaaataacagatgtagataggttgacaatagcagagaaaagatgtaaatatcagggaggaatataccttcgaatttacacaaaaaatgttacagctgtctagatgatgaatgctttgtagtttcttggtgactaatcctaatcgtacagtagctctagttacgtgtagatatctattgtgtacatagtaaaaacaaaacaataccgtctattgtgatcgcaagaaaagcttgaatctagaatagggaagtactcc

SEQ ID NO: 33876 - DNA, 1151 bp, Zea Mays
ataatatcgtgacatcgtctgtccgccaccgggtatctctttctccgggtagtgcaccagcggaacggcgaggtgcagtcgtgcagacgggaacggggatgggaagcacaggggcgctgctttggcacccgtcgccgcaggtgcactccggtggcgtcctcttccgccagagccggcgcatcgtacgccagcgcaacttgcctctattatcgctagctgacgcggcgcttgagcccgagcgccgccgcgggcagcgcctccgctgcgctgccggcgacggggacggcgggccccgggaggctcagaaggagtctccgagcggcatcggcgcagcactcgaggatccgtctccaggacctcctgtggaaaacggttccttcagaagcccctcacaggaagaacagagtgctctgtataattttctctatccaagcaaagacttacttccagatgataaggagatgagtatatttgatcatctggaggagcttcgcgagaggattttcatctcagttttggctgttggggctgcgatactaggctgttttgctttttcaaaagatctggttctttttctagaggcaccagtgactgttcagggtgttcggtttttgcagctctcgcctggggaatttttctttacaacattaaaggtttcaggttattgtggccttttacttggaagtcctatcattttatatgagatcattgcatttgttatcccagatggggcagtggaatcgttgtggtcaatagaccagtacttcgaattcatacttgtgctgatgtttagcacagggttgtcctttcaggtccctgttatccagcttctgctaggacaacttggattggtttctagtgaccaaatgctttcgatctggagatatgttgttgttggcgctgtcgtcgctgctgctgtgcttacaccttcgacggatccgttgacacaaatgttgttggctggtcctttgcttggtttgtacttgggtggcgcatggatggtcaagctaactgggcgataagtgagtggttcatgcaaggcaatgatgctccgggaagcaagagcgccactgtaacctagtcttgtaaaaatgaattcactctgttcatcagatgatattgttaccatttctctttctgaaaaaaataag

SEQ ID NO: 33877 - DNA, 204 bp, Zea Mays
ctagcttctgttaggctggcgcctagtgactgttttcgtgcgctccttcggcgttccatgttcttgcagcgcggcggtggcctgctgccctgccggcctctcacctccagcactccatcctcctgctcagctgctcctgttcgttggccccgttgctgcgttgttgcccttgggccagccagccagcacgccaaggagcaacag

SEQ ID NO: 33878 - DNA, 1117 bp, Zea Mays
caatgactcctgtacgcatcatcccggatccgagaggcaccaactcactctttctacgcccttccctccgcctccttcctctccaagaaaaagtaagcgtggagagcaaaaatctccgccgccgcgcacctacgcccacggaacacgccgtcatatgagtggagagagaaccccgcgcctcctcctccgtgagctccgtacaaggaggctagagcggcggcagcatcggaggggtcggtgaggagggcgatggtgctcccgctggtgaagctcggctcgctcgcgttccggacgctgagcaagcccatcgcggcccgcctcaagtacaacgccggcatccaccccaagttccgcggtctcatcatcggcatcgcgcaggcaaaccatcgtttcacgacaaatatgcagaggcgactttacggacgtgcgactgacattcacattcggcccctgaatgaggagaaagctattcaagctgccgcagatcttctcggtgaactatttgttttctcggtcgctggtgctgcgattatctatgaggtgcaaagaagtgctaggtcagaagccagaaaagaggaggcccgtcgtctggaaattgagaaaagggaggagcaactagcgctggaagtacagataatgaaacacaagattagcgagatggagcggcagtactcgaagtggacccttcccgggcttcgcggcttcggcactgcccaggcggcggcacagcctgctggtactcagcacccaacagctgcgtgattgctctacttctgcaactgtcgacagctcgcgatctggatggccgactgcagactgcctctgtttagcttgcattttactccgttacataattgattcgacttcagtagctggcgaaaggctgagggttacgttgtggtacaactgaatcgaagttgttatcgccttataggttgatcggatcggcgacatgacattcagaccatgtttgtcgtagcttaacttatttcacagcttcttcatagatttaagcaggagatagatttaaatagaagtaccaaacagtagcttctgcaacagtctccccttttagtcgtagcttaacttatttcacagatttgtcgtagcttaactt

SEQ ID NO: 33879 - DNA, 194 bp, Zea Mays
atgagtttttccttccaaacagtaaacgcggccctggatttgattaaatgtgggactgctaaagaagcagaccttgatttggtgttggtggaggttaatcttaacaatatggcactagacacttcggcaaactctgatctgttccatcacatactgaatgaacttcaagcccctcttattgcaatgtgttcttg

SEQ ID NO: 33880 - DNA, 2319 bp, Zea Mays
tgtatctctccactctccttctctgcctctctccctctccgcctacctctccttccctaccgtctcctgccactgcgcccctccaatagcgttgtcccttgccctcgcgcgccccgtgctcttcgtcgtcttcgccagcccaggtggcaggaagctacccatagccagcctcgtcttctcggccaaatccttcttcggtgcaccgctggccgccacctcggcctccgtcgctttgtcgctcctgtgccagtggctgcctccagctcgctcgaggtcgtcgctacggggaagaaggggcctttccgaccaaatccttctttggcgcgccactggccgccaccgcggcctccgtcgcgttgccactcccgcgacaaccggccgcctccaactcgcttgaggtcatcgcagcggggaagaaggggctttcccagccagatccttctttgacgtgccgctggccaccaccgcgccctccatcgcatcgccactcccgctagctcgaggtcgtcacaatggggaagaagggctgcaagatgaagacacacaagcgatttcgggtgacaaggaaggacaagatcatgcggcggtgcgctgggaagcaacacttgctcgccaagaaaaacaccaagcgcaagaagagactctccaagatggagatgttcgccgatctgtgggccaaaggcttcagtttgctaggattcatctgctttagctcaattgggatggccagatatgcggataccaatcttatacaccttatcatggccagatagaatctatcgccctagctcaatttgttaaatctgtctagatatttgcaagcatgacatcttcacaactcctgggctacttttacaggacatctgatgcttttatttggaaatgacctccaagaattcaggtcttattttttattacagtatggggttgttctaataagctactggcatatgatggtaatacttgataaattcgtatggatgagggaaacctaagtcagctgttggtatgtgcatctgtgattaaatctgatgggtttttaatcagaaaaattatgacaaccatcttataaattttaggaaatagatatattattgtacttaaaactaaattttctgaacagctcatcaaacttggaccttgacctaaactcatttcaattttggtgtcattttgaatagttatatgtacgagttgagttggataccatggtaaggttgctaaacatgaatatgctttcgaaaaaaggatgttaagtaacttagtgactctgcttaacactgtaggatttgaggctgccatagtatgctctctgaccgtgctaacgggaggaaggagatgatttaagttctccatgtttataaccagaaagaggaggatagtccaatcatggtaactaaatagtaggtagtaatgtttcacggtaaatcacagttctcgaatgcgatatgatctttgactcggagtattgaagactaatttagtttgagtttgagattagttgtttttgtcattaataaactcacattagcgtctggttacgagctcactactagattttagatctccatttttggtgtacttctgctgcatgtgcctcccatagttgcggatttgcaggtatcacctgattccttttgatttttggattgagatacagtaaaagttatctttgcctgtttccaccacactgtatcatacaggtaaacatgaatacaaggctggcttgatctggcaagtgctcgccattctatgggcccatcacacttttcgagtacactgtttgatcatgaagagcagtctgctgccactaaacttgaggttgttgatcatgattgtctgaaaatttatcggggatatgccttgggatggagaaatgtcacagaacacaggatgaagacgattccaagaatccacccatgtcagaagacgccttcacatcacggagtagagctctcagcaacaacagtgcaacgatgtttggacttttgttcacatatgggagtgtttaaactcctgcacctagatttagaaacaccaccatgtaaaatagacaaggcggtgcttttgcaaacatgatgctgccacgagacccgaacttatgtatggccaaacatgttaacatattttgtatgtcatgggctgttccagaaacattctgaaatacacggttccttctaaattctatattttgtcttgatagaacgcccgtaaaagtgcttcaatgttctagtttacatgaaaggtatatagcaatttactcaagaattctattgtctctataggacggctccacttattctagtaaaataaaaaaaa

SEQ ID NO: 33881 - DNA, 3772 bp, Zea Mays
tacgaacccttggcatgttgagggccagattcaaatcaattccagaagctttcagtcaatgcaatgcgataaaacagcgagagcaagcatttgagcacagaagcttctttcgtgtttggaattcattcatcaattccttaagagaggaagacttcattagtgatagagagaaggacatgttgatggctccgtcatattcaagcaatttatccatcattcagtggccacctttcctccttgctagcaaggtacccgcagctgttcatatggccatgaattccaaagaaggggatgagcatgagcttattgagaaaatcaaacttgatggagacagatatgatgcagttatagaatgctacaaatccttgatgattatactcaatagccttctgctagacactaatgatcagaatattgtcaatgatattgataaaaaagtgacttatagcatgataaaaaaaactttcttggaagacttcgaaatggcagaaatcggcaaaaaaagtgaacctattaatgatgttggagagaggaaaattgttaatgccctgcaagactttatggaaattacgacacgtgatttcatgaaagatggacagagtttcaaagatgaggatgagagaaatcaaagattcatgaacctaaatatgaatatgataaaggaagattattggagggagaagtttgtccggctgcacttattgttgactatgaaggattctgcaatggatgttccaataaacttggatgctcgccgtaggatcaccttctttgcaaactcgctttttatgaaaatgccaagagcaccacgcgtgcatgatatgatttcatttagtgttctgacaccatactacaacgaagaagtactgtattcatcacatgacctgaatagaaaaaatgaagatggtatctcaattttgttctacctacaaaagatctatccagatgaatggaataacttcctagaacgtattggagttgaatcaaataatgaagtgtcgataaaagggcgcatggatgacatccgtttatgggcatcttaccgtggtcaaacacttgccagaactgtgagaggaatgatgtactatagacgagctcttgaactacaatgctatgaagatatgataaatgaccaaggttatggcctagctgatttggatacagctaaagctgcaaggtccaaggccattgctgatattaaattcacttatgttgtctcctgtcaactttatggcgtgcataagacatccaaggattcccgagaaagaggtctctacgagaatatcttaaacctcatgttgacgtatccagcattgcgcattgcttacatcgatgagaaagaagtacaattacgaaatggtaaaatagagaaacagtattactctgttcttgtgaaaggtgatgatgaggaaatctaccggataaggctccctggtaaaccaacagaagttggagaaggcaagcctaataatcaaaatcatgccataatcttcactagaggagaagcacttcaagcaattgacatgaaccaggataactatctagaggaagcatttaaaatgagaaatctcttggaagagttccttcttacacatggaaagtcagagcccaccatattgggtgttcgggagcatatatttacaggaagtgtttcatccctcgcctggtttatgtccagccaggagaccagcttcgtcactattggacaacgtgttcttgccaaccctcttaaggtacgatttcattatggccatcctgatgtttttgatagactctttcatctgacaaggggtggcataagcaaggcatcaaagattatcaaccttagcgaagatatatttgcaggtttcaattcaactctgcgtcgaggaaatgttacacatcatgaatacatacagttgggcaaaggacgtgatgttggaatgaaccaaatatccaactttgaggccaaggtggcaaatggaaatggtgaacaaacactatgccgtgatatttatcgactaggacacagatttgatttctacaggatgctatctctgtattttaccacagttggcttctacttcaatagcatggtggctgttctcacagtgtatgtatttttatatgggaggttataccttgttttgagtggcttagaaaagtcaatactgcaagatccaaatatccaaaacataaaaccatttgaaaatgcacttgccactcaatctgtattccaacttgggatgttgctcgttctcccaatgatgatggagattggccttgagaaaggatttggcagagcattggcagagtttgtaatcatgcaacttcagttagcttctgtattcttcacttttcatcttggaacaaagactcactactatggcaggacgatacttcatggtggagcaaagtatagagctactgggagagggtttgttgtgcgtcatgcaaagttcgctgagaattatcggatgtactcccggagtcactttgtcaaagcactggagctgcttattcttttggttgtctacctagcttatgggagttcatacagaagctcaagtttgtatttgtatgtcacagtttcgatatggttccttgttttctgttggctgtttgcaccttttgtcttcaacccatcctgctttgagtggcacaagactgttgatgactggaatgactggtggaagtggatgggcaatagaggtggtattggattagcgcctgaacaaagttgggaggcttggtgggtgagtgaacatgaccacctgaggaatgcaacaattcgaagcttgctcttggagttcatcctttccctgcggttcttgatctatcagtatggtattgtttaccacttgcacatagtgcatggcaacaaaagcttcttggtatatgcactgtcatggctggttatagcagttgctcttgtgtcactaaaggttgtttcaatggggagagagaagtttgttacaaggattcaactagtgttccgcatcctcaagggcattgtgttccttgtgctcattggtttgcttgtccttttatttgttggttttgaccttgctgtctcggatgttggcgccagtatcttggcattcattcccactggctggtttattcttctggttgcgcaattatgtggaccgctgtttcggaggttgatcatagagccacttcacttgctgtgttgcccatatggtaccggtggtgcatgcagaggtccctgctgtgccaggttcagacagaggaccggtgctgcgcttcggaagatgggaccatgggactccatccaggagatggcgaggatgtacgaatacaccatggggctcctcattttcctgcccattgccgtgctatcgtggttccccttcgtctctgaattccagacacggctgctcttcaaccaggccttcagcagggggctgcagatctctaggatcctcgcggggcagaatggtagcggcacaaagagcgactgatgctttgacattaacggagttatccattccgttgtgccatgtggtatctcgttgctattgtccgctaccgttatgtgtagaatcaagtatgttcatcgtttgaaaaagtgtcgcgcagtttgagtgtgtatgtcggattttaacctcttaattcagttcatattcattggttgtttccatttgatttgcacgtatacgttggaatctgtctgattttcggtgttaaaagtaagtgtttgtttttagctagaactttctctactcctttaaagcaccaattttatatgtcatgctttgcgtacgaagca

SEQ ID NO: 33882 - DNA, 5086 bp, Zea Mays
cccctccccactttgcccgtttggcaacgatgtttttggttttggagggaagttgcgcgccacctaatttcaggagcccccgacaccaaaacccccctgctaggctgctcgcctgctcccaattcccacctccattgcttcaaacgcggcgagatcggaggccaaagccgcggccaaacaaggctgtctggggtctcaaaccgaaggcccaagcggcgcgcctcgacaccccggctcccctccgcccaatcgcctcccggcccccgcgcagcgtggcgcgttaggtctccgccgcctacctctgtatgcaacaagaagctgccagcatccactccaccacctgccctctatcaccgtcattgtctactgcacggatcttgatgaagacaagtgatatactttgatgttagaatcctccacaagattaataaccaatccctcttcggtagttcattagaatggagtgcaacaaggaagaagcttcaagagctaaggatttagctttggtaaagctgcaagaagcagactatgctggtgctaaaaggattgccctcaaggctcaaaagcttttctctggccttgaaaatatttctcagctgttaactgtttgtgaagttcactgctgtgctgctattaagatcaacggggagactgactggtatagtgtccttcaagtagaaacaactgcagatgacatattactcaaaaaacagtaccgcaaacttgctctcttactccatccagataagaacaagtttgtgggtgctgaagctgcctttaagctaattggagaagctcacatgatactgacagacaaagtaaaacgttcacgtcatgactcaaaaaggaacccagttattccaaaatctgcaccaaagaagcgtggacgaccatcaaaggaaactgattatgttgctaagagggccaataaggaaaatactgatgctgtatattcaactttctggaccatttgcaccacttgtggaaccaaataccagtacccatatagtttgttgatgaaagttctcttgtgccaggtctgctcaaagagtttctttgcttatgatttgtctaagaaaccgtttgtcagagtggatgcatcaaatccatggagtggaattgggatgcgacacaaaatgtttcccaaccaacaacacaattaccagagtgttcctactcagcaaaatcctgtcactggtcgtcaaactcctgtccccgaccagaaacagcaacctcggaatgtctctggtaagcaaactccaggcattaaccagcaacaacgatcacagaaattccctttcagttcaaggccaaagaatgtggtaaattctcatccatggggtggatttggtaggcaacaggaaatgtgtcctctgagtcaacccacacatgtatctgaccaaaaaccctactatcaaagggcccctggccagcaaaaccctgtcaatggtcatcaaactcttgtcactgaccatcaacagcattctctgaatacccagcaacaatctacaaaccccccttgcaatccaggatcaaagaatgtagtgaattctcaaggggcagccttccagaatagtaatgcaactgcaaacagtaaccttacggatgaagctggggcttgtaatagagaaaagattacaaggccatcattcaatgatgaagatagaactaaatcacaggttgcaaattctgataaagttcatctagtaaacaagcaaatgaagggaaacaaggtagctacaggatccagtcatcctgttgccataaatggtagccaagttgctaggaaagatgttcttactgccgcatgtgcagataaaacatctgggcagcatccttgtatagcaagccagcagagaaatagtgtcattgttgaagatgggtctgatggttgtggaaaggttagtgatcatcttcctaactcttcgacaaagaaaaggataagaaaagaccattcttcctatactgctggcaaaagtgatcatacaacagaaaatgaagttgctgaagcaaacagccaacacaaatatagtattccaagcaaagagaagataacaaatgaaaaagaagtgatcagtggattaaatcttgatgtgttgcaaggaacaaaaagaaaacaacaaacaagttctggaagtggaagtgatgctgctgctaaatctgtaaaccatagtattccctgcaatgttacagtttcatgtccagatccagacttctacgactttgagaaaaatagggatgcagatcgattcacagttgatcagatatgggcagtttatgatgatcttgaaggcatgccaagatactatgctcgaattaagcaggtctactctccaaacttcatgttgcagttcacatggctagagtatgatcctttgtgtgatgctgagaaggaatggtcttctaaggagctgcctgttgcttgtggaaatttcagagttggaagaacactcttgactgaagacactaagatgttttctcatgttgtctcttggacaaaaggaaggaagaggaacagatatgagatttatcctaagaaaggcgaagtctgggcacttttcaggggatgggacatcaactgggtttcagattccgacgatcataggcaccatgattatgatattgttgaaatcacctcagactttgctatgggtttaggcacttatgtgattcccttggtaaagatcaaaggttttgtcagcttatttgttcgatcaagcagtgaagcaccatttctgatacctagtggcaacacccttagtttctcgcacagcatccctttccacaggttggtggaaaatggcaggcaacatatcccaaccggtgctcttgagctggacactgcatcactaccttctgatttggagaaagcgtttactcctgtgaacctcgacaacagttttatgagcaccggaagtggtagcactccatgcaatgtttcatctactagctcctgcgaagtgccggttggaaagaccgaacagactcaggatggtactggtacaggtgtgaaggatggagtcgagaagctgaatcagaatacaaaggtcgaacaagacaacggctcagaagcttcaacgattgatgactgtggcgatgggtggaacgacagctctccgccaggatctccagctgggtttcattaccctgacacggagttttgcagcttcactagcctgagatcattcgacaagttcaagaaagggcaagtttgggcactgtactgcgacaccgacaagttcccaaagtactacggtttggtaaagagcgtcgattcagaagactgcacagtccacataaggtggctggagcactgtccgcgcgaacaagtggaggagcacctggcacaagacggcctgtccattggctgtgggttattcgaagtcagcaggcagagtgagacctacgactgcacagaagtcttctctcacagtgtggaggtgacgggtaaagggaaaagatatgagatccttccgtgtgctggccaggtgtgggctgtatacaaggactggagccgcacatggagcttcgaagattacagtagatgcgagtatcttctggtcgaggtcatggaggtttctgatggtgatataacagtgtcgtgccttactaaagcggagggctttagcactgtgttcatgcaagagcagaacggtaaatccaggagaatagcaaggagtgacttgactatgttctctcatcaggttcctgcctaccgcttgacagacgaaactggcgatctttgtggttactgggagcttgatcctgcgtctttaccggaagttttgctggtcaggaagaccaagtgaaacattgttgagctgatagagaggggttttggcactgtgaaaagtgaagttatgcgctggtgacaaggctgtggtactggattgttgtttatttttggctagttgtaccttgtttcgtgtaaacaggctagtccattagtttgctacctgatgccactatggcaagccttttgctggctcggtctcgctttaggctacgtttcatcatctcacctgtttgtctttgctacgtccattgtggacatttttggtgggtataccagttggtcgcggctgtcgttcgcagcttactagtgtttgcacatggcacgccacctcttcccaccatctcgcttaaaagccgagacagtaattaagcagtcaatcgaccccaacatcacacatcctaatggcggtggcggtggacgcggtggcggctctcttctcgctggtcatggccgtcggggcgccgctgttcgactcgcaggtcgtgctcccgctcagcctctacccggcgccgctggtggacgtgtaccggtggttcgtcgccgagttcgacaactacatcgtggccgaccggccgccgttcttccgcggcctcgtctggctcgacctcgccttcctctggccggtcagcctcgccaacctctacggcatcctcgcgcgccgacgctggtccgccaccacctccctcatggccggtgtccacatgctcacctacctgtccgcaatgtttggggagatgctgggttcagggagagcaacgccgaagctgctcgggttgtacgttctgttccttgtctttgctgtagcttcagttgcgcgtggcctctgctcccgctcagcacaggctacaccggcggcaggtccatcgcctgtacttgctgctccgaagaagagggtttagatacctgatcagggcatgtttgagagtcttgcattgggtccaaaacctctgaaaattacacaatgttcaaaagtttccacgacatggactggattttgctatttgaatggcggtcgacgtgctaaagacatgtgcctggtttgagacgccaagtagaatgagatatggcagtcttccctcttcacggtgatgtagtagtcagaataatcgtagtaggtgttggacaccaaaatgagcggacggtccggcccatgggcccggacggtccgcgtgtcccgagattagattgactcggatgtttatccttatctcgtgcgtggttatccatctaatcacgtgggagtttgttggctatctcttaggaaaaggtccagacctcctcccctataaa

SEQ ID NO: 33883 - DNA, 3262 bp, Zea Mays
taaaaccttatcccaaatcagggctatacatttggccagcaggctgggacgctcagctcccgctcccggacgacgacgatggccttggcgctgcaatggcccctccaattcccactccagctccaggcgcggcctcccgccgttaccgcgggccatcaccgtcgccgccaccgagtcctcgccgtctgccgctccccgccgctcccagctcgctgttgtgccagcgccgccgctgcggccgacacggggaaggcgcagacagcggcgaggagggcttacccattcgatgagatcgagccgaggtggcagcggcactgggaggagcaccgcacgttccgcaccctggacatcggcgaggggctcgacacctccaagcccaagtgctacatcctcgacatgttcccctaccccagtggggctgggttgcatgttgggcacccccttggatacacggcaactgacattctgtcaagattcaagcgcatgaaaggcttcaacgttttgcatccaatgggatgggatgcatttggtcttcctgctgagcagtatgctattcagacgggaacccaccctaagattaccactgaaagaaacattgagcgctttcgcacacagcttaaatcgttgggtttttcatatgattgggatcgtgaaatctccacgacagagccgggttattataaatggacacaatggattttccttcaactgttaaagagaggacttgcttatcaggctgaggtacctgtcaattggtgccctgctcttggaactgtcctggcgaatgaagaagtagtagatggtgtgagcgaacgtggtggctatcctgttatacgaaagccaatgcgccagtggatgctaaggataacatcttatgctgatcgtcttcttgaagatttgaatgatcttgattggcccgagagtatcaaggaaatgcaaagaaactggatagggagatcaaaaggtgctgagcttattttttctgcagttgaccaggaaggacatgacctgggtgccactttattggtttacacaacgaggcctgacacgatttttggtgcaacatatcttgttgtggcacctgagcatgttttactgtcatctctaacatctgaggaacaacgagcacatgtagaggaatacagagaactttcagcaagaaagagtgaactagaaaggactgaacttcagaaggaaaaaactggggttttcagtggttcttatgctaagaacccagcaaccggggaaatcattccaatatgggtggcagattatgttctaggaagctatggcactggggctatcatggcagtgcctgcacatgattctcgcgaccatgaatttgctgtgaaatatgaacttccaatcattaaggttgtaagtccaccgaatggtaattgtgatccagtggaggcatatgaagatgatggcatcatgattaattcatctagttcttcatctggactgaatattaacggaatgctttcccaagatgctgctaagaaagttactgagtggatagagaataatggttttggaaagaaaaaggtaaactacaagcttcgagattggctttttgccagacagcgctattggggtgaacctttccctgtgagctaccttgatgataccaatgaaatggttcctcttacagaagatgacttgcccttgacccttcctgaattggatgatttcactccaactggtactggggagccacctttgaccaaagcaacaaattgggttagaaccattgacccttcatctgggaagcctgcgagaagagaaacaagcaccatgccacaatgggctggatcttgctggtactatttgaggttcatggatcccaaaaactgcagtatattggttgataaggctaaagaaaggtattggggtccagttgacatctacgttggtggtgctgaacattctgtcttgcacttgctttatgcaagattttggcacaaggttctttatgacatgggtgtagtctccactaaagagcccttcaagtgcctgataaatcaaggattgatactaggagaaattgagtatactgcatatagagacaatgaaggcagatgggtttctgcagactcagactcaagtttgattgattgctaccaagaaaaagtagctccagacaaggttacaaaagttggagatcattatgttctgaaggataatccaaacattcgtctgaatgctcgtgcctacaagatgagtaaaagtcgagggaatgtcatcaaccctgatgatgttgtttcagaatatggcgctgattctcttcgcttgtacgaaatgttcatggggccattgagagattcaaagacatggagcactgggggaatcgaaggtgtgcaccgcttccttggacgaacgtggagactcatagttggtccacaattatctgatggatcatataatgatggaaccatgactaccgaagatgaaccaaccttggatcagcttcgagttcttcacagatgtattgcaagggtcacggaggaaattcaggaaacaagatttaacactgcaatatctgcaatgatggagtttgtgaatgctgcatacaagtgggaaacccagccaaaatctgttattgaatcctttgttctgctgctttcacccttcgcgccacacttggctgaggagctttggtttcgcctcggacatccacaatcattggcctatgaacagtttccagaggcaaaaagtgagtacctggaggaatcaaagcttgtactccctgtccaaatcaatggaaagaccaggggtacaatccttgttgacaaagcgtgctctgaggatgatgtttttcaaattgcagcctcggatgagaaactctccaaatatcttgatgggaaaggcatcaggaagaaaatttatgtgcctggaaggatcttgaatgttatcttagatcaacaaaagtcaaggacctgataattgctcttgtttgtccatttatctcgttatgagtcaggaatagagatcaataagacatgacagatctgtaaatttgttttttagcacttgcagtttactgtcaatttgccaacaacaacaacgtcgaacactcgttaggttaatgttaaaatccaacagaaaccgtcagtcaaggttaagcatatggatagttatttttatgcactctttggggtatttgaaactgctctaggttccagcttcagtgtggagctgtagtttacaatacagatttaaatagttttaacaaatatttttaatcaaaataataaacaaa

SEQ ID NO: 33884 - DNA, 1790 bp, Zea Mays
tccatatcccattcatatcctccccgcggcgcgcggccgcgccagcaccacccagcaaccagatgcgcagccgacccgccagtatggcagcggggcccaccccatccgccgcggcggcgtcgttgcggccgccgccgccgtgtttcgactaccgggcggccgtgctcgccgacacgcgcgccgccgccgcagggaaccctgcgctggcggggctgatcgagtccggtgcgctcgtgcgcgtcccgcggcggcggttcggcccggtcccggcgtggcgcccgccagacttcgtggagcctgaggatgtgtggatcctcggcacctcgcacctctcccgggactccgtcgccgacgtggagcgcgtcctccgcgccgtccaacccgacaatgtcgtcgtcgagctctgccggagcagagctggaatcatgtacgcgtccagtgattcttccgacgagccgcttttgaagtccaacatgttctctctcggtggctccaagttcttcggcgcagtcagtagaagcatcaacctgggtgggcagagcgctcttgctctgcgtctgctcctcgctgttttttcgtctaaaattgcttccagtgcgaaccggccgtttggagaagagttccgggcagctaggagggtgtctgaagatattggagctcagcttgttcttggggatcgccccattgaaataactgtatgtggcttattatctacacaatggttttcttcaattgcagatttgtgcactgaacttgcattgctaactctgtaaagtactctactccctccgttccaaatcatatggcattttgacttttctagatacgttacttttattatctatctagacatactgtgtatctaaatacatagcaaaagctacgagtctagaaaaacaaaatatcttataattggaaatggggagtacaactgataaaatagctgaagctcatgtcagattgttcattcagcttgaacgagcatggaaatcccttacatgggatcaaaaggcaaagctactaatctcactgttccgcggaattacttctaagactcacacgccgcaggatgagaaagccgccgtcagcccatacgagttgtacgagaaactgagcacatcttaccctgcactgttgcagcctctcatacatgagcgcgacatgttcctcgcatggtcgctgaagaggagcaaggctgtgaacaagagcagaactgtcgtcggagttgtagggaaggggcacatcaatggcatcgtgtacgcgctgatctctgaccagggggatctgaggttccgagaccttgttggtagagcatcatctgatacatgggtcagctcactcgtcaagggcctggtaagggacactgtaattggtctggtcctttgggctctgtatgaacagctgcaggctgtgctgtagagtagatggttcagacttccacaaggcacacaaactcggtactgttctcaacttcttacaagctgaaacagtggaactgaaatccgataccagcggaaatctaaaacttgttcgaagtgcctgtacatgaacttgatactgtccctgttcttcacaaggttgattacttgattaaagtacctgtacatgaactgtcaactgctgttttatcttctgaatacatctacattggacaacaaaacactacctgtatttttctacttttttgccatttcatatttgggtaaagcaaaaaaaaaagatgcattatgtgtagcacactttatatttgtatatatatgccgggcgaaaagcaatagattttgagaaaa

SEQ ID NO: 33885 - DNA, 343 bp, Zea Mays
gattcttgctaaagcctctccttgattcccaattccagcatacccttgagagtcttttctttagttgggtaagtcttgctaagtaattccatactcagggttttattccctattgtttttcaggttatagtcttgtgctgctgttgatggtgttaagtgtcggtgggctcggccttcttataagtctaagtaactcttctatacttcttattgaggatggtcacttgagctagcatatatttcaaacttatacttttgtaatcactccgaaaaaataatgtaaaatttttgtaacctgtaaaatttggtaataagatttccgctgcaaaaatgttggtatgtg

SEQ ID NO: 33886 - DNA, 5232 bp, Zea Mays
cagcaacacagaagcgtcgctcacatcaacatcacatgttcacatccatcttcgaaccccttcttcctctcttcagcgccgcacccgcgcccgcgccgtcgaaggcggcgcctagtctcgaggcttgcacgctgccgcggaggatcgcctcgctactgcgcgccatcgcctccgatctcctctatctccaatctgctccctcatcgccgtgcagtggaaactaggggaccgattcctcttctcgtttgtcgcatatttctcgctgcgtgccgcgtgctgcggtgagtgattctccaagaattctggggacgctgatctgagtccgcacagaacgcagcggcagcaatgatgatgtcggacgatgacgatgctgagccccagctcaacgcggtggagggctactacttcgttgactccaagaacgagaaggagcctgtctgcttctccaccctgcctttctggttcggggacactgatgatcttcctgacggcaagaagaagctggtgctgcgcgggactggtgacccgggcgtcaaggtgtacgatgaggtggtggcctgcaggctgggtctcgaggggaaacaacccgagtttgcagtgctcacagcaaaaggcagacgttggatacgtctcattaggcccttgaacagctacgaggaaatgatcaggactgtgttgatcacagcgcagatgctgcattttctaaggaggaagcctcatgagccagaaaaaaccttgtggaaccacctttgcaaagtttttaacaagtttgacgttccaccctcagaggacgatttcaggaaccactgctcactgatgaagcagtttgcggcaaaagatcctgtcttagcaaaatcagagattttgcgagtatttattgaaggaaaatctagaaaaaaattcactgaggttggtgcagaccatattgatgtcaagcagccgttcatcactgatgatgagggcatagatgaaatgaatgtggaagatgtcgataatgaatctgatgaagatgacgatgaatatttgtttgattcaatatgtgctatttgtgacgatggaggagacatattatgctgtgatggcccatgtatgcgctctttccatgcaaaagaaggaagtggtgaagactcctgttgtgttacccttggatacactgaggcagaagttgaggcaatgaaattatttctttgcaagaattgtgagtataagcaacaccagtgtttcatctgcggagtgttggaaccttcagatggagaagcagccaaggtgtttttatgtaacaatgctacatgtgggcacttttaccacccgaaatgtgttgcccaacaacttcaccccatcaacattgatgaagcctcagaattggagaagaagataacagaagggttttcatttacatgcccaattcactggtgctttcattgcaaaggtttggaggatagaacacaagaacctttgcaatttgctgtttgcagacgctgtccaaagtcatatcacagaaagtgtttaccaaggttctgttttagaacaagctatttttcttgtttttttaaatactttaagtgtataatctcttattcttcaaatatttggaattatttcacagcgaaatttcctttgacgaaaatgaagaggacgatatcatcatacgggcttgggaattatcaaaaagaattttgatatactgcctggaccatgagattgatagtgaacttgagacacctgtcagagatcatatcaagtttccaaagattgaaaaaccacttcaatttgtaaagaagggatctagcttgttgcctaagaagaaaaagaggacttacagtgagacagttcttgagcaatctcccaaagatactgtgaaaaggaaaagcaaggttcacatgctagaaagggaacaaaacaaacaagacaccagagaagtttctgcaaagagtttcactcaaaaccttgttgacacacctgtaaagaaaaaagccaagttgaaagagaaaatacagttgccgtatgtggccaaggatcattttataagcagtccaaaatctgtgaaagagcaagaacaagagttggtacctttgcccttatctgccatcaggaagagttcatttcctaaagtggacagtgaaactgaaaagaggtgagtcacttgtgtataaagtacttggggaatgaaatctccagatcatatggtatgtaactttatgtgcaaaaattgctagcattcatgaatttcctacaaccagacctgatgaggcattgaaattttgtttgtttgtcaggtctgatgaggcattggattttttttgtttatcatgttgcagaatcctctcctatactcatgttttaatcttaatgccatgtatccacattctgtatgataatgtaaacgatgtttgaagtccgcatactgttatatgactatatgagatcttctatttgcagggtgattaccatattgggaaataaagtgtcttcattgacaataaaagatgtaacgaggaattgcagtttgccatcaactcatgtatactctggcagattgactgacaagataccactgggaaagattgaacgttctgttcaggctgtagaagcagctttaaaaaagctggaaaatggaggtagtgtcaatgatgctaaagcagtatgtgaacctgaagttttaaggcagcttgcaaggtggcatagtaaactcagagtgtatatatcaccttttattcatggcacaaggtacagttcctttggtagacattttacaaaggtggagaaacttgttgagattgttgatagacttcactggtatgtggaaactggtgacatgatagtagatttctgctgtggggcaaatgattttagccgtcttatgaaagaaaaactcgacaaagttcagaagaagtgccatttcaagaattatgatcttatccaaccacagaatcgcttctgctttgaaaagagggattggatgactgtgcagccaaacgagctgcctcatggatcccaactaattatgggtcttaatcctccttttggagtcaaagcaagtcttgcgaacaaatttattgacaaagcattgacattcaagcctaagctcattgtactaattgtccctaaagaaactaaaaggttagatcagaggagaacaccttatgatttgatttgggaggacagtgagtgtctttctggcaagtccttctatttgcctggttctgtggatcttaatgataaaatagttgaagggtggaatgcatctgcgccacccctctatttgtggagtcatcctggttggacaaagaagcacatgcaagtggctgaagagcatggtcatacttgtatggggaagatagcttgccatgttgaagagagtaatctatcagatgacctgtccgtgaggaaacaatctgatgctacaaacaaactgaactcgagatcagggaaagagactccattcaatgacagaatgtccaatctacttgatgatggttctgctaggaagcaagcaagatctgaagaagagaagagaactctagggaagatagaacaccatgtgaaaaaggctaatataccagataacctcccagtgaagaaagaacctgaagcttccagcaaagtcatgtcgcattctggaaaagatagaaagattggcagatacaacaggaggagacatgacaacaggagcagcaaggggacacctgatcacacagagagcctcccccctgaaaagcaagtggaagttgcatatgaggaaacaagagttattcctagcaaaaagattgctcataatgaaaaaaagagcgcgcagtacaactacgagcaaactgcagcagggatgccaaacatgaggtctagaggaggggattctgacatgagtatctcacccccagtcagttgcaatgctcgaagcaaacccatgagctattccctgacgagaccaattgaacacttggatacgaatgctcaccttttggcagaagaacctagtgactctgtgctcaatagggttccaaatcatgacagttatttggcaatcaaagaggaatactgtgatggatttaagaggaaaaatgatcctatcttcagtcacattgatgatagctcaaggatgaggggctccagcatcgaagaagtgaccaagccgtatattactgctccaaacagtgatccgtggtctaaaggagatggcagcttttacaggcatccgagctcagaagatttaaacgctaatgctgatgtgcttatgccaggatacagtgcaagatatggacaaattggtggtgacagtaacccacaagctagtatggtcccactagcaacagattcaagactgcatggtggaacggttgctgataattacctctcggcaagatactcccttggatcttcaggtgctcgcgttagccaaccagctccaactgttcccccttttgggctctcaggtgcaagttcacaacgaggctcagtaatggacaggtattcgtatgggctttcgggtccgactggaacacagcgctcagttattgacaggtatgcgccgtccctcgatggaacgaacacaacaagatcgaggagctccttgcctgagcagtacccgttcggacaacctggctcttccggtggcgggtggcctcatcactgatcgctggaacttggtcctcagatttgaccagcaaaagtgcaaccgatttcttgagtccggtggagcctacaacctatctacggcctaactttttggatcctactagtcgtttcttcctggcgccttcgacgaagacatcacctgtgtctaccaatacagaagtgtagacttcaattcctacaaatacagaagtgtaggcttcaatcctattgtttgctctggatttctgtttatgagcgtatttacaagagtatgtttggtctatgttagtatattaggaatacaattccaaaaccgttgtaccgtgccaaagtttaatactatacgtttgggtctgtcgatgagaaaaaaggacgagtgggtgagaagatgctgccctccgcagaactcgatcaggccggttcctctgcgcgtcctgctatgagaggctaacctgagcccgacagaaccggcttggtcgatttgggacctggtaggccggtatttttttattgaagtgtaactttctaaattaggtcttgttggtttgcgttggattgcgtccggaatcgtttcaagtttatataaattagagaagcaatccggttagaaatcgtttcgat

SEQ ID NO: 33887 - DNA, 2375 bp, Zea Mays
caaaaacacagcacagttgggtgatttctgcttgatcccatcgaggaaatgaacgatttccgtaagctcttttcattcaattctacgaggttgcagatgccgaggaccacaactccacaaggcttgctcatttataatggccttgtggagtccgaggcactgattgatagtagttcttgctctagccgcaccgccatggagatcaaccccgcggacgagatcgacaagtgcgaggccggcggcggcgcggagccgcaacctgcagatccggagcccgatgccgccgcggcggtcgagcagcagcagccgtggcgcgagcagctgacggcgcggggcttggtggccgcggcgctgatcgggtccatgtacaccgtcgtcgtcatgaagctgaacctgacgacggggttcgtgcccacgatgaacgtgtccgccgcgctgctggcgttcctggcgctccgcggctggacgggcgcgctgtcccgcctgggcgtcgccggcgccaggcccttcacgcggcaggagaacaccgtcgtccagacctgcgccgtcgcgtgctactcgctagcgctctgcgggttcgggtcgttcatgctgggcctgaacaggaggacgtacgaggcggccggagtgaacacgccgggaaacgtgccgggtagcgtcaaggagccaggattcgggtggatagccggcttcctcgtcgccagtagcttcggcggcctgctcaccttgatccccctcagaaaggctttggtcatcgactacaagctgacgtacccaagcgggactgcaactgctgttctaataaacgggttccacaccccccaaggagacaagaatgcagagaagcaagtacgtgcatttctgaagtactttgggatcagcttcctatggagcttcttccagtggttctacaccggtggcaacgcctgcggcttcgctcaattccctacgtttggcctcaaggcctggaaacactcgttcttcttcgatttcagcatgacgtacgtcggcgccgggatgatctgcccgcaccttgtcaacctctccgccctcctcggggcggtcctctcctggggaatcctgtggccactcatcagcagacgcaagggctactggtaccctgcagacgtaccggagagcagcatgaccagcttgtatggttacaagtccttcgtgtgcatagctctgatcatgggtgatggcatctaccacctcgtcaaggtcctcggcgtcaccgccaagagcctgcatgagcgctcaaagctcagacgcagcaacaaccgagtggccgacgaggacaacgcggccgcgatcgacagcctgcgccgcgacgaggtcttcaaccgagactccatcccggcgtggctggcgtacgctgggtacgccgtcacgagcgccgtcgcggcggtcgccatcccggcgatgttccggcaggtgcggtggtactacgtggtcgccgcgtacgcgctggcgcccgtgctgggcttctccaactcctacggcgccgggctcacggacatcaacatgggctacagctacggccagctcgcgctcttcgtcctcgcggcgtgggccggccgcgacgacggcgtcgtggccggcctcgtcggctgcggcctggtgaagcagctggtgctcatctccgccgacctcatgcacgacttcaagacggcgcacctcaccctgacgtcgccgcgctccatgctcgccgcgcaggccgtcggcgccgccatgggctgcgtcgtcacgccgctcacgtttctcctcttctacagggcgttcgacgtcggcaaccccgacgggtactggaaagcgccgttcgcgctcatctaccgcaacatggccctcctgggagcccagggcttctcggcgctgcccacgcactgcctgccgctgtccgcggggttcttcgcgctcgccgtgctcgccaacgtgatgaaggacgtcctgccgccgcgctacgcgaggtacgtgcccctgccgacggcgatggccgtgccgttcctcgtcggcgccagcttcgccatcgacatggtggtggggaccgtggtggtcttcgcctggcactggattgacggcaacgagaccacgttgctcgtgccggcggtggcgtcaggcctcatctgcggtgacggcgtatggactttcccttcgtcgttgctttctctggccaagatcaagccacccatctgcctgaaatttacacctggaagctagataaatggatacattctcatgtgctaatcttcggatagtgatctgacacaatctgaactctgattctctgcacaaatcatgagacgtatccacatctatattcaattgaaaggaacaaaaatgttcatgctgcttcgaccgacaggcgatgagagccg

SEQ ID NO: 33888 - DNA, 1802 bp, Zea Mays
cccttctgtgatcaagaggaggaaaccatggagcacttattagtgggctgtgtttttacaaggttatgcaaaggaggtgaactgctggacaggattttggctagaggtggaaaatattccgaggaagatgctaaggttgttattcaccaaattctaagtgttgcttcattttgccatcttcagggtgttgttcaccgggatctgaaaccagagaattttcttttcatgtcaaaggatgagaattctgccttgaaagtcatagactttggtttatctgactttgttaaaccagacggcagacttaatgacattgttggaagtgcatattatgttgctcctgaagttctccatcgatcttatggcactgaggcagatatgtggagcattggagtaattgcatatattttgctttgtggaagccgccctttctgggcaagaaccgagtcaggaatttttagagctgtcctaaaagcagatcctagttttgatgaaatcccatggcctaccctttctgctgaagcgaaagacttcgtaaggaggctgctcaataaggattaccgcaagcggatgactgctgcacaagccctctgtcatccatggatccgtggtacacaggaagttaagatttatctagacatgataatctacaggcttatgagggcttacataagttcatcttctctacggaagtctgctttgagggtaacttttgctcttgcaaaggcactgacgacagatcaactcttctacctaagagagcagtttacattgttagatccaaacaagagtggccatatatccttgcaaaatatgaaggcggccttgatgaaaaattcctcgggtgcaatgaacgattctagggttcttgactttgttaactcaatatgcaatatccaatatggaaatattgattttgaagagttttctgctgcggccattagtgtatatcaaatggaaggcctggagacctggcaacaacatgctcaacaagcatatgaattgtttgacagggagggcaaccgaccgattgtgatcgaagaacttgcatcggagctcggacttggcccttcggttccacttcatgttgttctccaagactggatcagacattcagacggaaacctcagtttcctcggcttcataaaactattgcatggagtttcttcacgcacaatccctaaagtccaagataaccgtttgcattgaccaatccctaatctcagggccagtgcatgccatgtctggctgtagaagttgcatgagaccatcagaccagtacaaagattaacagatcaggttagggtaagaggtaaaattctctcagtagttgtatatttgctccgcccttgtcctcaagatgttaagaggaatgtacagatttggtttgggaagaatggaaaggctaaaggatttggggctgttttttttttgcttgtttgttccagtaacacagctttgtaactttggaatccttaccacaagaaggattatgcgacctctaccgtataatgacgaggctatgggaggtgatttgaggaaaaggccagaagctgggacatcttaggaaacagattccatgagaagaaatccaaatatatggtgaaatgcagatttgctaaagtcgccgagcttttgtatgcgttcgagatttccagtgagcgtggatcctttgttagcctgtttggcaactcacttttcaataccatagcattacagtaccatggtttactaattgcaatgtacaatctaacatctgtttggcgacaaagtattttgacatgtatagttttgatcaaattccg

SEQ ID NO: 33889 - DNA, 977 bp, Zea Mays
taagctcctgcaaaaaaaggactttttcactgtttccctgtgggccatacacgcaagtgcaaggtgttgttcaggatagaaatggtcgaactgttgctacactatttggaaaatgggatgaaagcatgcactatgtaatgggtgattgctttgggaaaggcatgggaactgaacagttttcagaggcccatttgttgtggaaaagaagcaaaccacctaattttcccactagatacaatctcactcgctttgcaattacactgaacgaacttacccctggattgaaggaaaaattgccaccaacagactcaagattacgaccagaccagagatgtctggagaaaggtgaatatgaaagggcaaatgctgagaagttgaggcttgaacagaaacagcggcaggcacgaaagatgcaggatagcggatggaagcctcggtggtttgcaaaggataaagctactgacacataccgttacctcggtgggtactgggaatccagagaaaagagcagctgggaaggctgccccgacatcttcgggcaagaccctaacgatctgatgatagctgactaggtttgagtaggttataggtcttttggttctctttttcgggaacgcataattccggaaatttttagtggttcatattatagagcaattaaatggccgttgatatgtaagcattggcagtgcctcagggagtattgatctcgtacataataattagacaatggttcgtctcacatgtcaccttatttttttggcaaagtatttttagccctcttgtgaggttttcacgctcacaagttcagtcttcagagtggtggtataaggtgggcgatcagtgattcaccagtatatggctattattattatataaatgtagtcttatactggatatgtaactacacatacaagtgcaggagggcgtgactttgttcatcattttggtggagtgctagtaaagatattaagctg

SEQ ID NO: 33890 - DNA, 1330 bp, Zea Mays
tcatctccctgtcgcactcgcccccgctgaggccctcctcccccgcaccagagtcgtcgtcgtcgtcgtccgagtcgtactctgagtcggactcggacatcgacgagaagctgaggtccggcaggccggcgacggcggcagggcccagcaccgtagggcccgccgtccatgccatttccatcggctgatgagggccagcttgcaccgtggtcatgcccgagggcgggggcggcagaggcggcgccgaggcgtgcagcgcctcgagctgcgagaagaagcggtagctcttgccgtcctggcgcccggcgcgggcgtccttggtgcgcctgtagtacttgtccacgttctcgaacttctccttgcacttcttggcgctccggtggtaacccagccctgcaagcttccttgcgacgttctcccagagcggcgctttgagcggggagctccggaagtcggcgtccatctccgtccggatcctgatgagcgccagcgtctcctcgcgcggccaccggttgccggacgctcccgcgccgctggcgcccaagtcggcctgcatgtcttcgtcctggagtctgaccgccacaccggcgccggagccgcccgctgccaattcctcgaaattagcgctcgaccccgccggctgcaactgcatcgtcggcagggctgggatggcggcggtgacagacacggcgagccccgtcggcgtcggcgagaacggggccgtgcccgtgcccgtgccagccgtctccggggccatgtacggggacccggcgccaccgtggtggtgcagcatggccgccgccacctttggttccctgcacaaaacaagaaattccgttgatccaccagctcgcaagacctagggaatagaaaattgcagcatcacttcaccggtactgcgactaagctagcacacagtccctctcctggctgtggactgtgtgtggtctacaactacgtactaccaactaacaattgtccaggaaaacaacccagggacagaattggggagaattcttgcttctacacccggccatctctctcagtccccttttccctcccgtctctcttctaggaacagagtgagtgagtgccacaagcaagattagagagacttacggcccctctggacgacgggttatgacggaaactggcagcgagggggctgtgcagctagggggaggaggaagaaggggcagtggtgaaagggagggatggggtcatggacaactggaaaggggcgaaagagtgtggagggctgtaagggcaggcagagaaagccaagaacctctctctacaaagggggaggcttctgcctgctgctggggta

SEQ ID NO: 33891 - DNA, 387 bp, Zea Mays
gccagccagccaggagcatccgacctgaccggactataaagctatgcgtctggtgctcctctccttcttttccttagaaccctaacctccgccgccttcgtctcgagtccgggcctgaggatctcgcccgagccgccgtcctctgcggtgctgtgggctctaaggatgtgctcgtcgcgctcttccaaccacggtgttggtgccgcgctctcccacctcttgatttcccccggccacatgctccttggccacctctgcgccatcccgctggagactatcgtcgtcaccggtattcgccacgacccagggcagtacctcgacaaagaaccgtgcaccatcgtcgtccggtgtccgccgtttgcgacgacgagcagttcgtggttcgtg

SEQ ID NO: 33892 - DNA, 2750 bp, Zea Mays
tccttggacataatttggatttttggaacttgattgacaatcattgacgctatggcgatacaatttatgtacgtgtccctagtgtacacaatgaatctaagttctagtctgctttggtctaattaggaacttgactgtgaatccatcgctgctggtttattgcatgatactgttgaagatacagatgtggttacttttgaaagaatagaaaatgagtttgggccaactgtgcgccgtattgttgaaggggagacaaaggtatctaagttggggaaacttcagtgtaaaagtgagggtagctccaaacaagatcttaaagcagaagacctaaggcagatgtttcttgccatgactgaagaggttcgtgtgatcattgtcaaactggcagataggttgcataacatgcgcactctcacacatatgcctcagcacaagcagtatgccatcgccatggagacactacaggtctttgcccccctagcaaaactccttgggatgtaccgtataaagtctgagctggaatatctatccttcatgtacgttaaccccactggttttgctgaactaagaaaaagagttgaagacttgtacaaggcccatgaacaagaattggaagaggcaaatagaattttaaggcaaaagattgctgatgatcagtttctcgatcttgttagtgttgaaacaaaagtgcgctcagtttacaaagagctctacagcatttacaaaactacactcaaatccaagagttcaataaatgaggtgaatcaggttgctcagctgaggatcatcataaaaccaaaatcctgcaatggtgttgggccattgtgcactgcacaacagatctgctatcatgttcttggccttgttcatggcatatggacacccgttcctcaagctgtggaagattacattgcaactccaaaacctaatggctaccaaagtctacacacaacagtgataccatttcttaacgagagtatgtttcatttggaagttcagataagaacagaagatatggatttaatagcagaaagaggcattgctgcacattacagtggaagaggagttgtttctggacctgttcggcctggaatatcaagtggaagaaatgccaaggggaaagtaatctgcttgaacaacacaggctttgctctgaggattggttggctcaatgcaatccgcgagtggcaagaagagtttgttggtaatatgagttctagggaatttgttgatactatcacccgagatcttctaggaagccgtgtctttgtgttcactcctaaaggcgagattaaaaacctgcctaagggagccacagtggttgattatgcttatctgatccatactgaaatcggcaacaaaatgattgcagcaaaggtgaatggcaatctggtttcaccaatccatgtacttgcaaatgctgaagtggtggagattataacttatgataaattatctagtaagtatgcattccagcgtcaccagcagtggctacagcatgcaaaaactcgcagtgctagacacaaaattatgaaattcttaagggagcaagctgctctttctgctgctgaaataactgctgacgcagttaataattttgttgctgatcttgaagacgaaagtgatagtgagctctcacttccaagcaccaagaatgaagatagtaaattcaactgggagaagatattaagttctgataaattattctttgtcaacaaaagtagtgatggctttttacctgttaataatgtccatacgaaggtcaatgggaagcaaaacaaaactgttaaggatttgggcatcaaaatcaatggtcattctacaattcgaggtgatagcttcagtgagttaatgcaccctggcaattctacctgcaaggaagttttccctggtttggatcactggaaatctggtaaaatttctggttggcataatacggaaggcaactctgtccaatggctttgcatagcctgtgttgaccgaaaagggatgatggcggaggttacatcggctcttacagcttgtggaattaccatatggtcttgtgtggcagaagtcaataaaaggaggggaatgggtgtgatgctgttccattttgagggaagctatgagaacgtggtcagtgcgtgttcaagtgttgacatgattcttggtgttcttggttggtctgtgggatgtagctggtgtccattgggtgttcttgagtgctaatcggtaccaagagacgtgtaccacaatagttcaccactgtcttctccaagatggagttaattttggaagcactaagacatcggtggctcaaaattttgttggtcagatcatggttggtgactggtgagcgagtggaaccctttacttctctgtcaaatcagaaagtgggggtgatcgaagtagaaccagatgtcattctgaaagtgagtgtacatagcagagcgagtagggtactgttagtgcagggattgatttgattgtacagaaggccttacaaaagattgttaagggcagttcgttcttctccccactttgtggttcgcatatactagtttgcttaaatgtgcagctagaattttgacctggacactgatcccaaattttgcctgtttaattttctcactccgcctgtaaatgttattgtacagcttcaattttgccagtgaaaatttgaacaaagttaactggtagatgcacgcctgaattacttgccattttccgcagtatgaatggtaacttaaactggaggtttggctctg

SEQ ID NO: 33893 - DNA, 247 bp, Zea Mays
accgggtaagtctagctgagtattagtatactcagccttgcttgtggcataatttttgcaggtacctccttgttttggttgatggtgtgacttggccttcgtccctgccaccgggacagacggtcgagtgggttactgcttccgcaggagaggatcaggaggagtagcgtggccaggcttcgccatgttactcggttcttctccgttagttatttccgctgcattaaaatttatggttattatttct

SEQ ID NO: 33894 - DNA, 2661 bp, Zea Mays
cgcaggcagtcgctctcgcgcggcggctctccccgcctcgttcgcccctaccgcgccatcaacgtgcctccccgccgcccctgtcctccccatgcccgccgctcccacccgagatggttagcgcccctcctccttccggtcccttcccctgcctcggccggccagccatggattcaccaagcgggctctggtggcggccggcgccgtcgtcgtgtcctccattcccgtcaaccccctcgatgtcgccaagatatgtttaccagacgaattgatatctaggctatttatgtggttactaattttgactcctctaagacatatttacacagggttggtcgttatgggagatatgggcaccttggtttggcagtgaacttgaccacttacaaagattgtttcaacttatatagtattgataaaaaaaacttggaacggaaattaagacaatacccccacaaattgacctgtttgtatactgccaatgatgatagcgacagcttcatgagctggaggaggaggagaggcccatgtcggtggagctggaacccatcgccagcgagcagcagcttaactaggtccttggagaggcgtagcagctccagctcctcatcgtcctgctctggtaaccccactttcctagatcggtttgtgcctgtagggtgttcttgttaaagtttgcttgtaatgtctgtgagattgcaatcatggtcgtgtatgattgcggtgttcacagattttgtttgcttgttcctagatagtcatttatgtggtgcaaatttagcatcttggatgaagtgaaaatggacaattttgttcatttgttattaggttctggcacttggacttggtatttagtaactgagaatttacttatttagtagttatacagcccgtgtcattgtcgttgggcgaatgaatttcatcgtcagtctattgcatgaatgataaatgcatgtcggtggccttttgccgaatctaccattttgtttgttcctcatctccattcctatctgcttgtttattggtagtagaagtagaactgctatttatggctgaggcctgagggaaaaaataatcaaatgttcaaccaacttcatttttttcttgagtgcatgggttgcagcctttggctagcttatgatctcgtgtggtctatttaccatataaataaatagcagcattagttcaatttgatgttcatagttctctctctctaaagagtcatatgttagattcatgggaaatacttgaactatacatttttttaatgtatcagatgtgtgaattatcatgtccggatcaatttcaaccaaccaacagttcctttagcaaatttgtcaggcatatttatgcacttgttcgcataactgagactatattatttttataagactaaggtcagactattgatggtttggtttgggtggcaccttgttcttcgttccttgccatttccatgccatccttttattatatacatacatttatttggagataaaatttgatgtcaagagaaacttgtctttctttcactctccaactcatcttcgtagtttgattctcatgggaggaccctgtttccatcatgctgcatctttttatctgataaagtgatatttcttagagcatcaaggttcgacaaccaacatattctcgtgtgaggaaatggaaaagtgatgtcttgaggacattttttatcttttgatgttgataattgttcatattattatggttcaacaactcctagcaccaagtcattctgtatgatctgttaacttgatagaagttaacatcatttgattttaagaaatgtaatcatatttcctgattgctcagaattgacttgttcatcatttttcaatgtccctaattggtattagatttttgtgatcttgtgtcatattctgtgatcaacaatgtacaatttgttgaataggctgttgttgaaaaagctgtatattatgctcttgtatggatcaataggctgttggctgtcggtcatgacatcgccatcaagacagataggaaagttatattttttcctaactatatatgctcttacctattcctgttctccatagtacaaaagatgatattgattttgtggctggtttcatttgttggaatgctcttcaactttcttacgctcatttacattgcttttctctgcggtaaattgctggcttaaatgcatgctgcttgaaccctataatcagatagaccatcccgaatgcaagtcaaggcctgatagtggtctttctgcaattacagagctggaccctggttatataacagcaggatcagtaagagttaatggcccagtgacggattcaaggtatcctgctcaccaacagatcccacaagcatacggttaccgccaaatgcctgcaaggttggacagtaccaacccatcacaggccatgggaggttacacgctgcagtcacagaaggaaacattatttgaagagttgccattttgaagagttactcgaatccaatattttgctcttttgaattccttggtgtacactggcaaatattagcatatttgaagagttgccatttcgatcatcatcttcatttgtactttttgggtcagatctaataaagcatcagcattaaatttacaatgatcacctaaatccatggtttttattgcct

SEQ ID NO: 33895 - DNA, 1139 bp, Zea Mays
gccctactgacgttgcttcgcttcgcgactccgtgataagcgctcgcgccgcctctctggctctcttccgacgccctcaccgttgtcgttcccgtttggccgcacgcgtccgccacaccccagctcgcctccccggctcacgtctgcctctgtttgccgcccttcccgccgccgttcccatctggccgcacgcgccggccacaccccagctcgcctccccgcccccggctcactgcggctcccgtctgcttccgtctgcagtcctccccgccgcagttcccatctggctgcacgcgcctgccgcaccccggcccacctccccggctcgtgaacgcctccttccgccgccctcaaatccgcgtcgtctttggcgtgacaatcctgtggttcctccagttgaacggtgacgagtacagcggattttggccttccgattcgattaaaaattctgtcgtgcagttcctattaaggtccaacccatttgaaggcaattgaaaggccaaaacagattgattaagatgcagatgaggaggacaagagtgtaaagcagcttaacgagtgtgccacaatatatctatctctccaggactgcctcattgagtcaaaccgcaactggaaggtctgccaagcatacgtccaagcactgaaagcctgccaggctaaaagaaacaaaagtgatcaaacctaaagctttacatatgtgagtagctgatatcctaaaatggtcagcacggatgccagtttgcaggggacaggaagcaatgctccagatgttagttgcagatggagatgggctcttctcaaacagctcagaatctctgatgaccatgatgtttctttgttacgtttttctgcataagttcactgaacaacagtagaatttcaattctgtttctgtatttcccaatcccccaataagattaatggtttcagatttattaataggacaactgaacaagacattcttgcatacggttacaactgagttcgtgtgagatcgctttggattaaagccggttgtttgaactgctgcagttgcaatccatagagacaaaaacactgtagaaacagtagaaatcggtacagattaaagccaagcgaacaagctttatcataatgtcagtctcaattcgattttc

SEQ ID NO: 33896 - DNA, 2855 bp, Zea Mays
cgatgcgctacctcgagcaagcttgcgttgccgccctccctccccgtcgtgctcacgtgggttggtcaaccccctccccgcgccgcgagcaccttcacctccctcccgcctacatccacatggcagcgccgtggccgtcgcgcgcggcctgctaacagcaggcaaacagcaacacctcgcggtccctcggctgctgcgcaccgcgccgctcgccatggcgccaccgctgccgctgccgctgctgcggtggctgctcctggcggcagcggtcgccgcgaccgtggcgcagccgcagccgcagccgctggcgtcgcggacggacctggcggcgctgtacagcctgcgcgcctcgctggggctgcgcgcgcgggactggccgctcagggccgacccgtgcgcgcgctgggcgggcgtggactgcgcggcgggccgcgtcgtgggcgtcaccgtcgcggggctccgccgcacgcgcctgggcgccgcccggcccccgcttctcgcgctcgacggcctgcgccgcctcaccgcgctcgcccgcttcaacgcctccggcttcccgctcccgggggagatcccgccgtggctcgccgccggcctgccgccgccgctcgccgtgctcgacctcacctccgccgccgtcaacggcacgctgccgcccgacctcggcgcctccgggaacctcacggccctgctcctgtccgggaacacgctcacgggccctgtcccgcccgcgctgctctccgccgcgggcctccgcgtcctcgacctctcccgcaacaatctctccggaccgctgcccaacgtctccgtctccctcggcgccgccggcgcctccgtgtttaacgtctccgggaattctctgtatggcgtcgccgccgacgccattggggcgctcaggagacggtttcaggtcgtcgacgtgtccagcaactacctggacggagcgtggaacgggtccgacacaacagtgcttgccacgacgaattgcttctacggtgtaccggcccagcgtagccgtgcggactgtgaggagttttacaggaagcaaggcgtcaagcttgttgatcctccagcgccctcgcctgtgccttcgtcagagccaccgccttcaccctcaccagagaagaagaagaagaagaagcacgggatctccaaaaaactactcattggagtccttgtagccgccggaacactggttgctgtgttttttatcgcactgctgttctgtttagtgaagaggagaagcagaggaaggaggggagggagagggaggggagtggcgccaaacgaggaaggcacgcgctctgtctccgtgcggaggagggacagcagcgtcaatccggtggtgttatcgccatcggcggtgtctccaagtgccaacgatggacctaaggatgcgtctgccgttatcggtgagatcacctacgagcagctggtccttgccaccggcggttttggcgacgaccagctcatcaaacacgggcattcgggggacatgtaccatggtgtgttggagaatggctcccatgtcattgttaagaaggttggcgcaaagggcgccaacagacatgcgagtgaattggatttctacgtgaggtactcgcacgaaaggatcgttccgctgctcgcgcatttgagcaatgacgatgacgaattcatggcttacaagtatatgccgaagggggatttaacccatgcgttgcacaagaaacctgtagacaccgcagatggcttgccctccctggattggataactagactgaagattgcaactggcgtggctgaggctatgtgcttccttcatgaggaatgtagcccgccattagttcacagagatatccaatcaagcagtgtccttctcgatgataaatacgaagtgcgacttgggagtatgagtgacatatgcatccagcaaagtgggggaagccagaatgtcttcactcggatattgagatcatcaaattggtgactgacgttggtatctgacgctttcttgtggcaggtctctcgacaagcacacatcaggtccaccggccacttgttcctacgacgtgctctgcttcggcaaggtgctgctagagctggtgaccggcaacttgggcatcagcggaccaaacgacgcggcgtcggaagaatggctgtcgaacacgctgaaccacatcaacggcggcgacagggcgagcatcgccggcatcatggacccgctgctcctggtggacgaggaccacctggaggaggtgtgggcggtggccgtcatcgccaagacgtgcctaagcgccaagccgtcccgccgtccctcggcgcgctacgtgctgcgcgccctggagaacccgctgcgcgtggtgcgccagggctcctcccggtccaactcggcgcggcagcagctgcggagctcgtcgtcccggagctcgtggcagtccgtgttccaggggaaccaccgggtgcagagcctggacgccgcagcgacggcggcgttggcgctggaccggcggcactcgctgaggtcgcacggtagcggaggcgaggcgtcgttctcgttcaagagagccttgcccgtgcccacggacaccgcgccggagccggctgcggcgctcgacgaggacgccgttattgtctagtgtaggaggcggacattccccggttcttagcttctttacagggcggtgttcttgattcttttcccctgcgtgatatcacgtcgtcgcatgtgtgtgtataatttgttcctgtctgatgcgttcatccgtgttccaacatgaccaaaaaaaactgtgcataaagagtacgttttcaatactttcaaggaaaatttgaactttatcttcagcatgtcttccttgattttcaaagctgag

SEQ ID NO: 33897 - DNA, 3242 bp, Zea Mays
acgcctctctcaccctcctccgcagccccgcttcacctctctccctccccctcttctccccccacccctccctcccccaccaaatcctcgttcatttttttccaagcgacttcgcgtgtgagggcgggagagcgcgcggggctagggtttccacgggtgatggaagcagaggctgccgcggcggtagtggcgtcgtccgcatctgcctcggcttccgcgggccggtctcgcccatctagcagcgccgcccagaataggataggggagaacaagactaatatcagcagctatacacagaggacttacaatttatcaaaaaataggcaaattagtacatcaaagggtactgattcagcatcaaatttgctcacaaaaaggcaagatgatgcgctatgcaccctgcatagtcttgatattattccggttgacaaagatggtggtacttttcaagacgaaagtcctttctcttcatctaatgttatgtttggtggaaatcttggtcccaagaatgctattattagaccaattaaactaccagaagtgccaaagcttccaccttatacaacatggatatttttggacaggaaccaaaggatgacagaagaccaatctgtacttggtcgacggaggatttactatgataccagttgtggtgaagctctaatttgcagtgatagtgaagatgaagccattgaagatgaggaggaaaaaaaggaatttaaacattctgaagatcacattattcggatgacagttcaagaatgtggcatgtctgatgctgtactgcaaacgctagctcgacacatggagcgggctgctgatgacataaaggccaggtatgaaattctgcatggtgagaaaactaaggattcttgcaagaaagggactgagcataatgtcaaagtggaagatttgtactgtgacaaagatttggatgcagcattggattcttttgacaatctcttctgtcgacgatgtctagtgtttgattgcaagctacatgggtgttctcaagatttagtatttcctacagaaaaacaaccagcttggagtggcgttgatgacagtgtaccctgtggtattcattgccataaactggcatctgaaccagatgctgctgctggtgctgatcacatgctttttgatgttgaggagccaactcactcatcagacaatgtgatgaaccagccaggttcaaataggaaaaagaacggctccagtggaaggaagactaaatctcaacaaagtgaaagctcttcaactgcaagagttatctcagaaagcagtgattcggaagtacatccaataagcaataaatctccacaacactcccctagtccctcaaaagttaaaattgggccgaaaggtggaatcagaaagattaccaatagacgaatcgctgagagaattcttatgagtgtgaagaaaggacaaagggaaatggcatcatctgattctaattttgttagtggatatcttttggcaagggacatgaagcttaggtctgatacacgaaatggaaataaggaattaattgtatcctcacaacagagttctccaagcacaagaagttccaaaaagaagagtacacctcaaattgggaacagctcagcttttgctgaggctcataatgattcaacagaggaagcaaataaccgtcattcagcaacagatggttacgatagttcaaggaaagaagaattcgtcaatgagaatttatgcaagcaggaggtgtacttgagatcatggaaggcaattgagcagggacttcttgtgaaaggattagagatttttggaaggaacagttgtttaattgctcggaaccttcttggtggaatgaagacgtgcaaagatgtttttcaatatatgaattatattgaaaacaacagtgcctctggagctcttagtggtgttgattctcttgttaaaggatatattaagggtactgagttgcgcacaagatcaagatattttagaaggcgaggtaaagtccgtcgtttgaagtacacctggaaatctgcaggttacaatttcaaaaggattaccgaaaggaaggatcagccttgtcgacaatataatccttgtggttgtcaatctacatgcggaaagcagtgtccatgtctttcaaatgggacatgttgtgagaaatactgtgggtgtccaaaaatttgcaagaatcgttttcgaggatgtcactgtgcaaagagccagtgtcgcagccgccaatgtccatgttttgcagctgacagggaatgcgatccggatgtttgcagaaactgttgggttgggtgtggtgatggtacattgggagttccaaaccagagaggagataattatgaatgccggaacatgaaactgcttcttaaacaacaacaaagggtcttacttggaagatcagatgtctctggctggggagcattcctcaagaatagtgttagcaaacatgaataccttggtgagtacactggggaactaatctcacacaaagaagcagataagcgtggaaagatatatgatcgtgagaactcatcgttccttttcaacctgaacaatgagtatgttcttgacgcatacagaatgggtgacaagctgaaatttgccaaccatgcccctgacccgaattgctatgccaaggttatcatggtaactggtgatcatagagtgggcatattcgccaaagaaagaatcctcgctggtgaagagttattctacgattaccgctatgagcctgacagagctcctgcttgggcccgtaagcctgaggcgtcgggagcaaaggatgatgggcaaccgttcaatgggcgtgcaaagaagctcgcccaaaacaaccgaggctgaatctgatttgattctttcattgttaggacaaatttggcagccattcaactaatacaaggaacctgtcattcataggccccaatttatttgaactcgtcattgtaactcgtatgtgcttgaattctccatggcatctggtcctgccatccgtagagttaggtcccgtttgttttgtttgttttgaggaactaaaaattaatccctctattttagtcacattgagtctctagattgtcaaacggcgggactaaaacaaagactaaactatttgtctctagttcctcaagccatgacttaaagggaataaatcacataaattttatttttatccttcctttatttcagttacactaatgatgtaataattgtatgaggtattttggtcctcttagagcatctccaag

SEQ ID NO: 33898 - DNA, 1427 bp, Zea Mays
ggacgacgagagaggcagagagccggccatggacgcaacgtcaaactcgaatttacgccggccaggccaccaccagtcgcccacgccccgccgccagtcctggcgcgcgcgcgcgcgtcccccggcccacaccgcaccttccacttccacggaccctgctgcatgcgcgctccagtgcgcagcactagtacgtacgagtagtagtagtgctgtgctgaggacgaggctgctaggtgctagctagctagctctccatgaatcgtatcgatcggaagagaagaagcccattccctgcccctgcctgccttggatacctactccctctccctccctcctcacatcacacagacagcagacaccactggccggccggcctgttcgttcattctctctcgctcgctcgctcgcccgcccgcccgcccgccagcctttcattccatctattaaacgcctataaatacagtacaggctcacacgtccatggaaggaatgtccatcttccttcactaccaccacacggctgctggctgctactaggcaggccttcccacacgcccgccgtagctctctcgcttgtgtggtcatccccggcctcgccttctctcattctgtcgtctgctgcccctgcctgccagtgccaccaccccccggccgtgcggattatattcgggcccaacccaagcaaatggagaaggcgaggaggcgccgcgtgccggcgttcggagagtggaactacaactactacggcagcagcgcggagctcgccacgcccgcggcaccggcggagctggaggcccgcagcgacgtctggttcaagtactcgccgcccccgcggaagccaccgccgccgccggcggccagcaggaaagttcggaggccggcggccgacaggtccgcatgcggcggcagcggcaagcggccccgtgccgcgacgcctgcgagggcgtccgacgccgtggtcccatcgtcgtcgtccgtgccacgcacgccggcgaagagcgcggccggcgctgccagggcgcgcgtggtgcgccgcgtcgacgcggacctgtaccaggtgcccccgccggacctgctccacgacgaggatctgccaccgaggcggaagaaggcgtccagcaggagcctgtggatgggttgcttcggcttcagttgcgttccggctgattaactattttctgtatttttttatccatgtatctactcctagtttaactgtactccttttcagattgtgcaatgttttggtttttttgtttgtttctagactagatttcagattgtgcaatgttttggtttttttttctttctggactagagcgagtattgtacagtgtgggcaatgaaaaaaatgtactattatgtatggtttcgtattcgagcctacttgacgccgcctaatcatctgacgcgcatcccgaaacatg

SEQ ID NO: 33899 - DNA, 1858 bp, Zea Mays
gcacccctccaccacttcggtcctccgccagtgcaagatgaggccgccctgaggcgtatcagactgcaccgcgaggacaccgccgtggctaacctttggtgccgtgcattcaccacggcgatgctctgatcaaaccctcccccctctttgtatattacaaattttttcagctagcctacttttgatctgattaggcataacaccatacaaataagacttttggtttattctgatgactttaaatccttgactttcttctgtcaaatcatttattaacagtgaacttgtgttccacttgtacacttacctagaaatataatgcttggctcttaacaaacaatggtttcattttcttatccattcatgttttaatattcttccctgtgtgctagtgcttcttttgacttttgttcatggtccaccttttatgtgcatatacatttcaggctcaggttttagtgggatatgatgaagctaaaaagtggacgacgaccgttctataaggatgttaagcttgtagactgccgttcaggctcaagtcttccacatttggctgctcaagcaaagtttgcagccatgaacatgaagactgaagatgtcaatcctcgtcgaccagttcaagtcagacgaagtagatgggctcttggtgatgtaaccgaggtgttggatcataattcgtggaggcttgggaagattacagaagtactgaagaatgactattttgtcatcaggctagtgggttgcatccaaccaagagaattccacatatcttgcttgaggattccacatgatcgcaagcagttgactgttggaggcaggatcaatgaactgaataagccgacccgatttgctgactgctcctctcaccactcaaaatttgtgatggaacaggaccatcaagcctatgaagaggttgatcactatgctaagaggaaagcagccaatatctgtgcttccaccggtgctagagctgtcaagagaaaactagaagcaagcaggatcccacctaatggtttagtcagaagaacaggcaaggaacagaaagtatctacacatgaatttcgccagttaaccaagaacgagttgcctccaaaggtgtctgctaggaatgccatcgacgaagatgatcattttcataggcctttaagtagcagatacaacgatctgcctgagaaacctctgcgcaccagagaagaggacgagtgctcggtggctagctgcagcgcgaattacacaagtggaacgaaaaggccttcgagcaatacggacactgcttctagtccgccaaagaagaataagaacgcaatggttaggtgcatgaagggtttgcttgatcgattagattctggcagtagcaaagacgtagatacagctacgcagattcaagaaataattgagacaaaaagaaaggagcagcaagctgcagatttcaaggagatagacctgtgtttggcactggcaaaggaatgtggggctactgaggagacagacgagttcttcgtagcttcccaactgtttgcaagctgcaaatttcaaagacatgttttcctaggactgtcttcaaatgcaggaaggatggcttggttgaagaagcactgcaagggctggactttttaaggactttagtttatgtcataggactggcttttctatttgtgtatcatgaagttaagtctatgaactgttagttatatttggtttgtgaactgttatgtacggctgtgatgcataaactttgtgatgcatgaatcttgttgtggttgtgctgcatgattttgcatgatttgtggaggttgtgcatgaatcatttgcatcttagttgtcttgtgaataatttcgaagaagttgtgttgtgacc

SEQ ID NO: 33900 - DNA, 961 bp, Zea Mays
cgaacaatgatcgccgaaccgccttccgtaacaagcggaagtttgttacgccagctgtgtactccctggccgctgcattcctagcctatccctcgcggctatatagcctgagccccgatcctcatccgtcttgcgtcgccacgaattgaggagacgagcgtacgtcgtgtacaccgttgccgagagaatccaggagggagggagagaagaccacgtcgcagggagaagcgtgcgtcgtcgttgtcgaggagtgccgctgcggaccactcgccgttactctaaataccaagcactggatcgctgggtgggcgttacaccggcaaggaggccaccgtgggctggagcgccgccgggctcgctcgacgtcgaaggttgacgaatcacggtggccgaccgatccgagcgaacgacaccgattggaggagccgggtcatcaccgcggttcgcacctccatcgtgggacggaacgtctacgctgcgattgctgacgagcaagtgactgaggaacccgaagcaccgcaggttgaagattctgagcaggagctcgcagaaggtgaagagcaggtaccaccagaggaggattactacgacgagttcgatgagatctaggcgtcgtctcccagtcaactatggcgttgtggagatagttattttggttcgatctattttattatcagttattttgtaagacattatcgttatataataaaagttatgacattcgtctctatacactgagtcattgtatgtgtggatcatgatttggcgcacatatgagatgcacctggatttgcccttaaatccgggtgtgacacaaaaatagtatacaacattgatgagatcgaagccaagactcaagtagcagagaagcaaatcagggacaacgcatcttcggctgatcagctgaagcctgtcttactttgtgatgatattgtcgatcagagagtctacttcggtaacc

SEQ ID NO: 33901 - DNA, 2420 bp, Zea Mays
ttggaagcacacgccactgcgagatgggcctcttcccgtccccgtctctgcctgcccaggcaacagccattcctctcctccagtcctcctcgcatcactcgactcgactcgactcgctcgctccaccgaccaccgtgcggccgcggagcggcgcggctttgctccactccactcgcgccggggcggtttccgtcgccgccagggcaccgcccgtgacaccctgatctcccttcacctactcgtggattcgatcccatccagcccgtcccgtccctctcccaccctttccagatctgcctgcgagcccccgccacgcaccctcatgacccaccactaccccccgacgcgcatcacgcgaggggagcgtcactactgctgccgccgccaatggctctctgccctgaccgagcccatggacgacctcaccgtggggggcctcgcgctcttcgccgccgtcgctgacttcatagacgactccgctcccgcgatgccgcagccagcggcggccagcaccgcgcacgagcccgagcccgagcccgggagcccctgctcagtcgccagcgactgcagcagcgtcgccaccgccgacttcgagggatttgccgacctcggctccgcgctcgtgctcgacgacctcgtctcctccgcctccacctccgccagctctgcctccgggcccagggccgccgccgccgctcccgccaggagcgtcttcgcgctcgactgcgtgccgcgctgggggctccagtccgtgtgcggccgccgacccgagatggaggacgccgcccgcgtgctgccaaccttcttccacgtcccgctctggatgctcgccggcgacgcgcccgtcgacggcctcgaccgggcgtccttccgcctccccgcgcacttcttcggcgtctacgacggacacggcggcctccaggtcgccaactactgccgggagagaatccacgaggtactggcagaggagctcaccaaggcagaggaggccgcgtccgacgctgacctgggtggcctcgaccctaacactcagaagcactgggagaaggcctttgtgggctgcttcagccgtgttgatgcagaggtgggaggagacgcggcgaccgaagccaagcctgtggctccagacaccgtgggctcaacagcggtggttgcgcttgtctgctcatcgcatgtcatcgttgccaactgtggcgactcgcgagcggtgctctgccggggcaagcagcctgtggcgctttccgtggaccataaaccaaacagggaagatgagtatgcaaggattgaggcccagggtggcaaggtcatcaattggaatggctatcgagtcctcggtgttctcgccatgtcccggtcaattggtacgtgtccctatcctcttcatgtcatgagagcaacgttggtttatgatgccatatacatccacacagtttttcaattcctgaaaaactacagactggttaatcagactacttacagcaacggtacaatatgtagctatcaccacttggaatgttgttggctggtccattctgttcgttgacaaattattattggctatttgatttgttgcagtttcgctttagggatgtatgctttaattttggtagtcaaaaaggttgctagtccgttatggaaacctaatgagttcaactttgattgcgccactggatgaaatggtatggacttgtgttggataacaaacagttgtggtttggaatgtatcgctaactatgcagcgcaggctttaagcctcttccaggcttgtgatggaattatgccattgtgtgcatatcttgacatttgaacgtttcttttcacccacaggagttcacagattcaattaagctatttattacttggacctggactgcttgatcctatgttctataaccatggattccttgcagtcacaggagagcctcagtgtactgttttgatgcctttgtttcagcgttccaatccacttcacttaaagttgactacaaccgatccaaatagacttgtggatgaaaaggggacagatacctgaagccatatattatcccagtccctgaggtcacaattgtcgcccgtgcaaaagatgatgagtgcctaattattgcaagtgatggcctctgggatgtgatgtcaaacgaggaggtaaaggtacaatagaaaccgccagcattaaactgtacctgtgctacttgtgttttggtatattgatgtctaggagtagcagattagcagtgcaaagaatactacgataccccaagttgtttctgcaacaaatgttatgtgcatgtatatcataaaataagaccatctgtaatatgaattcaattcttggcatccgacgttattaattcagttgattgccaacaggatggttgttttgctgctgagaattacatctcattcggtctgattttgccact

SEQ ID NO: 33902 - DNA, 2236 bp, Zea Mays
cgacgcgcctaaatttatgccgtggcggttagggcagtgacaaaaggggaagcgagaccgccgccacatgcctcctggcctcctacctcgcggctgcctcctcctcgtcgttccccatcttcgccgccacttgccggcgctttgttctactcttcgaagcagccactcgcataagcgccccgcggttatcttctcccccgtacgtgccgtctccggctactccgccatggcggctggttcgccggagcagcagcagcggagcgttgtggtcaaggagactgtggagctcacggagacggaggagcgcatctttcgccgccttctcgaggttgttcgccacttcagtctcggcacgcagctccgcgtcgccggcggatgggtccgtgataagctattagggaaagactccgctgacattgacattgcccttgacaatatgacgggtcagaatttctgtgagaaagtaaatgagtactcaaagttgataggggagcagcagaaaggaatcggtgttatccaatgtaaccccgatcaatccaagcacttggaaactgctaggatgcttattcttgacatctggattgattttgttaacttgcggtctgaaacatatactgaaaacagccgtatccctacaatggagattggtactgccaaggaggacgcataccgcagggacttgacaattaatagcttgttctttaatatcaacaataactcggttgaagatttaactggaagaggtgagtttgatggtacaagttcaagtaatgttttacaatgttcatgctgctatgtcatcatgaaggtattgaggatctcaagaagggccttattgttactcctttacccgccaaagctaccttccttgatgacccacttagagttcttcgagcaataagattcgattcaactttacattagatgaagatttgaaggaagctgcatctgatgaaaaggtgaagtcagagcttggcacgaagattagtagagaacgtatcggtcacgagattgatctcatgatgtcagacaaacaccctgttaaagcaatgtgtgacatccgcgatttggggctattttatgttgtattttcttttcctgaaaaatccaaccctcctgtttttgacaagtgtgattggcagtgtgtttcacatattgaagcagcttgggatcttgcatattctattggcagctgtgtgttcagcagtggttctgactccaagtcgcaggatgagcgaagaaggctgtacttgtatagtgcattattcaaccccctccgaagtatgttctacctggacaaaagatctaagaaggctcctgtttctagctttattatcaaggactcgctaaagttgaaaaccagcgatgctgaaacggttgtcaacatacatgctgctagcgaaaagtttgctgagttgattcctctcctcgagtcaaacgctgacgtgtatgctctcaaagagaagctggaagatgagtaccttgagataccaggagacagcgtgaagcgtgtttttgcagggcttatactccgagaaataaaggagttttggcgggtggcgctgcttctatccattctcttctaccgagaaactggaactcctgctggcaccctcgacgagcaggacgagctgcgtcggaggaaagagaaatacatcagagcagagcgttccataaccgacctagatcttgacggggtgtggaagctgaagccgatactcgacgggaaatcgattatgggagtcatgcaggtcaagtccggaggtccactgataggaaaatggcaacaacgtgtgctgaagtggcagcttgcgcatccggacggaaccgtggacgagtgcgtcgagtggatgaagcagtcgcagtcaaaacgacagaaagtggagtccagcacctgataatcaaaattgacagtttggtcgtagtcagttttcagataggttagcaactgcctgccccttgcaaacagtttttttgcgtagacggtgaactcttgctgctaagacagccagttctcccttgttcgaaacctgtcctgaacgtagagtgagagacgaaagagagagagagagatggtaatctataatattaaaatatagcatgaatataattgtcctgagcacaaaaagaaatatagttgtcctgagctcgtagtatatatgtccataagcctcaaattggaaagacgataagccaccctcgcacttggcaagactgataagtgcctgctggaacc

SEQ ID NO: 33903 - DNA, 464 bp, Zea Mays
aatcgtgccggcgaactcttcctgcccggtgattcagagcaccatacttcgattctactagcgctaaatgaagaggacgaccgcacgaacacggaggacgtatactcaccgacggttatggcgtcgagtctcctggcgacgatgtggtgcggcttgagcgccaaccaagacttcagtgaggaattcccggtgatgtaggggccaatcccgccgactatgttgtggaggcctttcccctcggtctgtagatggctccggactccacacacggcgcggatggcggctcggtgaaaagttcctccgcagcggcaccacacttcctctccctctctggtttgcgacgtggccagggtttccaaggttcaggatggtgcggacgggtcccaggggcgctaaatatggacatgagtggtggccgaggagtccggaaggtggatggctaactggtcggtcctggggaaatt

SEQ ID NO: 33904 - DNA, 1451 bp, Zea Mays
gcataacggcgaatagtccatccatcatcagcttgagacggagacgacaagaacgacgctacctcaccatcttaatcttattagcagcaaatagcagatgcagatcaataaacccttaccaagcccaatgcagggagcagattctctctctctctctttctcacacacacacaaccccaatgatccatacacacattttcatttttgagctgatatgttgccacaaagcgaggttctggatgcaaagtgagcagccacaggccacagcagttcttttctcctacgacggatccggtcctgggagcagcaggaggactaggaggagtggcgtcgcgcaggccacgcagagagtcttcctgtatccacaggctcccaaggtctcctccatcgtgagcagcaagtacaggaccgcgtaccacttccagcctcccaagaactggatcaacggtgacgcctttgtgccggataccgtgatcgaggaccggaggctgtggtcaaggattgactacggcaactactacgcttccaagtcgttcttcgactcgaagaaagggaggagggtcatatggggctggacgaatgagacggacagttcgtcagacgacgtcgccaaaggatgggctggaatccatgcaattcccaggactatatggttggataaagacagcaagcagctgctgcaatggccggtcgaagagatcgagtcgctccgaggaaaacaagtcagacaccaaggcctggagctcaggaagggggatctgtttgagattaaggaaattgacactctgcaggcagatgtggagatagatttcgagctcacatccataggcagtgccgacccttttgacccttcctggctcttggacatcgagaagcagtgccgggaagcgggcgcgtcggctcatggcccgttcgggctcgtggttcttgcttctgagagcatggaagagcacacctccgtgcacttcagagtgtactacagatcacaggagaagcacatggttcttatgtgcgccgatctgaggaaatcgtccttgagaccggagctgtacacgccagcctacggaggcttctttgagctggacctggagaaggaaaagacggtggtatctctgagaactttgatcgatcgctctgcggtggagagcttcggtggaggcggcagggtgtgcatcatggccagggtctatccggcggcgctcgtcgacgacggcggcactcgcatgtacgcgttcaacaatggcactagcaccgtcagagtgccccggctagaagcgtggagcatgaggagggcacaggttaacaagggatgaggaggaacacaaggccatttgatagctagaggagaggaacagagcatgggcacatgaattaaacacacactgctggtttaatttgctggaattaatcaatcaatcaatcaacaaacacacgaagattaaatcaaaaca

SEQ ID NO: 33905 - DNA, 2366 bp, Zea Mays
gctttgcttccgtacaaaaaaaagttagaatcactctctcgagagacagagagagtataaactaacgcctaccataaatacaaaataaagaaagacaaaaaaagaaaatccctattcctcctcagcataccccttcttccttcgtccccattgatccccttcccccctccactcgtctcccaaatcgccagcgagcgccatgccgccgcctcccctgccctcgccgcccctgaccggctgacccgacctccccactgtctttcccttccacctgggcgccacagcgtttcccttcccgtcaccacgaaatcccggagggacgaggagggagttcgtcgcctgatcgatcggccgatccacgccgccggcctcccaatccttcgctgccgccatgttcaacaagataatcaagaggggaaaccgcaagggcgcgcgcggggacagtgcggaggtcgccgcgcgccccgcagcgccctcgtcatcctccgggagcggcggcggcggcgcggggggagccgcgcccgtcaccgtcaaccacgcctcccgggccacagcgccttctccgtcgtcgcccacttctccgcacgtcacgccgtccgcgtttgcgaccaacccggcggtgggggcggcgtcaccgccactcctcgagcctctcccgctcctccgcgacgtcgccgccgcagaccgtccgggcctcatcctccgcaagctccgcctcgtcgcggcgctcttcgacctctcggactcgctcaagcacccgcgagagaaggaggccaaacgccaggcgctcctcgagctcgtagattacgtgcaggctccagctcaggccgcgggcgccaacgcgcccacgcgcctcccggaccacgtccaggaggcgctagtccttgccatctctgccaacatcttccgcccgctgccacccgcgctgcacgagtccgccgccgcgatcgaccccggcgccgcgcccgacgacgacgaggagccatacctggacccctcctggccacacctccagctcgtctatgagctccttctccgatacgttgtttcgcctgacacggacaccaaggtcgccaagcggtatgtggaccatgctttcgtcctccgcatcctcgacctctttgactccgaggatccgcgtgagcgggaatacctcaagaccgtgctccaccgcatctatggcaagttcatggtacaccgaccattcatccgtaaggccatcaacaatgtgttctaccggttcatctttgagactcagcgctacaatggcataggggagctccttgagatccttggaagcatcattaatggatttgccttgccaatgaaggaggagcacaagctattccttgcccgtgctctcatccccctgcacaagcccaaatctgttgtgatctaccatcagcagctatcctattgtattgttgagttcgttgagaaggactacaaattagcagatactgtgattaggggtctgctcaagtactggccagtcacaaattgccagaaggaggtgttgtttctgggggagcttgaagaagtgctcgaggcaacacagcctgcagagttccaacggtgcatggtgccactgtttaagcagattgcccgatgccttaacagttctcacttccaggttgctgaacgcgctttgttcttgtggaacaatgatcacattgtaagcttgatagcgcaaaatcgtggtgttatatttccaattatatttgaagcgctcgagaggaatatacatagccactggaatcaagcagttcatggtctcactgcaaatgtgcgcaagatgtttctggacatggacagtgaactatttgaagagtgccagcagcagtatatggataaacaagcaaaagccaaagagatgcaggagcaacgagaatcagcatggagacaattggaagctgttgttgctgccaaggctgctggggatgacatggttttggtcaactagttggcacgacagtttgcaatctgagacttggcactcgtgagtcgtgagagaaacaagtcgatgtctaggcactcacgtgaaagctttccggtcggcggtgaaatagcggagtactcgttagacatcatgctcacgtgcatggcagtgtgtccctgccaaaaaagaatggcggagcatcctgcttttctatgaaacactcggtaaaatttcatactgggatgcagatggaccacgcgttatcgtcttataagtgcctgctaaaaaaatgttgaagataagtatggtgtcaccgctcgccagctgccgccgcatgctgacttgcatcatgtacgtgtccctggacagctagagttattttttacaaaaaaaatcttttaatcaatattttaatattaacctggga

SEQ ID NO: 33906 - DNA, 2609 bp, Zea Mays
caaatgtccattttccttacgtaacttatcttccttatcctatctccatcgccccatttcctatcctcccagccgatcccctctccctcacggcgccctctcccatggccgtcggccctccccgccatggacgtcgctcttccttcctacaccgccatggcagtgcctccctgcagcagtccggtgaccgggccctccccttcccacgtcatgctggtgccatgtcttctccctcaccggccaacctcgccagccaccaggaaggtgtctccctctcggcagctcccatggccaccatcagccctagctgcgcttgccctggttccagcagctcgacgccagcccctctcaatcttccatcgctgccgctcagcttgtcccagatatattgtatgttcctctattttattgtggtaattgtgcttacattaggtggtgttgaagcgatgcaaatggtagttagtgttttaagaaattaaccagttagttttgtcgatgtgctcggatgaatatatgtgtgtgcataatgtgtttaaattgattctttgtttgcataatgtcaaagtaggttcaaaatactagattatgtgaagtaaatggattcatggctataaaatagcagaaatctatatatgcgattagaaagtgtcaaacacatgataagtgtagaaagtatatatgagtaaattgaatgttggctgtttggacttgctatttggactgtgtctagttttagtatccaggtagttgagtgaagtaaacattgttttctgtagaaatgttatatataaaagttgtagctcacttctttatcttggttgtgtaaaaattgcatgaccataggtttagtagtttaggagttatgatttttcaaagtccagtctcagaatctgcccagattctgtactgatttcgaaaataaccttgtttgcccaagttaaacttagaatcagctcttagtaattataggagaattgtagtacttttcttaagctttgcaacaaattttggagcaccaattttggtggtctataagtcaggttatggctgtttgaaatgtgatgtttgaagctgtcaaaatctggacaacaatgcttgtttgtattaactgacttcgatacacattgaatcaccttgagatgattataaatgaactgtagacaattctattagctttctaaaaagtctaggatcacctgatttggacttctaaaactccagttatgaattaatgaagtaagtagtcgaattctgtccaaatctggacagaaattgcgtttagtactgtttgacatttctaaatgtcgaatctcatggtgatgataataccaaaattttagaggactttataagcttttcaaaaagtcttagtttactatttttggatgaatattgtgtaagttatgaataaaacaactagctctacaactttcatttaatcaagcgtgtttctgctttatcttgctatgctctgaccgaagctttagtttttgtgcgactggtatttctgtgttctgcagatcatttagctcaagtaattggtagttcaaatgtcataatgtttggtttgagatttctatccgtggatggttcgtctggcttatctatgcttttaggtgcttcatctggcttatctatgtttttgcgctctcgcttttgcatgtgttgcaggatgttgacaattggaaatccatgtagcaaataaatgattttggaactagggacaggtcagagtctagagcatgttcattccacacattggaggtggattttcctcaattggagatattgacaaattggaaaaaatgtgacttgacctgtgctgcaacaaccttaaactaggaggggcttctaattcttcatctctaccaacagtcctctcctgttactttttaaaccaataactttttcaagtttgtgcagatgcacacatccttgagccaaaatagaaaaaaaatcatagaagagttctttggctgtcacgtgattcaagagtattaatgatatacaaaagtttgctttatggcaagtcaagtaaccaccaattttgggcaatgacagggatgtgcagtggtggtctcttaaaagaattttgtgttccagcgtagctatttccactgcaaactatcaaatcattacaaactggcattccatggcttccactagttgagtccccatgataaccaatccttgttatcatatacttcttcaagtttgacgtcagcaacgtggtcatggtgaccggcgggaggaacaccgggcgtgtaggagtgatcaagaactgggagaagcacaagggcagcttcgaggtcatcgacgtgctgcttggaggcttttgcatgctatttctagttttctcttatttgttgtacaagaaaacatagaatggaattcaaatttggtggtcgcaaaagtgtggagacttgaattcatataaagttaggcttaacattagtgcaaaaagttgtattttagttttgatttagagtacacttatgtatgccttgtttgacaatacttatttatgatatattgaatggtacctattgtaatcgtctattattgtaggatattcgagacagtttgataaatactttatgacttataat

SEQ ID NO: 33907 - DNA, 1759 bp, Zea Mays
cgatggcgctcgccacgctgctggcgcacctcacggcgggccgcttcggccgcgtgctggcgcttacgagcggcggcgcgccaactgcgtccgccgcgcaccgcgttctccacctcctcctccgcacctccccgccgcccccgctcccgcgcctcgtcgccatcgcgcgctggtctcgcgcccacttccgcgcgccgctcccgctccggctccacgcgctcctcctggcccgtctcgcctccgacggcagcctccactctctcctccgctccgagctccacgtcctcgccgcggggcgcctccactcgcccgcgtccatcctccgcgccctccccgcttcgtccggcccgctcgtcgccgacatgctcgtcctcgcgctcgcccgggcctcccagccgctggccgcgtacgaggcattcctcctcgccggcgccgactgcccgcgctaccgcccttcggccttctccgtgaacgccctgctcgccgccctcgtccgcgccgaccgggtcgacctcgccgaccgggcgttcagggcggcgctgcggcggcgcgtgtcgccggacttgttcacctttaacatcgtcatctccgggttctgcaagactgggcagctccgcaaggccggtgacgtcgccaagaacatcagtgcgtggggggtggcgccctcggtcgccacctacaacaccctcatcgacggttactgcaaacgcggacaagttggaaaaatgtaccatgtcgatgcgctgttgaaagagatgatccaagctggaatttctcctgacgtggtcacattcaatgtgctgattaatggggctctgcagagaggggaaggtggaggacagcatcaagctggtggaagagatggaggagctggggttggcatgcatattgtctaccatgaacagtgtgctgaacgggttttgcaagaaaggcatgatggtggaagctgagggttgggttgatggcattgcacagaggggcatgaaacccaatgtgattacttacaataccttggtcgatggataccggcggcttggaaaaatgaaggaggcagcggcagccaaggacgctatggcagggaaggggattagtccaaatgttaaaacttataattgcttgataacagggtttaccactagtagggattggagaagtgtttcagggcttctcgatgagatgaaggagaaaggtgtgaaagcagatgttgtcacttataatgtgctcattggtgcgctgtgttgcaagggtgaggtccggaaagcagtaaagctcttggatgagatggtggaggttggtttggagccaaaacatgtggcgtacaataccattataaatgggttctgtgagaagggggacgctcagggtgcccatgaaatcaggcttaggatggagaaacgtaagaagcgggcaaatgtggtcacatacaatgtgtttctcaagtacttctgcaagatggggaagatggacgaggctaatgtggtactgaatgagatgttagagaaaggtctagttccaaataggatcacttatgaaataataaactcaggcatgatagaaaaaggttatgtgcctgatataagtggatatgctgcagatgtttctaaaaacttgacatcttcctgaaagatttgttcttgtaatgtgccaatatagcttgttagaacttgctgtgatgtaggcttgaatccttatttctgataggacatgttttgtcttgtcttgttgggtgtggactgtggaattgtgattacttgttgag

SEQ ID NO: 33908 - DNA, 1033 bp, Zea Mays
agggctcgcgcctcctctcctccgacccctataagcacccaaccctagcgcaaaaccccgcctccgctggacaccccgctccgcctccactcctcgcgccgctgccgcatctcctctacagaaggagagaaagagggcgaaatggtgaagcacaacaacgtcatccccaacgggcacttcaagaagcactggcagaactatgtcaagacatggttcaaccagcccgcccgcaagcagaggcgccgcatcgcacgtcaaaagaaggctgtgaagatattcccacgaccaactgctggccctcttcgtcccattgttcaatgccagactctcaagtacaacatgaagtcaagggctgggagaggctttacccttgaggagttgaaggctgcgggcattccaaaaaggcttgctccaaccattggcatttctgtggatcaccgccgcaagaacaaatcccttgaggggctgcaggccaatgtccagaggcttaagacatacaaggccaagctggttatcttcccaaggcgtgctcgcaaggtcaaggctggtgactctactctggaggagcttaccactgctacccaggtacagggtgactacatgccaattactcgcggtgagaagcgctctgtagaggttgtgaaggtcacagatgagatgaaggcgtttgcggcctatggcaagctccgccttgagcggatgaacaagaagcacctcggtgcccgccagaagaaggcagctgaggcagagaaggaagacaagaagtgaagcagccaaactttgtagcctgttttgttctgttcagtcatagcgagatgctacttccatcaagtgcttgttccaagttttttttgggtgctggaaatagagaccagtcaaatattttggtgtcctactgtttgataccttgtatttgtttgcgaactcagctatctaatgggttaatgaattcttggcgacgcacgattctgccttaatgttttgaatttatatagcaaaaaaaaaaaaaaaaaaaaaaaaaaagcagcatgtg

SEQ ID NO: 33909 - DNA, 1543 bp, Zea Mays
gaaaaagatccagccgtcctgctcagattttctttcaggcggtcttatcttctacgtgcgtgcctagtcttcatcttcaagctgccgccccgatgagctcttctccatctccctctcggcgccctgttttcctttctccagccgaggcccatgctcgaccgcgttccccctgcccagcgtcgcgctcctccttcctcctcctctgcgcgccgtcctagctccgctcggagctctctgctcgcccccatggcgcccgaccgagctcctccatagccaaaccgcgcccccgctgctcgccagtgctcgccgcgcgcgtccatctccttcctctcccccctctgcgcagcgccgcgccctgaactttctccactgcacccagctcgatcttcttccttcctgcgcccagccgagatcctcgcgcgcgctggctcaggctcagccgtcgctccctcaagcttggccacctccccctggccgcggttccccaagctccctgctcacccctgcttttctcggttgcctgcgcgtccatggcgcgcctgctcccatcgctgtgtgcctctgcccatggccgcctgctccaaccgtcgcgcccaagctcctctagtcgagctttgtgtggtcgcctaaccgcgctcctcctcggcctctgcttctcggtcgtgcccctacatcctccctcgccggtgacagctcctgcgcgcgcccaatttttcgtggcgagtccctcccatccctgctccttccttggtcgccgttccgaacccgagccctccctgctctcgcccttggtgccggccgcgagctcctcgtccggcccggccgtcaacttgtttgtgctcgtccatgtctcggacgccaccgtgccgtgaagctccctgcgcgtgcctctgttcttggccgtggtggtgttgtggcgtggcgacgtcgtgcgcgtcgcggcagccgtcctggccgtggaacagtccgtgccataaagctcgcccagccgccgcgaccttgtcttgctcctcgcgtcactattcgtcgagctcacccaacacttgcattatcctagccacagtccgtgcctcctcgaattccctccctggccagttgtcgcgtgcgctcgcgctcgccatcctctgctcgacctcgttgaaccccgaatcccagatgttggccaaatgtaagcgaggtccgtgtgcatcgctaatcaagtgctcggtcaaagactttaatcaaaggtcgtcgtcgttccgtgcgtcatcaagaaatcccaagagttgggcgaagacggagccagcagcatgatgtttaccaagtgctcgacacaagagctgaatcagaatccttgccgagttcgcggatagagcgtcagagttagtatggtacgttaattaatcgcatgatgcggaagacaagccaagtcgaccctaagcgcgggctactccgcatggtgatgctgatggatgaacctgcctgatcaagtgctagaacaaggatgatcgtcaagtgattgacgtctaacaacactaacctagtgttatccatgcaagccccg

SEQ ID NO: 33910 - DNA, 2275 bp, Zea Mays
ctttttttcgagcccatgaaaaacatcattactttattcaactacccaagtagagggggctcttgtagaggcgcccatcccacagtccgacacactccggtaaagatcgcccacccaatgccatcgccgccgccgtccacggcagcggcggcggcgctgcagctggagcccctcctcccgcacttgtccacgctttcccattacaagcagttccacgcgcgcctccatgccttgggcacgctccattcctacccttccctccgcgcgcgcttcctcgaccgcctagcgctcttgccgcacgccgacgcgcttccgcacgcgctactcctcctccgctccctcccgtcccccgcaaccaacgacttcaacgccgccctgcgcggcctagccgcctccccgcaccctgcgcgctctctcctcctccttgccggccgcctcctccctgctcccgccccgccacggcctcgcctcgatgcgctctccctctccttcgcgctgaaggccacagcccgatgctccgacgcgttcgccacactccagctccacgcgaccctttttcgcctcggtgtggctgctgatgtccgcctgatgaccacgctgctggactcctatgccaagtgcggcgacgtcgcgtccgcacggaaggtgtttgacgaaatgcccgtgcgcgacgtggccacatggaacgcgctgctcgcagggctggcgcaggggacggagccgaatctcgctctattgctattccgcaggctggcagggagctttcgggagttgccgccaagggaggagccaaatgcggtgactgttgtcgctgcactttctgcatgtgcacaacttggaaccttaaaggatggattggctgtgcatgagtttgctcgtacaataggagctgtggacaatgtttgtgtcggcaacgcacttattgacatgtactccaagtgtggctcactgagccgggctcttgaagtgttccattccatcaagctagaagaccgaacacttgtgtcctacaatgctacaattcaggcgctttccatccatgggcatggggaagatgcactgaagctgtttgatgaaatgccagctcgtattgaaccggacgaaatcacttaccttgctgtgatgggtgggtgcaaccatgctgggcttgttgatgatgggcgcagggtttttgattccatgcgggttcctcccaatatgaagcactacgggaccattgtggacctccttggccgtgcaggccgccttgctgaggcatatgacatgattatgtctatgccatttccagcggatattgtcctctggcagacattgctaggtgctgccaagatgcatggtaatgtggatctagcggagttggctgccacaaagcttgctgatcttggctctaacgttgatggtgactatgtgctcctgtccaatgtatatgcatccaagtcccgatgggtggatgttggtcgagtccgtgacaccatgcgaagtaatgatgtgaaaaaagtccctggcttcagctacacagaaatagatggcgtaatgcataagttcataaatggtgacaaagaacacatgaggtggagggaaatatatagagcattagatgaaattgggtcaagaatctgtgctctggggtatgagccagaaacgagcaatgtgctacatgacattggggaggaggagaagcagtatgctttaagctaccacagcgagaagctggctattgcatttgggttaatttctacaccacctggggagactattcgagtgatcaaaaacctccgaacatgtggagactgtcatgtggtggcaaaacttatctctaaagcctataatcgggtgatcattattcgggacagggcaagattccaccgtttcgaagatggacattgttcctgcagagattactggtaaaaatgctggcacactggtcacttgcagccctactaaacacaacatgtgctccttgaggagagttcaagtgatgtgactgcatttctagtcaaaagtacggatgaaagtggatgacatacatactcttgaccaccatgttactgtccagagggctcatcaagttaaaaagttcttagaagatgcaaagttatcttacttgcatgaactcctgggttcgcataacaattcgagaagtgccttggaagcagaaccaaaaaattgtgataactgtgcaagctttgaattgaaatcgctccatgactgttatcattcaatattttcacaatctacaagctctcttacgttttcgaaaaaaaaggtgtgaaaa

SEQ ID NO: 33911 - DNA, 2023 bp, Zea Mays
gagaaaccacgcgtgtcagccagccattggatcaccaccattcgcgctgttcggcgtgcgcacccgatcccgtctccgtgcggctttgtgagtagagaagggaaggggaagcaggagcaggaggggttcgtcatcgcgtggtggccgcgccgctctgttcctccgtcccctcctccttccggctctcgctgtcacatgtcgtgtggtgtgggggcgctctgatccggatggtgcagcgccgcgggatcgcccacggccatgattgatcgcgaacgagcagtttatttgatgcagaggaaatgcaagttaataatgaggcaccactagggtgcctcaagccaaatatttctcagtataactctccagagcagataggtggtgttgaagggtttcctgagaataatgaaaaaaggaatgatattgttgctgcggaaaaaatctgggaggcgactccaaaccaaggccttagcaggcccatctaccgacaagaattttatgcctggccatatatttattcagattatcaaatcgtgcgtcagccactaccttatggttttgacaaccaattttatcagataaatagggaccacggtttccctattgagaacagggttcaatatcttccattcaagatgctccctcaaggtcacccccatgatgcacagcttcaggaatttcagtattttgtggttattgactttgaagcaacctgtgacaaggtgaacaatccatttccacaagaaatcatcgagtttccatctgtcttggttaacagtgcaactggaaaactcgaagaatgcttccaaacatatgttcggccgacgtatcatcaatttttgactgatttttgcaaggagcttactggcatacaacagattcaggtggacagaggtgtgcctctaggtgaagccttactcatgcacgataaatggctagaggacaagggcatcaagaacacaaactttgctattgtgacctggtctaactgggactgccgtataatgctggagtcggaatgcagatttaagagaatcaggaagcccccttattttaacaggtggatcaacttgagggtaccgttccaggaagtgtacggggacgtccgctgcaacctgaaggaggcagtccagctggccgggctcacatgggaggggcgcgctcactgcgggctcgacgacgcccgcaacaccgctcgcctcctggcacttctgatgcaccggggcttcaagttctccatcaccaactcactggtgtggcaacctgccgccgctccgcagtcaaccgccgccacctgccacttctccccggaccgctctccggacccagtcgtcgtccagctccagcaccagcagcagcagcacaagccgaaggaggcgctggggtctcccgcgtcgctggtgaacccatcgtacgccacccccgcgggagggaaggacagagccatgtactgctactgcggggtgctgagccggtggagcgtcgtgcgcaagccgggacccatgcaggggcgctacttcttcgggtgcgggaactggaccgccacccggcgcgccatctgcccgtacttcgcatgggcctcgtgaatagcaaagcaagcagagatctgggctggtgctttaaccgagggaggcgcgccatgttgctgcggctggctgctgcgcctcccagttccgtatatattattattgttattattatggtataataactttgctcgcgagacaatggaggttatctaggtagtgtctctaacctgtcgtactgacttctgtcgatagaagagaatggggccagatgctgcttaggtgtgatctatcctatccatccatggataataaagaagtttgtggattgctgttttattaacttgatggaactcctccgtaggtgtggtttgtgcaacttggattttgaaggcttgtgcgtctgtgagtgtttgatcaaatcgaaggtggtgtttgtttgctgaatgaaatggttatggaaggtgcctattattcctgacaagctctgttcagtgaga

SEQ ID NO: 33912 - DNA, 272 bp, Zea Mays
ccgacaatggggtcgacgatgtatagactacggcgctaggtggctcgcggtggcttgatatgtccgccgtgaaattgccctcaatttgccgcaccctgcgcatgattgttaccgaggatcgtcgcaagggggggtcgcgcacgcacccacagcccgaatccggcacccgatcggcgacgtggccgagctaccctggcggtggtggctttgcgcagcaacggcaggggaaggcaccaccatcacacgcacgactatggtgtcacctaccctgc

SEQ ID NO: 33913 - DNA, 594 bp, Zea Mays
ctagatctggcaggcagcgagcggcatggaacccgaagcctgtcgcccgccgagacggtggtcctcttctctcgatcgggtccgggtccgtgtccgtctgcgctgtgcgtgcctcctcgctcctcctcctcctcctggtgaccacgcgggcgggcgaacgacgaggaaggggagggacagggacagccgcaacgacgcacgcgcggagacaggcgtcgtccggagtcgctgcggtttcggcaggcggtagagacgtagaccccatatacgatcgatcgagactgaggtgaacaataatgcgacgattcagagcaccgccactatatgggccatcgccagaccgtattgttcgtcacttggcgagctggccagagagagagagagatagagagtcgttcgagaactcgttttgttgttgttgttgttgttgttgttgttattattgttgatgatgctgcgtgtgttgtggaattaagaccttgccgcggtgtcgagggacaggatgtcacaggctcacagcgacgatgcaccacgaggtaaccgccgactagcagactttgtaggcggcgacgcgcatcggcggcatgccgccct

SEQ ID NO: 33914 - DNA, 534 bp, Zea Mays
aggagctcggcctgcctcagcgcgaagggcagaagggccaaagctagccacctcgtcctgggcggctggccggacgcagagctcggctatggcgtcggccatggtagagcttggctgggctagatgttccgccgctccagtgacatcgcggaggcgacactcgggaggccgctggtgggccgtggacggtggacgagggctggggacatgcggagacggaactagacacctggccaagacgtggcatcggcggtggcactaggtggatacgaggtgatgactgggatgaaaacggtttcaaaaattttcggttttatggaaaccattttcgaatttttttatccgatccaactgtaacggtaattcccgaaaacgaaatcggtattaaatttcggaatcgatatcgaaatcggttaaacgttttaccgaccgtttacttcggttaccgattttaatcgaaatttaagtctcggaattttctgaaaataaaaaaaaatcaaattaattggcccaaggcccacacctcccactcag

SEQ ID NO: 33915 - DNA, 3786 bp, Zea Mays
tcggtaggttcgttccctcgccttctccctttcttcctctccaaacaagacattgcagaagaaaaaggcaaaaacaatccgccgacttggagaaaccctagaatcaagcgcggaaccgccctcatccaccatgctgcgtgcggctgtggcggcggcggaggagctcaggtctccgctgctcagggtcattgggacgctgagggacggccgcggctcggtgctgctgggtaggagggtgcgtttctgctccaactcttccgcgagcgacaccgaggcggcggtggcagaggcggaggcgaaggccgaggatgcgtccgctgcggagggtgaggcggacagcaaggcgtcttccgccatcgtgccgaccagcaccaatatcgatgattgcctctcggttatagcgttacctcttccacatcggccactctttcctggattctacatgccgatcaatgtgaaggaccaaaagctgctgcaagccctaatagaaaatcgcaaaagatcagctccgtatgctggtgcctttcttgtgaaagatgaagaaggtactgaccctaacatcgtgactggttcagattcagcgaaaagcattgatgatctcaaagggaaagacttgctgaagcgtcttcatgaagttgggacgcttgctcagattacaagcattcaaggggatcatgtagttctacttggtcaccgacgtttacggataactgagatggtcgaagaggatccacttacagttaaagttgaccatctaaaggaaaagccctacaacaaggacgatgatgttatgaaagctacatcattcgaagttatatcaactttaagggaagttctaaggacaagttccctttggaaggatcatgtgcaaacctacacacagcacattggtgactttaactaccaacggttagcagactttggtgctgctatctctggtgccaacaagttgctttgccaggaagttcttgaggaattggatgtatacaagcgtttgaagttgacccttgagttagtaaaaaaggagatggagattagtaagctacagcaatccatagcaaaagcaattgaagaaaagattagtggagatcagcgacgttatttattgaacgagcaacttaaggcaatcaagaaggagttgggtttggagactgatgacaaaacagcattgtctgcaaaatttagagaacgtatagaatcaaagaaggacaaatgtcctcctcatgttttacaagtcattgaagaagagcttaccaagcttcagcttttagaagccagctctagtgagttcagtgtaactcgtaattatttggactggctgacagtgttgccatggggaaattatagtgatgaaaacttcgatgtccaccatgctcagaaaattctcgatgaagaccattatggtttgagtgatgtgaaagagaggatactggaattcatagcagttgggaagttaagagggacttcacaaggcaagatcatatgtctttctgggccaccgggagttggaaaaaccagtattggtcgttcaattgcacgtgcactgaaccgtcagttctacaggttttctgttggaggtttggctgatgtggctgaaatcaagggccatcgacgcacatatgttggtgcaatgccagggaagatggtgcagtgtcttaaatcagttggtacagcaaatcctctagtgttgatagatgagattgacaagcttgggaagggtcattctggcgatccagctagtgcattgttggaactccttgaccctgagcagaatgttaatttcttagatcactaccttgatgttcctattgacctatccaaggttctatttgtttgcacagcaaacgtaatagagatgataccaaatccattactggataggatggagatcattgctatagctgggtatataactgatgagaagatgcatattgctcgggactatctagagaagaatacaagacaggcttgtggcattaagcctgagcaggttgaagttacagatactgctcttcttgctctcattgaaaactactgtcgagaagctggagtgaggaaccttcaaaagcagattgagaaaatttaccgtaaggtgtgtaaaataacttctgcatactgatctgccccctctatcagggaaggggaaaatgttggctgattgttgataatggttaagcaacctcaaggcattggtatggtataaaagatagctctgcagcttgttcgccaaggagtatcgaatgagccagaccatgagtctgtcagtgcctctgtaactgaggaatctggtaatggtgataacaccacaacaaaagatgagattttgaaggatcctgctgtagaagatgcttcagtcaccaacaatgttacaaatcctgcctccgaggaagctaatgaagaaaatttgacaagtgaagcagcaaaagaagacagcacatctaagggcaacaagggcactgatggagcagcggacaaggcaattgagaaggttgtggtcgattcatcaaaccttggtgattttgttgggaaacctgtgttccaggctgagcgtatatatgagcatactccagttggagtggtcatgggtttagcttggactgctatgggtggttctactttgtacatcgaaacaaaaaaagtggaggaaagggaagggaaaggtgcacttgtgcttacaggacagcttggagatgtcatgaaagagagtgctcagattgcgcacacagttggcagagctgtattactggagaaagagccagataaccatttttttgcaaactcgaaggtgcacttgcatgttcctgcagggtccacccctaaggatggccctagtgctggatgcaccatgataacatctatgctgtccttagctatgggaaagcctgtcaagaaggacctcgcaatgacgggtgaagtaacactaaccggaagaatcctcccaatcggcggggtaaaagagaaaacaattgcggcaaggagaagtgcgataaagacactcatatttccggcagcgaataaaagggatttcgatgagcttgcttctaatgtgaaggaaggcctcgaagttcattttgttgacacatacagtgaaatatatgatttagctttccagagtgacgccgggacagaaacaagctgagatgatttagctttatgggattgagattttttccccctagacccacgacagaaacaagtccgtcaagaggcaggcaaaccagaccattgtaaccaagatgggtggagttaattgatattcacgagaaaaatgaaatcctttttttttgcccccaatataacatcattgaatttaagagatttttggctaggttgtacgtactagtgtggttgcccatctaggtggtatagcctatattattagtaggaataagaaaagcagcatggatgcaccatctgttatttatatttattgatttaagagtgttctctaaaagcagcaggtatgccccagttgttattcattaaatttgtttcagtgagtgttagttacctttggatactgtactgtgcgtcatcaatttataggatgttttgattttttttggatacacaaacttctatcattatgcatctaatttgtggccgattttgattttgtagtccttcctctgtttcaatttattggatgttttgagtttttttttatacataaatttttattgttatgtatccaatttatggatggttttagacatataacgtttattatgtatctagtaaaaatggcgatctgtaatttagaagagggtggtaaaaacagttggg

SEQ ID NO: 33916 - DNA, 1935 bp, Zea Mays
cggcagcttgatgcaggcccactggcacaggcccatggccccgcgccgttacgattgggttggaccgttggacgtgccattgccgaccgagcctgaaatcgttctatcctcgccgccgccgccgccgccgccgtttgttatcgctcggagtttctccgttcccgtctctccggccgctgcaggttatcaaatacggtgaaccttgtgttcctgtgaaattttgcagctcattatacattgaaggcagaaagtcattctccaatctgaaggcgaaacaaggtgtgcacatatatgttctagaggataaagttcactgagctgctgttgggcattggagagcccagttgtggttctatgcctgaaaggaattctttgtaattttctcctgtatctggttctgttatcatcattattttcctggtgtggggcaatcatgtcagagagcgagttagcagtaataaaaccagaggcattgaaaacttatatctggcttcagtgctttgatggctccatacaacaagtggaggaagaagttgccatgttctgccctatgatatgtcgggaaataatgaaaaatgggacagggtcatctaagaatcatgctatagttctaccggaaagagttaatccggcaagtttgagtttgattcttgattattgtcggtttcatcaggtccctgggcgctcaaacaaggagcggaagtcattcgatgaaaagtttgtcaggatagacacagaaaaactgtgtaagttggcttctgcagcccttggtctgcagttaaggccactagttgatcttacttgtggagcacttgctcgaatcattggaggaaaaacacctgatgaagttagagatattttccatttaccagatgacttaacagaggaagagaaactggagccactaaaaaatttaaatgatgatcctacaattcgtttattgaaccgattgtatgcaaagaagcggaaagaactgcaggaacgccagaaactaaaggatgttcaaacacaagaagaacaaaaagacgagagatctttggatgagttactttgttttataaatggagatggagattccagaggtgggaaagcttctaagagtaagaaaaagaataaaagaaggaaagatcaagctaagaatcccacaaaagcgaactccgaacctgtaaataaggagggagcttcctgtgtggttccgtgcaaagcagataatggtaacatttctaggcatccttgccaaagtcaaaatttgcaagataccgagtaccccttcgacaatgctgaccttgacgatggacttgatcctgcaatgagggaggagattgatagagaagtggccgacttcgagatgaagttgaagctagcttggaccgaaagaatgagtttggagcaggaccaacaaatggagtcacatgttgatacgcggtgaaaaccttaggcaggaaggagttttggtcgagaggtacaggatgacattgcgaggtgctattgtcatatgctgtgatttgtatgtaccctgctcttcaagaaagtagtgcccaaccatgttactgttaccccccaaagaaaggtgggtgactttgttagtgtaaaaaccagaagttttgaatctatgtatgttcattaattttgacaggaactcttatcattatgaaatgaataaaagggaaaatgatgtgttgttggaagttggcggaaacaataggtcgcttagctctataccgttggttcaatagtgctccagttttttctatccacgtttgggactggcttgttgagttgtttttaccgtgtaaactcggtcaaaatgtttgcaattatggtatttgtggactgctggataattctcagtcaaaaagtttgtgaaaatgtattatttgtggactatttgatacttctcagtcaaaaagtttcaccaaatatggtatttgggca

SEQ ID NO: 33917 - DNA, 2001 bp, Zea Mays
gcaagctcgaaattaatccagctacaaatggaggccgtgaatgagaccaatggcaacttgccaggctagaaagagagggggtgaaagcatcaaagcctgcgtttgtcccctagcctcctgtccgacatggaagcctgcacttttatatactgttaccaggtggatcatctttgcatcttatcattctctgtcacctgcttggcttgggccttgggctcccatcactccatcaggccgatgccttcaatgcaagcttttcagtcccgagacgtcgtaatcgctagatgatcgatgaacgccaagaagattaagctgcacgactatcaccactgctacggatcgccgatgtgtgacccacagctgttcccgcgcgccgccgccgccaccaccgcagggctctccttgcacccggggccggggctcgtgggctccctgccgcagcggcatggcggcggcggcggcggctgggtgcacgaggagcacaccgcgacgaccccgagggcggcgcaggggcagggcggctgcgtcgtcggctccgacgccgccgcgttcttcgccgccgaggagctcatgatgggcacggcgcggttcgactcccctctcggcggaacgacgacggcactccaggagctgacagcgtttgccaagggaccgccgtttggccggccgaggcccacgacggggggcgagcgcgagcgcgagcggctgtacccagtggacccgctgccgctccgcgactgcgcggcggtgaggacgtactacgtccggccgcagcagcgcgacggcgccacggaggcgcctccttcactcgagctgccattccagcggcggcagcagcaacaagtgcacgggctattcggcgacccttccaccggcaggctactcggcggcggcgagcctcaagctcactcctttccagctcacaccctgaagcaggttccggcgagcacgtttgtccccgcgatggaggcgccgccgggcatgcagagccttatggacaacccgctgtccaggagctgcagtatcatcggtgcggcggcgacccacgcagggagcggtaacgccgccgcgccggggcaaggtgctcccagcaagacgcggattcggtggacgcaggacctccacgagcgcttcgtcgactgcgtcaacaagctcggcggcgcggacaaggcgactcccaagggcattctgaagctgatgaactctgatggcctcacaatctaccacatcaagagccaccttcagaaataccgcatagccaagtacatgcccgtgtcatcgacgtccgaagggaaagagaaacgagctgctgccgccaatgacgtgcagaatctcgaccccggcaccgggatgaagatcacggaagcgctacgcgtccagctcgacgtgcagaggcgcctccacgagcagctcgagatccagaggaatctgcagctgaggatcgaggcgcaaggcaagaagctgcagaagatgttcgaggagcagatgaagacgagcaggaccgtgatggggccgccgcagggcgccgacgtcgccttcatcggcgccggcgagcaggaggaggaggtggaggtggaggacgcgttcgacgacgtgcagctactggcggccgtgtccagcgccagcgtcggctaccgcgacggcggattccagtcgaagataagctagcctgtcgcctccagcctccaggcttcagctggcttgtcggcattgtaattgtagggtttgactacaaatgccatcgtagctatccatggaagatgatgcctacaatgtttgggacgacgacgacgagtgttttggagggaaaaaaaggaaactaaattgttggggatgcaggcaagggacgatcctcgtcgtccacttatgtcgttgattggaaggtgtgatcgtgcacctagcctaaccacttagttttaaaagttctctctgaactttagaatgtgagtgtctatttttgcttatttatttttaataaaaaaccatcaggtctcttataga

SEQ ID NO: 33918 - DNA, 3770 bp, Zea Mays
cttagcaggaggtgaggaaaggggacggaagcacgcagaccgggtcggatccaccggcccgcggaacggatcgaggccaccggcatcctcggctcgcgtcgcgtcgcggcgccgagctcgaaatccccggatcggtgcagctgccccctgccgccgcccgataacgcggcgggagggtggtggcctgtcgatctcgcggcgggagctggttaactacctgccaatttgtggatttgtgtgcgtgcttgattttggtgcgtgtgtggtggtgttgagtcgccggcgtggggtgtcggagctagggtttgggcgttcaggatgacgcgccgggtgcggcggcggacatgcagggaacgggagggtaaggtggtgcggggcgcatcgcgtgttgtttcggctgggccggaaggcgaggaggatgcggcggcggtggaggtggactggagggcgctgccggacgacacggtgctgcagctctttgcgcggctgaactaccgcgaccgcgccagcatggcgtcagcgtgccgggcttggcgagcgctgggctcgtcaccctgcttgtggaggacgctcgacctccgcgcacatcgctatgacagggaggtggcgtcgtcgcttgcctcgcggtgcgggagcctgcgtcggatacgcttgcgcggccacgaggcggcagaggccgtcctgggcctccgtgcgcgtggtcttcgcgaggtggtggccgatggctgccgcggcctcacagatgccacgctcgctgtcctcgccgcgcggcacgaggacctccagagcctccagatcgggcccgatcctctcgagcgcatctctagcgacgccctccgccacgtcgcgctttgttgctcgcagctctgccgccttcgcctctcgggtctccgtgaagttgacgcggaggccgtcggagcgctcgcccggtgctgccccctcctcgaggatgtggctttcctcgattgtggcaccgtggatgaggccgcccttgctggtatccactctgtccgattcctctctgtagcaggatgccggaacctgaaatgggctactgcatccacctgctggacccagcttccctccctcattgcccttgacgtctcccgcactgatgttccgccaagtgctgtttcacgcctcatttcccatgccaaaaccctcaagctaatatgcacgctgaactgcatttctgttgaggaggaacagcttcacaatcctgctgtatttagtaactctaagggcaaggtcgtgctaacgattaacagcgatatcttcaaatcttttgagaccatgtttccagttgtggatgtgaaagagcatgagtttttcaatcaatgtaactggagtcacaaagacaagatacctggtgatacgatgacatggctcgaatggatcctgtcacagtcacttctccgaattgcagagtccaacccacaaggcatggatggtttctggctgcagaagggcactacactgctgcttagactgttgaagagtttacaggaggatgtgcaggagcgggcagctacgtcgcttgctacgtttgtagttatggatgatgagagtgcaaatgtggatcctgcaaggtcggaggcagtgatgcagaatgggggcattcgaatgttgctggaccttgcaaggtgctcaagggagagcgcacaatctgaagcagcaaaagctattgccaacttgtcagtgaataccaaggttgccaaggcagttgcagatgaaggcggcattacaatactcattaatttagccaagtcgatgaataggcttgttgccgaagaagctgctggtggcctttggaatctctctgtaggcgaggaccacaaggcggctattgcagtatctggtggcattaaggccctggtcgatctaatatttcgttggcctgctggaactgatggagttcttgaacgtgctgctggcgcgcttgcaaacctggctgctgatgacaagtgtagcttggaagttgcaaaggctggtggtgtccatgctttggttacacttgctagatcatgtaaacttgatggtgtcctagaacaggctgcaagaggtctggctaacttagctgcacatggggacaacaatgacaacaatgctgctgtaggtcaggaagcaggggctctggaggcactggtgcaactaacaagttctcaaaacgagggtgtaagacaagaagctgctggtgctttgtggaacctgtcatttgatgacagaaaccgtgaagccattgctgcagtgggtggcgttgaagctttggttgccctagtgcaacaatgtttgaatgcttcagaaggtcttcaggagagagctgctggtgcattgtggggattatctgtttcagaagctaatagcattgcaattgggcagggtggtggggttgcaccattgctcacattggcacgctcagaggttgaagatgttcacgagacagctgcaggggcactatggaatcttgcattttattctggtaatgctctccgcatagtcgaagaaggcggggttcctgttcttgtaaaaatttgctcatcatcacggtccaagatggcacgtttcatgtctgcactagcactagcatatatgtttgacggaagatggatgaagttgctttggttggagcatcctcagatagcagttccaagagtgttaatgttgagggagctagaagaatagcatttaagcatatagaaacctttgtgctcactttctcagatccacaaatgttctctatggctgctgcctcctcagccccagcagcgctgtctcatgttgctgaagcagtgtttatacacgaagctggacacctgagatgcagtcgctctgagattggtagatttgtttccatgcttcggaatccttcaccaattcttcgtgcttgtgctgcctttgcccttcttcagttcacaatcccaggaggtcggcatgcagtgcatcacgcaggtctcttgcaggaagcaggggcaggtcgggtgttgcgcgcagcagcggcagcgacaacagcttctattgaagctaaaatctttgccaggattgtactcaggaacttggagcaccatcagttagggatgtcaacatgaacacccagcagaggttcatcctccaataaacaaaggcctctgcatcgatgggctgcttggccaatgcagaatcaaacagtttggccttcggagccttttgacatcacaacagttttggtctgtgcagacagtgactgaaggagctccaccgaaggtataacccacaactgtgaagtgactgaatgaaaacataagtggcgacccttcgcgtattggacgtttaaggttgagtgtgcaattttctagagttcattttgcgtgtacaagtaaaacttttttagagtcgatgagaattataaactggcatatagcttaacttatggatatttattccttattcgttagcgttgaggtgtgtggcggcgtcatgtagaaagttaggttattcctcctaggatacatgtaactttataaatgtactgttatgtattttcttccttatgattgattctgtgcatttatggatcgagttgtagattaccacttaacgaaacaaaggtttaatttgttcatcaacatgcgcatcagtaagcttattgagtatgaatcctcgtttatttttttttctaaaaataaacttacaaaatttttagtaatgctcttagaaaaaagcttactcagagaattctcatattttttagattttagaaaagattcttaaatctccatttaaaaaataaaaaa

SEQ ID NO: 33919 - DNA, 804 bp, Zea Mays
ccgagaagtaatggcgatccgaatcgattaatacccagttggggatctccaaccacacgacatatgtagcacttaacccttcatatgtcaaccattcccacagatcctccactacatgaactggtccgcgctacccgggagcacattaccctaccattcagcttcttgccaggagggtaactactactcccaccatctcccacgcccagtgcgcgattgtcttttcacgtatggaatagtcgggttcaggcttacccatgacgaggtatgtggccagttaaaaggtcctagatcattaggccaacaatcagtatggtccttaatcgacacagacgggcgacctttcctgctcaacctctggtcccattttaaactatttcaaaactttggcgcctgacagaggggccatgcgtggataatgaatttatcaacgtcttgatgccttctttatcccaagcccattttctttttgtaaaaacatgagtcacagatcataaaacatttttcttagtctatcagcatgactaagcatctctagtttttataaaacaggtgacaaggtgtggtaatcaacctttcaaggatggtaatgcatcaatggtttaatcaatcaactcctataacctaatgcaacatataaatgataaaaattttgtaaacacaaggaaggtggcaaatgcaccggggcttgcctttgttgcaaagaagatccaaaattcttctaccagatcaccagttagatggaacctcaccaatgggtattcaggtaatggagcaaatttctctttgatgtccacttcttca

SEQ ID NO: 33920 - DNA, 3750 bp, Zea Mays
gtcagccgccgtgcacgctcatcatatggcatagccccaagcccccaacggatcgagcgcctccccgagtccccgttcccctgccccagctgaccgccgccgagacgtgccacaccgcctccccctcccgccgccacaaccttcgcctccacgcaattggccgcactcctttccacctcccgctacaggatagcgtgggccggtcggcggcgccgacgggtggagaactggagatccacccgcacgcggactgcttccttcgctagtcgatgggaagtaagcgttgttaggtctcatgatttcttttgggagatccggagctgtggtgcctgtctgactcatcatctctgggacactgccaagtacgattaagagattcagaagaacttttgcaagaagggaggtcttgtactttggaactactcgatagccatatttttagagaggcgctggacatgagaaggaacatgctgatgggtccaatgaagatatgaaggaaatgcaacataaggcaccctctgaaagatcacaacctcttagaatggttgatgagcgtgataataatgagtggagcaaggcaactggtaaccaaggcacaaacagatatgcagatgacagaagacgtggtgatggatggggtacagctcctagtcgtgattattcttctgctagggcgccttctgatccagatgcatggaggcagcgcagccgaagtccatctccaagaggggtttggaacaaatcacgcaggaacaggagtcgttccagaagcagaagcagaagcagaagcagaaacagaagtaggagcagaagcaggagtatagggcgaggcagaggcaggagcagaagtccatatattgctgaccgtggatctgagtggagggttgagagaggcagaacatctggaggacctgttcggccctgtagggattttgtggctggtaggtgcagaagaggctcaaattgcaggttccttcatgaagatggtgggcacaggccatttgatgatcactatcctgctgacccaagggaaaggtatggttatcagagcaaggagtttatggatacaagaggaccaaatgactatttgcggagtaggcaatctcgagatcgttatgatgataggccttgggagagatctgaacctcgaagggattaccggtatcctgaacaatgctttaattttgccaaagggaaatgcatgagaggtgctagttgcatatttgcgcatagtaattctgcttctcatggtagatggagagatgagactagggaaagtgcccatgatagatttggccctgattcatcctatgggaataggactgagcaccgtagggtaaacaaaaacccttgtaagttttttgctgaaggttgttgtcgccgtggtgaaaattgttcatatctccatgaggaagctccccatagtcagataggagtgagtgcacctgatgaggctttgaattacagtgatgggcatgcagcaagaggaaactattcaaactggggtgaacaaaataatgctgtgcatgcaacctctcagattttatccagggatgacagggaaagtcctatttctcagagtattggcagaaatgattctcgcaatgattatgaaaaccagcattcaaaagatgctggaaagagccagtaccaaattattcatcaggaagattttggttcaccagggcaaaagaaacatgaagatgctatttcacaacagccacagttattgactcctgtccagactactgctcttagcatgcataatgaaaaggtatctgaaatggacagtcagaatgctccttcaagcattggaggtttgagcatgcaatcaggggttcgtagtgctaacattatagcagagcaaagcctgggtcaaatacttcagagacatgatccaattcctcatattcctgggccacaaacgcttccgatcaccacacaaccacagaatgttacgtcttcattcccatcaaatagccacgtgcaacaaaataactttcctatacatcagaacaggcaagagcagtttgtagttccacacgcagctgcaaacatctcaactcccagcatgcagagccagccaattgcttctcacatggggcacatccaacgtggcggctatggtatagagccacaggcattgcccaatatctccacacataacgggcataatttcaatgttgccagtcaagttccaccaaacattccaacagctgtgcatgctgggcagactcaggtgacaattgacatgccaaggttgggtcaagacagtggtcctcaaagcatacacaacatggagatgcagccaatgtctccaaacgtgcaaagccaatccttgcaggggttaccccttgtgccggcttccagctcagctgatatggccggagttcctgttcctcacaacgctgtgaaaagcgaagaagttagccgagttactgcatccctggcacaatactttggaaatactgctttcggcgctggtacggttggattacaaccgtcgcagccgaatatgaatgcaagcctgatggccactccacctgtggtaccaccacctgtccaacccaatccgtggccctgggcgcagcaacagacagggatagtccaacccggtctccctgttccacctcagcagcagcagcagcaacaacaggctccccagaggcagcaacaacaacaggctccccagagcttccagacgctgatcgccgttggtggcagtaatggcaactctatgctcatacctaacgcaggcgcatcggttggtcccgccaccgtggcggcgaaggaaaccgcgcctccagagagcaagaaaggagagaagaaaaatgcagacgcagaaaagaaaaatggcgacgcggagaggagaaatgccgaagcagaggcacaggaagacggcgacaagggtaagaagggcaaggactccaagcagctgaagatgttcaaggttgcgctcgcggacttcgtgaaggaggcgctgaagccgacgtggaaagacgggcagatgagcagggaggtccacaagaccatcgtgaagaaggtcgtggacaaggtgacgagcaccgtggagaacacccctccgaccaaggagaagatcgacgtctacatgacctactccaaggagaaactgaacaagctcgtgcaggcgtatgttggcaagtacgccaaggcgtagtagcgtttggccaagaacacactgacgcccattttgtgccccgaggtcggaaggatggaaagcaccgcgtgcatccgtgctcagaggtttaggatttgtgaaggcgcgcgaggttggggggggggggtgcctgggcttgtctgcagtttcagagagtttagcgtgtggtttgtgggcaaatggcgccgttccaacatctggctgtaacttttgtagaattgttttattctgggatttagaacatggtgtagcggaatcatgcatggcgtggatcattttttatggatagactatataggaggcatgcatggtgtggtgcccatcgacgtgctagtgttatagtattgttgatcggaggaccagaccagtcaaggaacgcacggtgtccctcttgatgagaagtgagttgcttgctcatcgttcctcatgcatggtgtgcagcagcgtgttttatcgtctatctatgagtagtaggtggaaagcatgtggaaccaaaccaagtaagaacttggctttctctgcctgattctgtggttgtgccgacgactagccggccaacacagattggtcga

SEQ ID NO: 33921 - DNA, 1994 bp, Zea Mays
atcagccacccgtccaccaccacccagcccatttctcgtccccaaaatttcgagtttcgaaaccaaaccaaacgaagcgacactgcacgtgtacgaacctacgacagctctctacttccctcgcgtcctctccatcgagagctgctcctgctcgtctcctcccacaccgcgcaattcgtcgggattcgggaaccctagcgccggatctccgcggcagcggcggaaatggcgaatcccctagcggggctgcaggaccacctcaagctcgcgcgggactacgcgctcgagggcctctacgacacctccatcatcttcttcgacggcgccatcgcccagatcaacaagcatctaactactttggacgatgctctgattcgtacgaaatggatgaactgcaagaaagcaatctctgaagaagtggaaattgtgaaacagttggatgctcaattaaagtcccttaaagaagctcctgggacaaggcggtcatcatcacctcctattcggtctaataaatcatttgttttccaaccgttggatgagtatccaacatcttcaccagcaccctttgatgatcctgatgtgtgggctccaccaagggatacaccaacccgaagaccaacaagaggtcaatctagtgcaaggaagtcctcccaagatggagcctgggcacgtggttcatcaaggactggaacacctagtcgaagcgcaaaacctaatgggattaaaggaggtgctgttaaatcaactgcctctaacagttctgtaaggaaagggaaacaaagttcaaacaaggctgattcaacgagtagtgatgctgaggaaggagtaagatgggatgatgttgccggacttagtgaggccaaacgactcctcgaggaagcagttgtgcttcctctctggatgcctgaatattttcagggtattcgtcgaccttggaaaggagttcttatgtttggtccaccaggcacgggaaagactcttttggcaaaggcagtggccaccgaatgtggaacaacattctttaatgtttcctctgcaacactggcctctaaatggcgtggcgagagtgagcgcatggtccgttgcttatttgatcttgcgagggcctatgctccaagtacaattttcattgatgaaattgactccttatgcacgtcgcgcggtgcctccggcgaacatgagtcgtcaagaagggtgaagtctgaacttctagtgcaaattgatggtgtaaacaatagctccaccactgatgatggccagccaaaaattgttatggttctggctgctacaaattttccatgggatattgatgaggcactgaggcggaggctggagaagcgtatttatattccacttccagattttgaaagtagaaaggcacttatcaacattaatcttagaacagttcagatagccgcagatgttaacatcgacgaggttgctcggaggacagaaggctatagtggagatgatctgacaaacgtttgccgcgatgcctcaatgaatggcatgaggcgcaagatagcaggcaagacccgcgacgagatcaagaacatgtcaaaggacgagatagccaaggacccggtggccatgtgcgactttgtggaggctctggtgaaggttcagaagagtgtctcgccttcagacatagagaagcatgagaagtggatggctgagtttgggtctgcctgagacctcggccatctgcttgggtcctgttcaaacattcgttttgtgtgggttgacacggcattccgtagcaatgatacggtgttacccgccggtggtcttgcttcatatagaccagaggcacgagctatcttgtctgtttccagtgatgctaggaattgagttcacgatcgtttcagttcttggtatatgcactttctgctgtcaaacgtatctcatcaagtagccgtggccgcctctatttccagatgctccgtgtttggttgaaggaatatcacaggaaccaaagttttagcgtgtttcaa

SEQ ID NO: 33922 - DNA, 1088 bp, Zea Mays
cgaaagtgccagaaaccattattcttccatacgccttttctgctgccgctgcatcttccactcgcgtcaagaaacgaaacccagctgcaccagcaacttctgccagcagacccaacgaccgaagctttttttttctttcttttcatcgccgccgctcggggttcaaggttcagcgcgtccccgaatgacgggcacgtacgaggcctccgaccgtcctcctcctcccaactccgccggctaccggaccgacaaagtccggcgaaagcggctgacggcgcagaagaggaaagagatcaaggaggcgttcgacctcttcgacatcgacggctccggcaccatcgatgcaagggagctgaacgtcgcgatgagagcccttggattcgagatgacaccggaggtacgtacgcgtgacgtgtgccaatggcgacgacaaccaaatcgggcagatgatcgcggaggtggacaaggacggcagcggcaccatcgacttcgacgagttcgtgcacatgatgacggacaagatgggcgagcgggacgcccgggacgagctccacaaggcgttccgcatcatcgaccaggacgccaacggaaagatctcggacatggacatccagcggctggccatcgagaccggcgagcacttcacgctggacgaggtccgggagatgatagaggccgccgacgaggacggcgacggcgagatcgacctggaggagttcatgaagatgatgaagcggacagactttggctctgggttctagtagtcacagacaagccaatcccaacatacattgatacataccatcggtgaaaaatacatatcacctagctactacgctacatatgactggagtattgggatttatttgagaaataatggcgtacacacaccacacatcattgtgcactaactactctagtacgtcctagctacgggttgtgtatttatttacacgtaatgaaacacatactactatttgtactgtcgtttttcagtaaaaaccagtaaaaatcgatatttttattggtggctattttggaatagccagtggaaaaatgcagttttcttaacaaaatgcaagtgaaaa

SEQ ID NO: 33923 - DNA, 1906 bp, Zea Mays
ctcgcctccctaccgcacacacggcctagcttcccagctcgttcgttgccaggcgccggccagccgcaggcggccaggctccgacgataaattacataatggaatccttggatctaattcgaagccattcgcgggcatcatactcaagaaacctcagcaggttggatccctgcccctccgtgcaaggggatccattttttcttcaccacgcaggcttttctcccctaaggcagcagcccctaaatcaggggattccatacgcattgcagtgctaggggccagcggttatactggagctgagattgttcggattctagcgaaccaccctcagtttcatataaaagtgatgactgcagatagaaaagctggcgagcaatttggatcagtatttcctcacttgataacacaggacctgccgagactggtcgcaataaaagacgctgacttttcagatgttgatgctgttttttgctgcttgccacatggaaattatcaaaagcttaccccgacacttaaagattgttgatctctcagcggacttccgactacgcgacatcaatgagtatgctgagtggtatggacattcccacagggcaccggaacttcagggggaagctgtgtatggtttgaccgaacttaaacgagatgacataagaaatgcacgcctggtagcaaatccagggtgttatcccacatctattcaacttccgctcgttcctttggtaaaggcaaaactgatcaagctaaccaacattattattgatgcaaaatctggagtcagtggtgcaggacgtggggctaaggaagcaaatctttacactgaaatcgctgagggtatccatgcttatgggataacaagccatcggcatgtgcctgagattgagcaaggacttacagatgctgctgaatcaaaagttactatcagctttactccacatttgatgtgtatgaaacgtgggatgcaatctactgtgtatgttgaattggcatctggagtgactcccagggatttgtatgaacacctaaagtctacttacgagaatgaagaatttgtcaagctgttacatggtagcaatgttccttgcacaagccatgttgtgggatcaaattactgcttcatgaatgtctatgaggatagaatacctggaagggccatcatcatctctgtcatagataatcttgtgaagggagcatctggtcaggctttgcaaaatcttaatctgatgatgggactgcctgagaatatggggctgcaataccagcccctgttcccttgatcttttgtgtcattatctattattacattatttaggagtccagaaaccaaattatcattactgtcaagaggtggcaaggagcctgacatcagaattcagtcaagtcgaagttagacagttagtgtagcttggtctgtgttgttttagctttattaaaccattaagagaataatgatgatggcaatttagcagtacaatggtagtattatgtgggcagcttggttccaataaaatcataagcctatacacatcttgtgcccgcaatgttgtttgctattttgatcacgaaatcaatattgagcttgaattcagttctgaggcagctatccttggcatcactggataactttatggtatcttttttactatgttcaagcaaaaagtttagcccattacagttgtactttgagaagattgaaatgtctcttagtatagttcttaagtctcttagtatgattctcaagttttatcctatagcagtatagctgcatggactcatagcttgctactgtagctatcttatctgcagcgtttcttttaacaggattttcatctctgcagcgttgctgctgtgtaaacatctgtaatacagacaactacgaaacgaactttcttgtttatgtgtgaag

SEQ ID NO: 33924 - DNA, 2196 bp, Zea Mays
atgatcttccgtcccggcaccgccgtgtgggtggaacacccagacctcgcctgggccgaggccgaggtcgtgtcctcgcccgcctccccgtcctcgccgtcctatgtcactgtcgtcctatccaccggtgttaaggctatagtagacggtaggaaggtcctgccgcgggacactgaggccgatcttgggggcgtcgacgatatgaccaagctcgtctacctccacgagcctggggtgctctgcaacctcgcactccgatacaggctcaacgaaatctacacatacacagggcgcatcttgatcgctgtaaatccttttgcaaagctccctcatatgtatgatatgcatatgatggaacagtacagaggtgtgcagtttggtgaattgagtccacatgtttttgccattgctgatgcatcttacagagcaatggttagcgagaactgcagccagtccatattagtcagtggagaaagtggtgctggaaaaacagagaccaccaaactcattatgcgatatcttacttttgttggcgggcgtgcaattggtgatatccgctctgtggagcaacaagttctagagtcaaatccactgttggaagcttttggtaatgcacggacagtgagaaatgataactccagtcgatttgggaaatttgttgaaattcagtttaacaaatctggtagaatatctggggctgcagttcgaacttacctcttggaacggtctcgtgttgtgcaaatttctgaatccgaaaggaattaccactgcttttatcaactttgtgcatctgggaaggatgcagataaatacaagcttgctcatcctcagaacttttactacctaaatcaaagccatatgtatgaattagaaggggtcaacgatgcagaagaatatttaaaaacacggagagctatggacattgttggtatatgtttttctgatcaggaagctatattccgaattgtggctgctatccttcatctaggaaacattgaattttctcctggaaaggagtttgattcctctgttattaaggatgaaaaatgtaaattccatctccagatggctgctgatttacttatggttgatgtaaatcttttgctttcaactatgtgctatcgcacaattaaaactcctgaaggaaacataatcaaggcagttgacagttctgcagctgtcatcggtcgtgatactcttgcaaagactgtttatgctcgactatttgattggcttgttgacaacattaataagtccattgggcaggacatggagtccaggtcacagattggggtcttggacatctatggttttgagtgtttcaaatataacagctttgagcagttgtgcatcaattttgctaatgaaaagcttcaacaacattttaataagcatgttttcaagatggagcaggaggaatataaaacagaagaaattaattggagctacatcgactttgttgataaccaagatatattggatcttattgaaaagaaaccaataggcatagtttcacttttggatgaagcatgcatgcttggaaaatcaacacatgaaacttttgcgatgaagttatttcagaacttaagagcacacccgagacttgaaaaaccaaagctctcaaagacggatttcaccctgtcccattttgctggaaaggcatgtcctgtgaatcacatttcttaggatccattgaaatcatcttataagttttcttcagtagcttcacgatttaagcaacaactccaagcactaatggagacacttagctccacggagcctcattacatccgctgcataaaaccaaattctctgaattgccctcagaagtttgaaaatggcagtgtactacagcaactgcagagtgggggtgtacttgaagctattaggataagtcttgctggttatcctacaaggagaacatactctgaattcatcgatcgctttggacttcttgtgcaagaatatatgggtgaaagatttgatgagagatcactgacacagaggatccttacagagctaaacctggagaactttcaagtaaagtatcctaattctattcaaagttggaccgtttcttttctcaaatgcatgacagaggtgcatatcattattattattattattaagaagaaagaagagtcatacaaatccatcatgccacagtttagtacaagagaatttgccaatcactaa

SEQ ID NO: 33925 - DNA, 2050 bp, Zea Mays
ggacgatgccaatcccagtgtttgtgtttgtcgcctagacgcctcaaggccctctttccccctctccgccttgactcactcacttggccactcttcttcctcctcatcaaaccgctctccagcacttgttcggaagaaaaagaaggatcatggggcgcgggcgcggccacctcctgctgctgcacgcgtcccctcacggcgctggcgccggcgccggcggcctgctgagggtcgggctcagcaggcgcggcggcgggctcgaccagcgcgcgctggcggcggccaaggccgcgaggcagcaggaggcaagccgtctcggggcctccggcggcggcgacgtccctctcgtcgactacctcaacacccagtactacggggtcgtcggcatcggcacgccgccgcagaacttcaccgtcatcttcgacaccggcagctccaacctctgggtcccctcctccagatgctacttctcgattgcctgctacctgcaccacagatacaagtcggccaagtctagcacgtacaaggcggacggcgagacctgcaagatcacctacggctccggctcgatcgccgggttcttcagcgacgacgacgtgctggtcggggacctgaccgtcaaaaaccagaagttcatcgagacaacgcgcgaaagcagcataacgttcataatcggcaagttcgacggcatcctcggtctcggataccccgagatctccgtcggcaaggctcctccgatctggcagagcatgcaggagcaggagctgctggcggaggacgtcttctccttctggctgaaccggagcccggacgcggcggcggccggcggcgagctcgtcttcggcggcgtcgaccctgcgcacttcagcgggaaccacacctacgtccccgtctcccgcaagggatactggcagttcgacatgggggaccttctcatcgacggccactccaccggtttctgcgccaaggggtgcgctgccatcgtcgactccgggacttccttgctcgctggcccaacggccataattgcccaggtgaacgaagcgatcggggcagacgggatcatcagcacggagtgcaaggaagttgtgagccagtacggagagatgatcctcgacatgctcatcgcacagacggatccacagagggtgtgcagccaggttggtctgtgcgtgttcgatggcgctcgatctgtcagcgaggggattgaatctgtcgtcgggaaagaaaacctgggctcagatgtcatgtgctcggcctgtcagatggctgtcgtgtggatagagaaccagctccgcgaaaacaagaccaaggagctcatactgcagtacgctaaccagctgtgtgagcgtctgccgagccccaacggagagtcaacagtcagctgccaggagatctccaagatgcccagccttgcgttcaccatcgcaaacaagaccttcaccctaacaccccagcagtacattgtgaagctggagcaaggaggccaaaccgtctgcatcagtgggttcatggcgtatgacgtgccaccgccgcgtggtcctctctggattcttggggacgtcttcatgggagcttaccacacggtgttcgacttcggcaacgacaggattggcttcgcggaatctgcatgagtgtggagagcactctcatctttataaagacgataccctatgtattagggatgtgtagtttactgtctatccactacatgccaacagtacgctgcaaataaatcggtggccaaaattgctgaaaccagaaacgtgaacagtactgctttctttgtttctggagaagagcaaatggatgcttcaagacatgcatgtccgatgtgtattgagaaatagagcgacgagtgctgctcgatcgtcttgaaatttgtttgttcatggtagcacagcttatcacttataaaataatttgtggatcgccttttataggaccaaattagatcatgagaggagggtgaatgagagtcaatattttttaatcgaaaacgatcttgggttcaatcctaactaacatcgagaactctctaagaacaaaa

SEQ ID NO: 33926 - DNA, 2338 bp, Zea Mays
ccgcaatggcgggctctctctttcccgctccgaaacattaaaccctagctccgcgcaccatttcccgaatccccaacccagcgatccgcctccagcgccgggccccaatcactgtgcgaccacgatgaggccgctgccgaagaaaccaaatgcagcgctgccggtgccgaagcaactcaaggtgcatcacccggaaaatgagtccctctctcgtttcttcctagagaagtggcgggcgatgatgcaggagccggatgggctctcgcagaacaactacctggccttcgccaacgccaaccgcagcctctgctcctccaaggagccaatccggaccctcaaggacttctcgaacgtcaagggtgtgggaacatggctcataaatcatatgaaaagtttctttgaaaagtcgagtcaggatttatctcctgccaaaggaaagaaagcaaaagggacaaaaagttatttgccaaggaagaacactgctgcttatgccatactaataacactccatagggcaaagactagcgggaaagattttatgatgaaacaagagcttattgatgctgctgaagccagtggactgtcacgagacgcgattggtccaaataaaagtaaagcaaaacagagttacgggaaggactggtacactggttggagctgcatgaagacacttctatccaatcgacttgtcaccaagtggagtaacccagcaaagtatatgctaacacaagaaggggaaggcactgcacgtgactgtctttcacggtctggattagatgattctgcacggcctctaacgataattggtgctcacaacacatctgctatggatccttctgttgccaggcacagtcctgagcttgtcagcgacagttctctgacaaaaaagaagagcaattgctaccgtcaagttcaagctactaattacgaaggaatcatttgttgcgattcagattcagaagagccatgtggaaaggacattcccctaaaaggcatggagcctattactagttgtggaccaccagatatttctcgtccattccaaggaacacccaaactgcaatcttctacaatgggttctgctaaactagctatgccacctcgtcgagccaatgaaaactttcttgaagcctatgaagttattttaatattggatgaccgtgaaaaattcgggtctcgttcaagaaaagttgctgataacatttgttccctgagccattttgctgtggatgtcaggcaattgcctgtgggagatggtatttggattgcccgtcataaggaagatcacacagagtatgttcttgatttcattgttgaaaggaaagaggttatggatttagatggctcaattgaagacaaccgatatagagatcagaaattaaggatgaagaaatgtgggctgaggaagttgatatatcttgttgaaggtgatctcaaccgtgcaccaaagagggttaaaacagcagaactactgggtttgccgatacccagaagagatatgttgatcttacacgttcggtaatagcatactatgatgcaagtttctcgatcgttggtaaagcttcccctgtttgcccaacctacgatgacttcaagagaaagtgttatgatcttaagaagaaaacagtgagcgacatatttggctgtcagcttatgcaggtaccacaagtaacagaagaagctgcacaagctgttgtagagctctatccaacccctttgttactggcaaaggcatactctatacttggtggcgatacctctgcacaagagaagatgctaaagaagaagaacgagatggtaaatgcaggagcaagccgaaacatatttcaccttatctggggtgacggatgaaaaatactctggactggaaccagttgcgggccaactgaactttggtggcttatggtgtcaccgtcgtggtgaccatcttttgtgtctccgagatttagaggctcccatgttctaaagcaaatagtggctccatagaacactagggatctagattaggaagagtttctctctacgtcgcgtctagagagtactctgctgtggtgtcgtggttgcacagtggaatgaagtggtcccttggatttacgtggtcgggatttcgtgtatcggtctgggttgtctggattatgtgctgtctcgagctacctcggggctgttaagtctacaggatagcataaaatatcgcagtgtacctacagggaagattgtatgggtcgcccatgtgttccatggtcggcgccttgtctggtcatctttggctgaggccctcctacatacaatgggtgtcgctttggctggccaagacaagagcagactgccctgccgtttg

SEQ ID NO: 33927 - DNA, 1655 bp, Zea Mays
aacgcgaagctttctgccgaaacagtggggtttgggcgcttgtccacggccgccgccaacaacgagttcctgacctccgccgtctcttccccgctccctcgcgctcgcagtcgcagctccggccgccctattttgcggaattcggtagatttgtttccttcatgggtcgcaccatcaagaaggccaggaaagcgaaacccaagaagtctaagaagaaaactgaagcgtcttcatcgtccaatcatgcggttgcctctggtccggctaaggcggagaaagcttcattgaattatatcggtgttttcaagctttctaacataaatgggaaaaagcgggaacctataccagcttcagcagttgatggtgacactgatgtggatagtgacagcagcagtgatgaagaagatgaagaaattaacgaggatacaaagcccatcctacatctaaaaaaggtggctcatgcggggtgtgtaaatcggatacgctcaatgactcaaaagccacatatatgtgctacttggggagatactggtcatgttcaggtgtgggacttgagctccttccttaattctttagcagagtcaggggcatctgcacccaaagaagacgatataatccacaaacacttacccatgaaagtttttagtggccataaagatgagggatatgccattgattggagtccacttgttactggaagacttgtttctggtgactgcaataagtgcattcacctatgggaaccgacttcaaataactggaacgtagatgcaaacccatttgttggacacactgctagtgttgaagatctacagtggagtcccacggaagccgacatatttgcctcgtgttctgtggatggtacgatatcaatatgggatgtacgtacagggaagaaaccttctatttctgtcaaagctcataaagcagatgtgaatgttatctcatggaacaggcttgctagctgcatgatagcttctgggtgcgacgatggcagtttctcagttcatgatcttagatcaattcaggactcgttggtagcacattttgagtaccacaagaaagcaattacatccatcgagtggagcccacacgaagcatcatcattagctgtaacatctgaagaccaccagctcacaatctgggacctttcattggaacgggacaccgaggaggaggctgagttcagagcgaagatgaaagagcaggcaaacgcccctgacgatttgccgcctcagcttctctttgctcatcagggtcagagagacttgaaagaagtgcactggcacccacagataccgtcgatgatcatatcgacggcaatcgacggcttcaacgtgttgatgcctagcaacatcgatacaaccattcctggcagcacagatacagcaatgccgcctgctgagccataggttaggtgtttctggtagctcatgattccaggttcatgcggtggtgagtgtagttgccatttgtcatgtgtcgacagtgctatgctgtcgtgttggagcatgatgggaaaattttgattggctggcgttctatgataatatgattaggatttaatatgtgcatgctttttttagttttaccagcatctttgatggttgtgggccccatcatatgtcaaattatcaaccgatgttttcgttgca

SEQ ID NO: 33928 - DNA, 636 bp, Zea Mays
aaattctagctcaaggagcataaatgataatttgaatgctaagttagaaatagctagtaaatcaacatcgtgtgtagaaaatgttgtaacttgcactaggtgtaaagatgttaacattgatgcttgtagtgaacacctagctcgcatttctaaattaaatgatgaagtggctcgtcttaatgcccaacttaagactagcaagagtgattttgataaactaaaatttgctagggatgcctacacggttggtagacacccctcaattaaggatgggcttggcttcaagagggaagccaagaatttgacaagccataaggcacccatctccatcaaggagaaagggaaggcccctatggcaaatagtgtgcacaagaaccatgctttcttatacaatgataggaaatattctaggaatgttcattgcaataatgttgtttcatatgctatggctgcttctagttcccatgttgtgcatgatagaaatttagcgaggagaaatgttattaatcacatgcctagaagaaatgttgttcatgtttctaggaaaacaagtagtgaaccttctacaatttatcatgctttaaatgcttcctttgctatttgtagaaaggataggaagatagttgctagaaaatt

SEQ ID NO: 33929 - DNA, 2110 bp, Zea Mays
caataattgctgagaaaaataagaatgagactagttatggaagactttaggagttcactgaagtgaatagaatctgctcactgctgaattagagaaggtggatgagaagctcaagttgacagagtctctccttgaaagcaaaaacctagaactgaagaaaacaaatgatgagaaaaaggctgctatggctgctcagtttgcggcggaagcaacactacgaagagtacatggagctcagaaagatgatgatatgccacctattgaagccatccttgcgccgcttgaagcagagttaaagctttgtaggaaggagattgcaaagcttcaagacgacaatagagctttggaccgtttaacaaagcaaaaggaggcagcactgctagaagcggaaaggactgtacaaatcgcaatggctaaagctgctatggttgatgacatgcaaaataagaaccaagagttgatgaagcaaattgaaatttgccaggaggaaaataagatcttggataggctgcaccgccaaaaagttgcggaagtggaaaagctgagtcaaactgtgagagagttggaagaggatgttctgcaaggtggtgcagctgccaatgtcgttagggattaccaacgaaaagttcaagaaatgaatgaagaaaagaaaattcgtgaccgtgaacttgctcgagctaaagttactgcaaatagggttgctgttgtggtcgcaaacgagtggaaagatgctaatgacaaagtaatgcctgttaaacagtggctggaagagcgaaggttcctgcagggtgagatgcagcagcttcgtgacaaacttgctattgcagagagaactgctcgatcggaagctcaattaaaggaaaagtatcagttgcgcttaaaagttttagaagatggcttgaggggcactccaagtggatcttgtcgtccttccatggaaggaaaatgtataagtaatggacctccccgtcgactttcactaggtggtgctgatagtatatccaaaatctctccaaacggtgtgttaatgaggaggtctccatctttcaattcaagatcccccctctctaccagcagttgtttggtcctgaagcatgcaggaagaacttcaaagtcatttgatggtggtaccaggtcattagaccagggaaaagttctggggagtggacctcattcactcaatagatctacggatgcagttagagattgtgagacagctgatagttggaaggctaatgcagaagaaaaaagtaatgaaaccgcaaacaatgattcagctgacatggtctctggtgtactctatgacgtgttgcaaaaggaggtggtttccttgagaaaggcatgccatgagaaagaccaaactctaaaggacaaagaagatgcaatggagatgctagcaaagaaagtagatacattacataaagcaaaggaagtggaggctaaaaagaagaggcaagagatagctgctttggagaaaaaatttgccgcggtgtgccttgaacaagaacggcttggtaatttgagaggacctggaacttctcagactgtttcgggaagaactgcatcacgaggtggattgacgcgcaacctccaatagcatacatctaacttcaggcagagttggagcgtgctactcaagacaagggaacatgcgatgttggaagatataatggactcagtgaagaagtggttacaggagcagcattcggttgaggaaaattgcagtgacattgaagtggtctgaagtggaagaagtcccttatttttgtttggagagatgccctttccagcttgcttggcgctttttagtctgttgctttatgtttcagatgctagttcctggtcatctgtgtgccggcagcatgtgcttctttctatgctgttccaggctgtggatctcgtatgtgcttagctgcaggttgactggtgttgtggttctctgatatgtggttgtaaactggtatccctagtgtgtctgtttgaactctattgttctttggtttcttaaaaggagagtaatttctcgttgaaaaaaaacttggatgattataggtcaaagggatctcttgaggggtcaccacaacatcatcataatgacattcaatttgag

SEQ ID NO: 33930 - DNA, 1525 bp, Zea Mays
cgagcgagagagagagagaggagggtttccagagcggcagcggctgcggctgcctgccaacccctctacccccagctctgcaggctgcaccctaaagcagcgagcctttttaccactcttcctgctaccaccccacacggcgcacacaccaccatctctcgtcgcctcgcctccacttcctgggctacgtacccatctcaatcgcttcgactcctccgccgccgccgccatgtcggggctctacagccagggcttctcccctgcgcgaaacctctcccctcagattagaagcaacccggatgtcgatagtacttggcggagctgctcgctgaacaccagaagctggggccgttcatgcaggtgctgcccatatgcaacaagctgctgagccaagagattatgcgggtgtcaagcattgtccacaaccatggatttggcgatcatgacaggcatcggtttagaagtcctagtccgatgtcttctccgaaccctagagctaatctccctggcaatgggttcagtccttggagcggactacaagagagattaggttttcctcaacgaactagcatggactggcaaggagcaccaccaagtcctagcacccaagttgtgaagaagattcttcgtctggaggttccggttgattcttatccgaatttcaattttgtggggcgcattttaggacctagaggtaattctctaaagcgtgtagaagcatccactgggtgccgtgttttcattagaggaaatggttccatcaaagatccagggaaggaggacaaactacggggaaaaccaggctatgagcacctgagtgatcctctgcatatcttgatagaggccgagttccctgccagtatcatcgatgcaaggttgagacatgcgcaggagattatagaagaattgcttaaaccagtggacgagtcccatgatttctacaagaggcaacagctcagggagctggcgctgctgaactcaaccctgagagaggacagccctcaccctgggagcgtttctccattcagcaacggcggtatgaaacgcgcgaaaacaggccagtagagaaacacccgtgctctcctacctggccctgtccaggtgtgttacgcggtcgtcgtcacgaaagacgccatgcctgccttggggagggcaatgttttgccatgggcatgcgtgaaggaagcaatgcgccttcactggcggagtccgtcgtccggtgccagctaggtttcacctccatacaggggaagctgctgctgggaaagatgagatagatagtcgcggtcgcggatcgttggttggttgttgtatggtgttagaacattccttctatttgttattgacggtttgaccctagtatgtggtggtacactgcgaagttgctaaactagaggcctaagctttatttaggtggttcattgaccttgtatcataaccttttgacattatcgagttgcaaaataaggaccatcagctttgtacattgttgtgatctgtgtgccataaaccgccactagaacatg

SEQ ID NO: 33931 - DNA, 816 bp, Zea Mays
tagtgatcccagaaacaatttcagtacccttttgccaacttgacgcaacatcctcaacaacatctaacataggtggatcagattttgctggtggagaacttattgtgacatgagtaccagttttttcagtaagcaacccattagggtgtggtttaattgtataatattgggactgactagataccggaggcgctacaattgatctgatacatgtcatcgcttgcccagactaagttctcgctgcagcgcatgcagagggactcgatctcgtggagaggcaagatgtgcgcctcctcgccgacagccaccaatggagaaggaactcgagatagaaaaaataaaagaagaacaacacctatgttcacattggattgctctcgcctcggcgtgggtccacaccaccgcgggctcaacacgtccgttgacggcgtggaagcctccgcctcggattcgccgagccacctcgccctcctctcgtgctctatcaatggcacaggcgcgcatccgatgacagtcctgtttggggccctatgcgcggcagctctcgcctctgattagccgtcttgcctcgtcctcctctcgctccaccaccgcgggctcgacacctccatcaacgacagtggctatctcggacaagtggggaggaggcttcatggtggtgacaatctcgggtgaggcgactcgttgttggagcccgggcatcacgagggacaatgcaggcgtacagggggtggcgggcgtgggcctcgcggtcgtctcaagcggctcacacggggagcatctcacgagcgagatttctagtgatagggatgactc

SEQ ID NO: 33932 - DNA, 2473 bp, Zea Mays
aagagaagaatagaagaaaacaagatagaggaaagagaaattccttataactgctattatgtggaggcgtggaacgctcggagcccaatccaaagaagcccaccggcccacctcacaacggcctgttccgcgccctaagtttgctgcaacgccgccaccaatttgcagctccagcaaacggctcgtcgccgtcgcggactcgcagccactccggagcgttgcctcacctgtgtgctcctcgccggcctcgacaactccccggattgtcatagtcgaggcggttctagtcgctgatggtggccatggcgaggaaggacgaggaagaggggcccgcggaccgcgtgccgcacctgccgtggatgcggtaccccgtcgatatcgacaccttctccggccgccccgtcacacagctaccccgcctcgacccgagactggtagaggctttgcagagaatgggaattgaatcatttttcccagttcaagaagcagcctggctggaaacaattggtcctggcgcttttgagagggatatctgtatcaactccccaactggatctggcaaaactcttgcttatgccctacctattgtgcaaatgctctgcacacggaaagtaaggtgcttgcgagctttggttgtgcttcctacgcgggatctggccttgcaggttaaagaggtttttgatgctattgctcctgtggtgggcttgtcagtaggttcagccgttggtcaatcatcaatagcagatgaagtttctagtcttgtccagaagcccagacaggagttttacccaactattgacaaagaatacgtccaaatggaaccacggactaaaattgatatattggtggcaacccctggaagactcatggatcacattaacatgacaaatggtttcagtctggagcatcttcagtacctggtcattgatgagacagatagaatgttaagagaggcttatcaatcctggttgccaacagtgatccaacttacccactcaattggtcaagatcattcctgtcatgacattgatgggaaaactctacttcatccattgactactattagaagatcgggtgtggagcgtgggtttaaaagtaaatgctatccaagattggcgaagatagttttgtctgctacactgactcaagatcctagcaagctatcacaactcgaattgcaccatcccttgttgttgaatagtgggaagaagcgctatagaattcctacaaaacttgaatcctacaaactgatatgtaaatcaaacttaaaaccactctctctcattgttcttctccaagaactgcaagggaataagtgcttagtttttacctcatcagtggaatcaagccacagactaagcactttactgcgttttttcgaaaacttaccctttaaattcagtgaatattcacgtttgcagcgtgaatctactcgaaggaagacactggaggccttcaaggaagggaaaatcgatgttctaattggcacggatagaatggctcgtggaatacatattgatggtttaagatatgttatcaattatgatatgccaccatatgtgaaaacgtacatacatcgagcaggccggactgctagggcaggggaatctggttcctgcttcacctttttaagaaaacacgaggttaaaacttttgacaaaatgctcaaaaaggcagacaatgctggctgcaatcttcattcattgcctgaagaatcaatagaaacacttcgtccagctttctccggtgctctgaggaaactggaaggagcactggaatcagaagcagtgaagaaatatgatttaggagataaaacgccaggtgcttctaaacgaaagagaccaaatcagttgtgcaagcaatagtgctctagttctaacgtcttgacattacaatgttgcacctgcatgtctacagagttacgatggtccatgagcatggaagaaacgtgaggaggcaattgattcccagttcaaatcatgaactagaatggggcatgttaaacctacaatttgaaacctttagggctggttcgatgataagggaattagaggcgattgagggctgatttggtgaccagagaatcgaagggatccataggagaggaatcctcttgctattcaaaccaaggaaatctcttgctattcaattcacttgaattccctgctcatcaaactagcccttactactttacgtttgaggggagttcctccctcgaaagcttttgaattcacagatataatgagaatgagtccatgaagttggtgtagaaatatcttccagttgtgcgaggaaaattttacaaccagcataactgatgagaactgaaaaatatccagcatattttcttatatttatgtactagtcagcacagacatgtttagctattcagatttttgagaatgaaaccctgaaggatcctacctattcagaagatctaatgttgagtgcagcagcagtagtggtttcacaa

SEQ ID NO: 33933 - DNA, 565 bp, Zea Mays
tttttttccaaccgtcgttatcttgtggccgctacgcacttctctcctgcttcttccacgacagctccctcggccttcatctcccagccgctcctcctctctcctccctccatctctcctgcgtgcgccctactccctgctgctcgcccggccgagctccctagccgccgcgccgcgaactctagcgctcggtgcccaacttccagcgtcgcggcttcccaactccctctccctgcgcacgccgcgcgccgttctcccagcagcgtcccatcgagtctctctctccctccggtcgctaccatagtctttccccgctctagatccatggcaccagattcgcccagctgagttcatcagacctctggtctttgcctccccacgcgccatggctgttggaagctccgtcagcaattcagcaattcgtttcgtgcgtcatcaagaaatcccaagagtcgggtgaagacggagttagcagcatgatgttcaccaagtactcgacacaagggccgaactggaatccatgtcgtgctcgcggatagcgcgtcagagttagtatggtacgtgt

SEQ ID NO: 33934 - DNA, 2079 bp, Zea Mays
ataatggcaaatttctcgtccccagcaaagtccctccattcggtctcatctcccatctctcttctctctctcccgcgacatcagcggcggcgcagcggtggggtggggggacggcattgcgagctcacagtctcacaccacccgccgcgtggtgattccgagaggttgctgtgccgctggctatgtagtgatgtggaccgtgatctcgacggctatccgcggctgagcgggcggcggcgatgaacgaagcgagcgccagcgctggcgtcgggaccggctctggcggggaggtgccgctggtatacaaggcctggaaggggaacaatggactggcactagattgactcgtgtcgtagccagatgttgggattcccttgctgttgctgagcttggcaaatttgtttggtcactgttggctaaattttttttgatgactcgatttccccccgtttattttatgattttgtactgggattctgggaatgtaggttgtaggacggctggacggattaagtgcctcggctggccttgctcaggagtgtttttactgaaggggagattcatatttggtcctgatgcaagatccttgtttgtcaccatgttccttattgttgcgccagtatcaatcttctgtccattagttgcgaaggaattgatggataaattctcttatggtctgggattaccggttatgattgcagcagttctattcacagcatatgatctgagtcttctgcttctaacttctgggagagatccggggatcatacctcgcaatgcacatcctccagaacctgaagggtttgatgacaatgcagaggttggggctaaccagactccacctgtgcgtttgccccgagtgaaagatgttgttgtcaatggaattactgtgaagataaaatactgtgacacttgcatgttgtacaggcctcctcgttgctcccattgctctatctgcaacaactgcgtggagcgttttgaccatcactgcccatgggttggacaatgcatagggcttaggaattacaggttcttctacatgtttgtattctcaacaactctgctctgcctgtacgtctttgggttctgctgggtgttcgttgttaagatcagaaatgcagaacagataacaatttggaaggcaatgacaaagacccctgcatctgttgctttaatcatctacacattcattgcggtttggtttgttggtggcctctctgtgttccatttgtatctcatgagcacaaatcagacaacatatgagaacttcaggtatcgctatgatcaacgagccaacccatacaacaggggaatcatggtaaacatcaaacagatcttatttaccacgatccctccttccaagaacaacttctgtggtagggtccaacaggagcatggtctaaggcctcgtccaacaaatggtttcatgagtccaaacatggggagagctgttggtgacatcgagatgggtagaaaaccagtggcttgggatgagcctaggatggcagctgagattggtgatttaggagcaggtctgagcaacctgctggaggacaaggatggcaggtttcgtagcgcatctccagatctcagccgcgacgcccttgcagttggaggaggcttagaagaggaaggctcctcggcgatgaacgctgggcgttcaagctggggagttgaagcaggtcgatgatggcattgaccgtgtaagcggctgtagtgagacgctctgggttgttagtgccagttcgctgctaatctgttgttttgtttgagatttgaggtcactaatgttattagactcatgacctgtatggcggttgtttctggactttcttttcttctttctcttaatttgagatgtctttcgtgtctattatttgaaccagttggtttgtgacgtctcccggtttggcaagttatgttttgtctgtatataatcggacagtaagcctaaaataggatccagctgcttggatttggatggtaatggttgtgaataatgccctaccttttgcattgcagtaactgaacattgctcggtcttggtgcccatgtcaagattaatttattgctttttcg

SEQ ID NO: 33935 - DNA, 451 bp, Zea Mays
gtttctttaccctaacattttcaccgctccaacgcagtcgccgccgtttttctcaaacctggccatcctcatctacctcgcagcgccggcgccctatccgctccttccgttccttgcgctcggcgcgcaggtggcggccccatctttcgcttcctcccttcctccgccaccactcaccccttgatccgttctgcctcctaaatccggcgtcgccaagcaaccccactcatgccgttctcaaaaccctacccaaccaatctgtccaattccaaggctgtcgactttgtgttgggagcgccgggtcaggggaggggtggaggatcagatcagcagccgcacgagcattgagtgatatgcctgctatataggatgcaactggacatcgccgtctagcccgtctagctgttgctgctgaagtctccgatatcaagaggagggaagaggcgctgaa

SEQ ID NO: 33936 - DNA, 2255 bp, Zea Mays
cccttcctctccagggaaggaggccagaatcccccgtcgacgcgcacgcgccgtcgcgcagagctccgcgtccgcatcggccaccgcccacccgcgccggccgccggcggcgtggatggggaagctcgccgccctgaagcgggaagcggtcggggtggactaggtgctcggcgaattcctagtttagactttagaagcagtaggtggaggtgatgcggggcggagcgatgaaggctctgcggcgatccagcacctcctcgccgccgtcttccccgcattttcattcgtggatccaccgccggtacctcctcgttacctcgtcggcgacgtcctctttgtctgcatcggcgaattcggccgcggagggttcggattcagcgtcagtggtggcagcttcctcgtcgccctcgttggatccttcgtctccgaacatggaccggggtgtaattaaatctccatggtctcgaagaaaaaggaaacgagcgctcacttgtcaacactggatttgtctattttcagcgaacgggaagtttcgtgatgggggaagaaagtttctaaagaaggttcgcagtgggggaattgagccaggcataagggctgaagtttggccatttctgcttggagtgaaagaatatgaaaaattgaggcgacagtgccaccatgttctgcattgcaatagaggaaatggtctgaatgttataaatgagttcctgaatgaggacttctctgatggggctgaaggttcagagtcaccatattccaatggtgctagtaagagggcttgtgtgatgcccagagaattgaaatctttaggcagtaaggcagaagagtcagagagttctaactgggatgttgtggaatccatagatgaagatacaagtgagttaacttctgttgatccatgcatgatagaatcagaatcttctgaatctgagtcttcatatgaagaggaccctgatagaacacctgtctctaccaatatggaagagagctgtgatcccaaacctagatttgtccggactgcttcagcaaagtcagacatttttctttcagacagaactcctgaggattttaccacatggcagcgcattatacgtgtagatgctattcgagcaaatacagaatgggttctatttgcccgtaaccaggctgaagtctctaaagagaaagcactgcagtctgcaatatctgttggattgaaagattttgaccatttggagccttacatgatttatcatgcggcacgattagttgcactgcttgaggcatatgcagtctatgatccagagatcgggtactgtcaaggaatgagcgatctcttgtcaccaatagttgcagtcatggaggaagatcatgaagcattttggtgctttgtgggtttcatgaggaaagccagacacaacttcagacttgatgaggttggaataagaagacagctgaaaaccgtctcgcagatcatcaagcttaaagattcacagctctacaggcacctgcagcaacttcaggccgaagactgcttctttctgtaccgaatggtggtggttctcttcaggagggagctcacttttgagcagactatgtgtctgtgggaggttatgtgggccgaccaggccgcgattcgagctgggattggaaggtccacttgggcaaggataaggcttcacgcccctccaacagacgacttgctgctctacgctatcgcagcctgtgtcctgcagaggaggaagctgataatcgagaagtacagtagcatggatgagatactgcgggagtgtaatagcatggccgggcagctagatgtctggaagctcctagatgatgcacaccacttggttgtcgaccttcatcacagaatctgatgcgacggcttccctcagttatgtttggtagagtatgcagacatgaaccacttttccgaggtgtatttagtaatctgttgtgtactgttcatcacccggaattatgggcatatatctagagaaccgtgtggcttcaagtgaggacgaagttatctccacttcggttaagctgataaaccattggatagcacaatggtttatgcaagccatccatagtttaacttgatgtaaaatttcgtttttttgcttccagtatctgtcctaggcgaaaacatcattttccatcaagccttttatagcaaaatttaaagttcccagattttggggtgtaatgcggagtaatatatgatggattcaaagtctttgctgcgtcattgcacacaccaagttcttcca

SEQ ID NO: 33937 - DNA, 714 bp, Zea Mays
gcctggcgtccccagcgagggtgagggcgacgtcggggaccaacagccgtgtgtcctctctcctcgtgtgctccgtctgtctccacagttggtacaggccctctcgccaggtcgtttcgttgctttgaaccatcgaggatatatttttacatcctgctttttctatcaagatcaggtcgctgaagcacttggaacaatcgtagcttgcttttgaaacgttacatcccctaaaggaccagcacaaaaatttgctacatctaattggataaagtggcttggccaattcggtgagccacgactcggcggcggcgacgacgcttggggcggcctcctcgatggtgggggaggcggtgctcgggcgcgaggtggtactggacggagagctgtgagcgtggctgcaacgaagaaggacaagcagtgtagaaggaggagtctgcatgcgccagctatgagatgaagcgagaaaggaaaccaaatacaaaatacattgggccaacatgggtcgtgtaatagtggattgtagttccacaaatcacaggggtgcgtttggatgcgtgtatcaagccagccagactctcgtaacgcagccaagccctatgtggccagactctatgcatgcaactggttactgtttggatgtctgtatgcgtagcatccggtccagctgagactttgtttggtttgctggttgcaccaagccccgttagtccctgt

SEQ ID NO: 33938 - DNA, 3545 bp, Zea Mays
ccgagccgcaaggcacggccggactcgtgtgctcacattctcactagtttcaaattttcatctgttaaaccctacccacccggcgaatcccttgacaaatccaaccagcttgccggaggaatacaccgggaggtacgtcaaacggcggggagagggaggagtaggtcgctgagggagggttagagctgggcaaggccgtcgctgtcatggaggcgcaggcgacggcgacggtgaaggaggcgcttgcggcgctgtaccaccacccggacgacgccatccgcaccgccgcggaccgctggcttcaggagttccagcacacgctcgacgcctggcaggtagctgacagtttgcttcatgatgaaagcagtaatttggaaactctcatattctgttctcagacccttagaagcaaggtacaaagggactttgaagagttaccctcggaagcttttcgatcattacaggattctttatacgtattgctaaaaaagttcaataagggaccacaaaaagttagaacacagatttgtattgcaattgctgctctggctgtgcatgtacctgtagaggactggggagctggtggaattgtgaattggctaagtgatgaaatgaaaactcatccagaatttattccaggcttccttgaactgcttatagttttgccgcaggaaacttctagttataaaattgcggctcgtcctgaaaggcgcagacaatttgaaattgacctttgttcgtctgctaatgttgctattgatttattaactgcttgcatggccattgatcagctgaaagagcaggttttggagggattttcttcttggcttcgtttctgtcatggaatctctgcctctgaactcgcatcacatcctttggtccatctggcactctcttcattgaactctggtcaattcttggaggcagctgtaaatgttacatctgaactgatacatgctactgtatctcatggcgctggtactatggctgagcaagtgccactcattcaaattcttgtccctcatattatgggtctgaaagagcagctcaaagatccatctaaggatgaagaagatgtaaaagctattgctcgtttatatgcagacatgggtgaatcctatgttgacttgattgccacaggctcagacgattcaattcaaatagtgaacgcattactagaagttacttctcttctcgaatttgccatttcctccatgacgtttaatttctggcattgccttaagcgtaacctcattcgaagggactctgatgtatcatatggattagatgtgacggttgaaattgagaaaaacagaagattacaaatatttcgtccaaagtttgaaactctggtgtctctggtcagttttcgagttgaataccctgaggactaccacaccttttccgaggaagaccgcaaggattttagacatgttagatatgctgttagtgatgtgctacttgatgcaactgaagttcttgggggtgactcgacgctaaaactactttccaccaagcttgctcaggcatatgggagctgcaacaatgagcagaactccaagtggcaacctgtagaggctaccctgttttgtatacaagcaattgctagatcagtctcaattgaggagcgagaaattttaccacagattatgtcactgcttccctgccttcctcaacatgagcagttgctacaaacagtttgtttgaccattggagcattttcaaaatggattgatgctgcaccagctgaattatctattctaccacctctagttgatattctcaataagggtatgagtacatcagaggatacagctgcggctgcttctatggcctttaagtacatatgtgaagattgtaggacgaagttctcagggtccctggatggcctcttccagatataccatattgcaatcagtggagttggtggttataaagtttcttcagaggactcgttgcatttggttgaagccctaagtgtgattatcacaacgcttccaccagaatctgctagtagagccctggagttaatctgccagccagtaatcaatcccttgcaagaatttatccagcagggtgatcaagttcttcaacgagtccctgctcggcatttaactgtacatatagaccgactatcaagcattttcagtaatgtgaaacaaccagaagttgttgctgaagctgtatatagatattggccgacactcaagagtatctttgatcaacgagcatgggatacccgtaccatggagtcaatatgccgatcttgcaaatttgctgtaaggacatgtggaaggttcatgggaatgacgattggtgcaatgcttgaagaaatccaaactctctaccaacaacacaaacagtcttgcttcctttacttgtccagtgaagttatcaagatttttggatctgatccatcttgtgcgggctatcttactagcttgatacaaatacttttcagccatacagtgcagcttctcagaacgattcaagattttacagccagaccagatatagctgatgattgctatttgttagcatcaagatgtattcgttactgtcctgatctgtttatacctacagaaacgtttcaaagattggttgactgcgcaatggctggtataactatacatcacagggaagcctgtaaatcgatcttgtcttttctatctgatgtcattgatcttccaaactcatctggcgggggacagtaccgtgaagttattaacacaatcatacttcagcgtggtacaacccttactagaataatgattgctgccttaacaggggcgctaccatctggtcgtctggaggaggtttcatatgttctgctgtcacttagcagagcctttggtgaggatatgctgaactgggcaagggaaagcattaatcttataccaccacaagccttaacggatgctgaacgtttgcgattcttcaacatcatatctgatgctacttccgggtctagtcttcataacataacagatagattcggagaaatctcagatatctgtagacgaaacaaaacagtgcaagacctagttcaaagtgccttgcggcctcaggatttgaccgtcacggtggttcgacaacagatgtgataactggatgtctctgcaagttcatacaggtttgagttgcggcggcatacagttcagatttgttcagagcatagataggccagttagcattgtaattctttcgtgtttcccctttgtacatgtgccacaaattgtgtatttggggagggagataagttgtgttgtattatctcaaaaaacagtgttatacttggtataactggcagatcatgaggtatggtgatctaccgtgggcctgattttgcgttggccgttcagcttctttttgtaaagtagggtggccatcgattttattatgtaagcttataccggttgttaaagaaaattctagtctgtgttcccttatggtcaccaaatgtaatggccctaaaggtaattcaagtttgatgattagaacttgtgcaattttaagctcaccttgaatcgtgggcagaagtttgc

SEQ ID NO: 33939 - DNA, 7755 bp, Zea Mays
ctttctccgtcttcctttggtcggtggggtcgactccgcctcctcacccgcaaaacccctcgtgttcgcgagacgatcagacgaggcggtcagggagggggaggtagaatagggtttcggcagggccgtgccgggccgcctcctgctgaccttcctcctccagcgccgtgcaagcactcccgtccctgccaagccctagctagggtagctggtgcagcggattccaggacccacaaatctcttcttctcaacccattgccggtggagcgtggctgatttctttctgacgactgatcgcgcgctcgcagaggtagtggcctcgggttgttggggttcgggctcgccggcgattttgggggacgagttcgctgccggtgccgcgggcgggggcgtgattcgcacctcggaggaacaaacggttgaactgacccaggtgttgatctgctgctgctactactgatccatggctaatacccggtcaggaggaggaggagatgcccctccccccccttcttctcctccagctgctgcttctgcaactgccacaaggaagcttgccgatggaagggagaccaggaacaccgcagctgccagtgctcacacaccaaacctcaggaggtccactcgagaaaacaaaggaaagcacaaatctagacttgctgacacaccaccccttcacagatctgctaaaacgcccaccaaggatgccactgcaattgctacccccaaatccacacccttgccaaacaaccccaaagactcaacaaaaaagccctccagagttaggaacacaagtgtttcaccttctccttcaaaacaagaacctaatgaaacctcaacgcccgcctccaccaaaagaaaaacccaagatgatgctctgactgcctctacaccgtccaagaagcagaaaaggctcctgcatgcgaagagctacattgcactcttcaatataggagaagaatctgtgcttgctaccctcagggaggatgaggaaaaagcttctgaggtgcaaccggaaggagatggtgctgttttggtgcatgaagaaagtaatgcaccggaacaacccaaccaggaagcttcaaatgttgttgctagtgaggtcttgggaggtcactcttctgacttgcatgaaattgaggtgatattggagggagatggattgaagattggatcccatcagtctgatgttgttttagagcgttgcattcttactgagacgcgctcactaaataaggcagtggaaagcatccccatgttggaaactggagagcaagctactggtggttcaaaccagaaacctctactagaattgccaaatagcgcttgctctactgctcatcatgaagaggccagcaagtcggtggaagatggtaattctattgggattcaaggtgcatgcacttcaaggaatactgaagctatccaatgtgatgaaacatggtcttgtggtggaaaaggatgtaaacgacattaccatctttcgtgtatggatccttccttggacgtgtccctaggaatatggctttgcataatgtgtatgaaaaagaggattcagtttggtgtatattcagtcagcgagggaattgaatctttatgggatgtcaaggaaggagtggtgaacagcaagcaatatttcgttaagtataaaaatcttgctcatgtacataaccagtgggtttcagaaagtgatatagttgatagcaccccgcaaggttctgatcttatctccaaagttagcaagaagattcataaagaaaagacaataaggtggaagcaggaatgggctgaaccacaccgtctgttgaagagaagattgcttatgcctcaaaaagaagccgaagttttttttaattcactaggtgataaatttgtatactgtaatgtcgagtggctagtgaaatggaaggatctgggctatgaacatgctacatgggaactcgagtcctcatcctttttatgtactcctgaggccgaggagcttaaaaggagctatgaggaccgctttaaaactgcaagaaaagcatctgatccttcaaaagtagacaaggctaagggggggatatttcagcaactcgagagactgccagatggttgccctcctggtttagacgatgaccatttgagatcacttaaccagcttcgagcgagtaattaagaccattctttttgtggcatccatactgcctcacatctgtcaaccactcctcattgtgtctactactactactctctccttgtgggagactaaattcaatcgcttggcagcatccatcaatgttgttgtgtacaatggagagaaagatgtacgcaaatcaatacaagatctggagttttatcaggatggttctgtgatgttgcaagttctcttgtcccaccctgatgccatcttagaggacatcgaagtgattgaacgaattaactgggaagcagttatagtcgatgattgccaaaactctagagtttcaaaatggcttgaacaacttaggagacttcctaccaattttaggatggttctattgagttcctcactaaaggaaagtattgctgagcacatcagtctgctgtcttttctcaaccctgaagaaaatggtacattgagtgtttcaaatggtgtttcttttgatacagctggcactctagttgttctgaaagaaaaacttgcacgttatgttgcctttgagcggaagacagattcatcaaagcttttagagtattgggttcctgcccgcctttcaccagtgcaactagagatgtactgttacatattactatcaaactccccagcccttagatcacattctaaaacagatagtgttggtgctcttcgcaacattcttatatctcttcggaagtgttgtgatcacccttatcttgttgatcaatcgctgcaaagcacacttaccaaggatcaccctgtaactgatatccttgatattggagtgcgttcatgtggcaagttgctgcttcttgacagaatgctccaacagatcaggattcaaggtcttagagttcttattctttcgcagtctggtggtgaatctggcaagcctatgggtgacattttggatgactttgttcgtcagagatttggttatgagtcatatgaacgtgttgaacgtggattgctactgcaaaagaaacagacagcaatgaatatgttcaatgacaaaactaaggggcgatttatttttttaattgatagtcgtgcatgtggtccaagcatcaaactatcatctgttgatgccatcatcatatattgtagtgactggaatcccatgaatgacttgagagcccttcagagggtcagcatggagtcacagtctgaacctgtgcctatttttcgtttgtactcgtcttttacagtggaggaaaaagctcttattcttgcaaagcatgaccatattttggatagtaatattgtgaatataacccctagcctgagccattgtctgctcagttggggcgcatcatttctcttcaatagacttgaggagttgcagcaacatagctactcaaatgtctctggtgatgagcttttcatggataatgtagatttggagtttttgacaaaattactcagcaaggttgaactcagaactgaatcaggcaatacagccatatcacaagcttatctgtgtggatctttctattctagggctattgttgtagcgggtgagagggagggaattccatcagttgatggtgacctgccaaagttctgggcctactggttaagtttacttaatgggaggtctcctcagtggcagtatatatctgagccagtacaaagaagccgtagaaagataaataacatggaacaacaattgaaaaacacagacaaacagttgaaaataactactgaagaaactgatgaagccagagtaaagcgtagaagaattggtgaaatcatggattcatctgcaatagactcacctggcaaaaacaaggacaccatattgccaggaaacaataccccacctagttctcatcaaatatcagttgaagatacatggcaggaactagagcgaagcaatcttcatgccacacaaaaaggtctacacgttcaactcaagccagagatttcgaagttatataagttgctgcaactgccggagaaggtgaaatccttatgtgaggaatttcttgagtatattttgaagaatcaccaaatcagccaggagcctaagggcatactgcatgcattcaatttggctctgtgttggcgtgctgcttctctctcaaagcataagatcaatcacacagaatcactcgcacttgctgtaaaaaacttaaactatgagtgcaaagaagaacttgttgattttgtttatgggaagctaaagatccttaagaagaagtttgcacgtagagcaggggaagtgagcaagcaaaactatatggtttcagtgagcgacatatcaacttgtgaacaggtcacttctgttagattgagaaatgatgagttagtccctagccaggtaactttaactgatggtaactttgagaatggttcacatcacgaggctacaggtgacttttggaccgaggagatggtttcgggagagaaagaactgctacctgacccagtaactcatgaaggggaacacttattgagggatgaacttctcagcaaaataatggacaaaagaattaaattagttgacaaagttttctctctgagaggaaggagtatctatgataagcattcaaatcaggtttcatttttagacatgcataggcaaaaggtagtggataaactcagaagagcatgcagtttagttgtggagcatctacgtagtagtcaaaatcacattgctcaagaggacagagatgggaaaataaagctaataattgaatggtttactatgctgctgtatgcttttctggaacacatgaaatgccaacgtaacaggcttgatatgcagcaatcagcttccaggatcaaggagtctcaattgaaggaagaaacccttcaggcagcaagatgtggccaattagatcaaaattttgatcaacatattccttcaccagattttgaatttgctatggaagaatttaggcacttcagggaagtagttggtagctgctatgttgatccagctgctctggtaccagagtctttggatgacaattcagcaatggaaattatgttggttcaaagcgcaactgatgctgaagtcatcgaagaagtgctaaatcgacctactgaagttcttgttcaaggtccagcatcagaagttgttggtccatcagttgatgtgatttgcaattgttctgatggcatcaactcccaaagagatgcatctctggctgttcattcattggaaccttcaagtgacgaccttagaagtactgaccatgttgaggagaacacagttggctcacaaatacagggtggtacaagcaaacatttaggtgatgctgcaatggaagttgaaactggaaacaggaacactgctttggctgattcacctcactttgacaaaccagctttgactgctccatccaggcaggcaacattgctggtttctcgagaaaccgagatgctgagcaatcttgtggaccaatgtgcacaacagagtttagtgtcagcacaacctttgcaggatgagtcggaacaagcagatttgtctagtgcagcatcaactcaacccttgcaatctgagaggcaacaattaatctctgtttccaataatctgcttgaaagagcacagcttgatcagagtcaaccaaattatcagacagatgcggcacctggttgtgcgcagtctacagaactctttccagtgacgtcaatgatgtttaatcacgcacctattgattctgaaccactgaaaaatgagttgcacaaattacgattacacatggacacactcaataaagtccatgaaatgaagaaaacccaacttcagaccgcatgtagccaagaactagagaaggtaaagagaaaatatgatttgttaattaaagaacatgattccactcatcttcagcaaaagaaggcacttggtgatttttatgagaaagttcagcgcaaccaatcgctggctgaggattttcgggccaaattcatatcactgtctgcagcacaaggtgcagcaaaaggccatacccctccagttcgtcacacacctcaggctacccaagtggtgtcctccacatcatcaattgccctgtcatcagcttgtcgaccaccagtgccgaggcctagggttcaagctccacaggtggaccaaccattattgtcattgtcgcagttctcccgtccgtctttgcaagtggtccaacctcccaacctggaactaggcaatcttttcagagcaacgtcaacgactcttagtcatatgccacctcaacgtgggagctatggagttcagagtgaattggctcctcgctcacctgctcctcatcttcagttcagatcgccacgggcacattccatggcacctggaaatcagcagcaatcgccagcaattagtgtggatgcaatgtcctcaaggacacaaccagtgctggcggcaagcacatccccatcagatatacatgtgggacccctagcagcctcagccttgtcaagtttacactctgttctcccttcaacctcattaccctcaagcttgcatcctagtcacctggcacaacgtgtgccaccaactcctaacccaactttacaagccggggcaccgaaaggctcgaatgcaacaatgccttccatccctacaggcatgcagctgccagattctggttccctatcgctggatgcatggcttacagctaatcttgggttgaatgatgcgtctacagctcctgctaaggatacagccagtcttgggttgagcagtgatgcccctagggcagctcctgatacaaatacggccagtcttgggttgagcagtgatgtgcctaggggtacggctcctgctacaaatacagccagtcttgggttgagcagtgatgtgcctaggggaacgactcctgctacaactacaaccagtcttgggttgatcagtgattcacctagggtgattgctcctgccagcagtaattcgcctggggcgattgcttctgctacaaatggtggttccgagatagatgtggtatgcctgtcagatgatgaatgatgctagcacgtgtacaaggctgacagttatagatgactgcttgaaaggactaggcattattttacggctcccttgagtccgttctgacaaggtgggaatgttgtttgtgctgtgaatggctggtaacagcaatgacagttttattaagttcattgtaaatgtgtattatgacaaatgcctgccaacgtttgctgtaaatcgctaacctctggggaatgtggatattaacctctgagatggagttgggtttcaagcgctatgaggtttctgtacatgtttgtcattgattagttccctgaggtgttcgttgtaggccggagtgctagctccgtgtatcgttttggttctacgtatgtttcttttttttagtttgacttaaaaaaacagtagcaacaaaaaacagtagcaacatctccatgatagttattatgtataataaatgctgaaattttcttgtatatatttgattgaaacggcgggagtatgtaacagagcaatttagaccaaggcggtcacttcaacgttgtattgtatttctcttcttggtgaaatacggcagcactgtcctatgttaagttttatatctatatagctagctatctatgtatctgtatttatacctgttctatat

SEQ ID NO: 33940 - DNA, 1732 bp, Zea Mays
ctcccctcaacctagcgccgccactcgcgcccaccacgccgccgcaccgccgctggtgaacggatctgtccatcccatacaccagccatgtcctaacacactgacacacacctggtggaggaggaggcgccacctccgtccgccggcggcgcaggggaggagccggccatcctcagggcggcgcggggctccagcaagctgcgcatcgaggggtcactgagcttcaagcgggcgcaggccgcactgcaggtggagaccgagatctccattcggaccgccgccatgcccgcgccgggaccgggacccctgcctaggggaacccccgagaggaacacacaacaacgtctcaccagtcagccaccaccgcgctccatttcctttctctctctcggctcctccgctctcttgcccgagttgctagcttccctgcccgcctcctcccgtccccatggacagacagccccccacctccgcttccatagcatccgagctaaggtcaactcctccgtcggtggagcgagagcggggaagagatgggagggtcccggatccgagctgagctgtgctccccgcgcgaccgacacccaggtctcgtcgtcccatgcaaatctgctcctcctcctgaggccatccatggatccgtggcacacaggaagttaagattaatctagacatgataatctacaggcttatgagggcttacataagttcatcttctctacggaaatctgcattgagggctcttgcaaaggcactgacgacagatcaactcttctacctaagagagcagtttacattattcggtccaaacaagagtggccatatatcattgcaaaatatgaagacggccttgatgaaaaattcctcgggtgcaatgaatgattctaggattcttgactttgttaactcaatatgcaatatccaatatggcatgattgattttgaagagttctctgctgcggccattagtgtatatcaaatggaaggcctggagacctgggaagaacatgctcaacaagcatatgaattgtttgacaaggttggaaaggggttgctgaaggactagaatgctcagaagcttgcgttgcagcactggctggaagcggtgagagaaacacgatctaaataaacagttttgtagtttacacatcctttttgcgaatctataaacagttagtttcatagtactagattttcaaaccgaaagcaagcaacctttcttctactggccgcacttgaagaaatcttatatcagtttgaggaaaaactccaagctgaaagagaggaagctactaggaagcaggaagagttgcaagcacaactacaagctcaacaggtcgcacttgaagaaaaccaaagtttgttgcgccaggcccaagaggaagtgaaggggatgcataccaagtttgaagagaccaatgcactgctacgagctgtcttgaaacttcagaaagattgaggtagggatgcataccaagtctgaggatgatgcctttgcttaaggtttttctaccttgctagaacatatctgtggttagaactttgtcagaactacgtgcaatctgtttgaatgcttcaaacctttgtggtggaacctttgtatgtttgaacctctgttgtggaagaactagtgtgctggaattgtgtatgacttgtgatgagaatgttgtgtatgatggcttttctgtgtattatgattctgtgagctatcatgagagctcagtgtgtcgtc

SEQ ID NO: 33941 - DNA, 3089 bp, Zea Mays
aaaaaatgttagaaagaaaaaaaagatagtatatacttttatttggttgcccataattcagcacaaaccaagttccacgagacccacacgtttctttaccctaaccttttcaatgctccagcgaaggaacagtcgccgccatttcttcccatctccatcttcctcgcagcttcgacgctccatcttccgctccctcccttacccgcggtcggcacgcaggcgacgccggcggcgctcaggctcgggctctcatctactgcgtcagcagcttcccctcccgcatctcgccagtcgcctcgcgctctcacctccggtcttccgcacactggccggtgaccctgccttataatattctgccacatcactctgggtgaagcaagattgggtagctttccggtgcctacttcattcttgagtttgtcaatataagccactgaagccaaggatgcatgaaaattaacccaatgaaataaatgctcctacatgagtccaagcatttacctatcaaacttgataatgctggatgctattctcaggcagacctatatggtgatcttgccatttattgtcgtgtttctatgttatggaaattttaagagcgctgatgttacctgtagtgctctttaaatttggaacttggaacatggagcatgtgctgattagtagaaggtttccaactgatcctgctctctaaatttggaacatggagcatgtgctgagtagtagaaggtttccaactgatcccaatgagtataagttatatgaggaaattggagatggtgttagtgccacagtataccgagctctttgtgtcccacttgacatcttggttgccatcaaagtgcttgaccttgagaaatgtaacaatgacctggatgggataagacgggaagtgcaaactatgagtttgattgatcacccaaatcttcttcgtgcatattgctcatttacaaatgggcaccagctttgggttgtcatgccttacatggctgctggatctgctctccacattatgaaaacttcttttccagaagggtttgatgagccagtcattgctactcttttgcgtgaagttttgaaagctcttgtctacctacattctcaaggacatattcacagagatgtcaaggctggaaacatcttaatagatacaaatggggctgttaagctaggagactttggtgtgtcagcctgtatgttcgatactggaaataggcaaagagcaagaaatacatttgtagggacgccttgctggatggctcctgaagtcatgcaacaactgcatggttatgattacaaagctgacatttggtcctttggaataacggcattagaactagcacatggtcatgctccattttcgaagtaccctccaatgaaggtgttgcttatgaccttgcaaaatgcaccaccaggtttagattatgagagggacaagcggttttcaaagtctttcaaggatttggttgctacatgcttagtcaaggatccacgcaagcgtccttcgtctgaaaagctgctgaagcattctttctttaagcatgctcgctcagctgaatatctggcacggagtattcttgatggcctccctccattgggtgaacgctttagggaactgaagagcaaagaggctgagttgcttctcaataacaaacttggtcaggagagcaaggagcagctatcacagaaagagtacataaggggcatcagtggctggaacttcaatctagaggacttgaaaaatgcagctgcccttatagacagttcaaatggcacttgttatttagatgtcagggagaacagagttaaggatgactcacaagaagcttacaatggtccagaacatatttaccaggaaaggctcaaccatgttgcttctagaaggcctgaagaggatgagatacaagaagttgaagccttgaatgatgctgtctcctcttcgttttcaagccgctcccttgaggcactaaaatcttgctttgatgtttgtggtgttgatgatccgagcccaactgctactgattcaagagcgcaaccaagtgtcggaactttacctttccagcagttgcaaaaatttgagcattgtaaaagtggcgactgcaatggtgaaagcttggaaagaagcgtttctgtacctacgaatctggtcactagtggataccacaagcattcaagtggttctcttatacctgagcaagttctttctccctacttgagcagtgatttggaaagggatggatttcgtcagaaaaacttaagcagcaggaactgtagtggccctttattgttccgccaaatgaaggattcacgcacacatcaatctgttgcgccagacgagtcgtcggaaggaaaaattatccgtcgaagggggcgcttccaggttacatcagatagtatttctgaaaaggtagctacatcatcctgcaacagcagcaggataaatctaccaattgatgcagcacgttcaagtcccaagttgtctgcaattcttccaactttgcaattcttgatgaagcagaatactatgcaaaaggaagtactcagtaggctgatttcttcaattgaggaaacatctgatgattctgaagcaaccggaagcagttcatatcagtcttctggagggcctgcccgagaaaaggaattgcatttgtatgttctccaattgcagcgaagtgtcaccgaacttgctgaggaagtgcaaagattaaagctccaaaacaataagcttgagcatcagatcaatatattgtcaagaaaagatgaaaggtcgtcaacgcaagataactgacaatgatgatatgccccttctaccacattaaagtgaagctgtgatccttcgaggctgaggtatacaacaattgagaatgttgtggtagttggaggattttgtatagccattgtactgcgctgtcaaatagaatcttttgtctagtaactagcattcatgtttgtcgtctcttatctagacgccactaaaaagatatgttctgtatctgcggctaaaattgtggtagcccctaccaaaccgttgccgaagtttttttttgttaatcacctctgtatcaatactgctagtgctaggtttgggg

SEQ ID NO: 33942 - DNA, 850 bp, Zea Mays
cttcactattggtgtagtgaatatgacctgacttactaagcttatagattcaggaatcattatgcagctcatattttggtaacagtatcaaggaaatggaaaatgaggttcaaattctaaaagatgggtcaagaaagatgaattctgatatatcatcagtagcaaaggacacggcagaaaaggtcgaagttttgcattcagctatcgagaaggttcaagttatagctgatgaatgggtcaagatgaactatactattaacagaatatggtcattcactaaggagacagagaaaagggtggaaggtctatattcagatttaatgaagacgaagagaaaagtgccgttctggagagactgatgatgctgtggacctgatgtttgaccactgtcattgacgacccgcttggaattgacacaccgaagctgctagcaacttaatccgcttccatccagtgtttatattttcgcgtccttagtgcttgtgagacgtcagtgcaaggttgtggttgatgagaccttgtgcgacccgacttgctaactgtttgcatgccgtcatggccccataatgggactatctctatctatagcagcttatctataattatatttaaattacactgtacaaataatacaatacagcccaaaacggtgtaaaacggtgtttttgtgaccatatggtgcaatgctgacattataatgtttgtagactgtaatttgaatatgagtaaagctcgagatagttttatgcgctaccaccactgacgatggatgtccctaggaatatgaattgttattttttcctatatataaaatacacaatagatctccgtattggagaggtaaatgggg

SEQ ID NO: 33943 - DNA, 3204 bp, Zea Mays
acacgcgacgaacagagctgaacacaaacacccgcatcaatccaagccgagcctcccctcggggacagcctacgcgagcgagatccaacccaagtcccgacgccgcgggcgagggcgaccagatccacctcctcagtcgtctcggatggcggcagcatcgacgtcggtacgggtgctccccgacggcggtgctgacgacgaggagcgctggctcgccgagggcatcgccggcgtccagcaaaacgctttctacatgcaccgtgccctcgattccaacaacctcaaggacgcactcaagtactcggcgcagatgctatcagagctgcgcacctcgcgactatcgccgcacaagtactacgagctttacatgagggcgtttgatgagatgaagaagctggagatgttcttcagggaggagactcgccgaggcagctgctctgtggttgatctgtacgagcttgtgcagcatgctgggaatgtcttaccgagactctatctcctgtgcacggtggggtctgtgtacatcaaatcgaaagaggctcctgctaaagatgttcttaaagatctcgttgaaatgtgccgaggcattcaacatcctcttcgtggcctttttttgagaagttacctttctcaaataagcagagacaaattgcctgatattggttctgacgatgtggaaaatattaacgatgcggttgaatttgttcttcagaatttcatagaaatgaacaaactctgggtcccggatgcagcatcaggggcctgcccgagaaaaggaaaagcgtgggaaggaaagaaatgaactgcgtgatctggtgattcagtgacatctggatattttactcaactgtattttctaagtcatggcattgatattattattgttttttatcttctaggtaggcaaaaaccttcatgttctaggccagattgacggcgttgaccttgatatgtacaaagaaactgttcttccaaggatattagagcaggtggttaattgtaaggatgaccttgcacaattctacctgatggactgcataatccaagtctttccagacgaataccatttacaaacattggaaacgttattgagcgcatttccccagcttcagccaagtgttgatataaaaacagtactctctcaacttatggacagattgtctaactatgctgcctcaagtcctgaactgttgccagagttcttgcaagttgaagcttttgctaagttcagtaatgctattggaaaggtgatagaagcccaacctgacatgccagttgttggagccataactctatatgtatcacttctgacctttactctccgtgtacatcctgatcggcttgattatgttgaccaagtgctgggtgcatgtgtcaagaaactttcaggcaaggcaaaacttgaagatagcagggcaacaaagcaaattgttgcacttcttagtgctcccctggaaaaatatagcaatattgttactgcattagaactttcaaactatcctcgggttatggattatcttgataatgctacaaccaaagtgatggctgtggtaataattcaaagcataatgaaaaacacaacctgcatatctacttctgacaagattgaggcactattcgatttaattaaggggctgataaaggatatggatggagctcaagatgatgagcttgatgaagaagactttaaggaggaacaaaactctgtagcgcgtctcattcacatgctgcacaatgatgatcctgaagagatgctgaagatcttatgtactgtacagaagcatatacttcagggaggccccaagcgtctaactttcactgtgccttcgttagtattctcttctcttaagctggtcaggcgattacaaggccaagatggagatgtcactggggaggatgttcctgcaactccaaagaaaatattccagatattgcatcagactattgaagcactttcttgtgttccttctccagagttagctctgagactatatttgcagtgtgcagaggctgccaatgactgtgatttggaaccagttgcttatgagttctttactcaagcgttcattttatatgaagaagaaatcacggattcaaaggctcagatcactgcaattcacctgataattgggacccttcagcggatgaatatatttggggtggaaaatagagacaccctcactcacaagacaacagggtactcagcaaaacttctcaagaagcctgatcaatgccgagcagtatatgcgtgttcacatcttttttggactgatgaccaagatggtataatggatggtgaaagggttctcctttgtttgaagcgtgccttgagaatcgcaaatgctgctcaacagatggctagtgctacaagggggagcagtggatctgtaaccctatttattgaaattttgaacaagtacttgtacttctttgagaaaggaattccacaaatcacaaacactgtgattcaagatttgattgaattgattagaacggagaagcaaagtgataactctgtagctgatccatctacagaggcattcttttctagcactttgcggtacattgaatttcagaagcagaaaggtggaaccataggcgaaaaatatgaacaaataaagacaagttcatgactcggaacaaacacgtcacgatgactggttttgattttgttaagagaattggatcatttgtttgacatggttcagtgaaatagaaaccgccagttttagtagcatccaactaaaggatgtttacatgagctgttattctcaaatctcacggtctgagcgggtttgctcgcccattggcaacattttcaggtttagtcaggtggcaataagctgtcctttggtgagcacaggtctgtacaggattacttgtgttcgtgattggttctactgctacctgagtttcattgttgtatatttccgcccctcatacaaagcttatggattttagatttctgtaacatttggagtgcatgcctccatttctgagttctggctggacatttgatgattgtttcatagcatttgaacattttgtttaaccactactcggctatgtggcgtgttactcttcactcgttcttgctgagaacaatcacaagcactgaagcacgtgtgcccatttggccatttcaccttttggagtactttgagtcctgcttgaaccagtgatagattaccgatacacttacct

SEQ ID NO: 33944 - DNA, 2600 bp, Zea Mays
cgccgtttttctcaaacctggccatcctcatctaccttgcagcgccggcgccctatcttccgctccttccgttccttgcgctcggcgcgcaggtggcggccccatctttcgcttcctcccttcctccgccaccactcaccccttgatccgttctgcctcctaaatttggcgtcaccaagcaaccccactcatgccgttctcaaaaccctacccgaccaatccgtccaattccaaggctgtcggctttgcgttatgagcgccgggtcaggggaggggcggaggatcagatcagcagccgcacgagcattgagcgatatggcttctatgtaggatgcaactggacatcgccgtccactcgtctagctattgatgctgaagtcccgatgcttcatgccaccgcgatggtggctggttgatctccgatatcaagaggagggaagaggcactgaagaatggtgcagatccacatttgtttttgcataattgctgccttagctccaccaattgtatttcatgggaaatcattaacgtaagtttgccactccttttatctaaagtaatcaaagtcattagttattatgggcttgggtaatgtgagtaagcaccattgcatagatagccagtgatgttggctgctggaaaaggagaaatcaatgaattatagattgggatcacagaacttcatagaggaaactaggttgattgttcaatatctttttaagaacacttagtatcctggataatatgtgaaacaaacaatatgtgaaacaaataagtatttaaccagccgcatagaagcatgtttgctttgtgaccctagaaaccagccaggcacaagcagcacctcgaccccctcctcgaccagatgactactgtctcgaggcgtacagtggccactcacctagcgggtgtgtctagctcgtcatcggtctccaatgccacgttcgcgctactactccaatcattgctgacccgtatgatctccactgacttccacaaggagtgcaggcaccttcggtcccatccgctgttaaggtacattgattatttttttgttttctacacgtagtgggtcgatagatgcaattcatagattatctattgtgggcgctggaagctaaaagggatatcagtcatcatctgctgatcagcagaagcaataatgaccaagctcttctctggtagcacctccaaaatttttcttctagagatgtattcctcatttcagtcgtttgtgctgactggtatgatctctccatcagctaataactggctaaaattatagcaatgtttaagaaaatgcatacaccattgggtttacagaataacaaaaataaataagggtagaatttaactcgatctgcagaatatattttagtggatgagaaatatatatcagcatatttggctaaacaacacccaatgtggaccatattataattctagtaacttaaaatccttaattactttatttgataaataaagtactttatgcatgctctgctcataaacctagataagattataagcaatgaggacaatcttatacctcccaacttcaacctctctgtatgaaaggattgtggacctcataacttaaagcttgaaaatgaaccaggtgccaggccttagaatattagtagatactactacatcaaaagggggacaaaaggtgtcacagtcttatccataatggcataaataaaatcattcttttattagatgcatgcgtttttttggtggtcctgcactcctgttgtatctctctaaaaacttgaagtgtcataacaagatgcaaaagtactagcagtggcggagcttctcataggacgaaaggagcacgaccacccctaaacatgtgtaaactacatagttgcagtcattttgcttgataaaaactaaaagttagccttgttatttaatgattagcccctactggatttagggtagttgaatgtgtggtaatatttctctctttttccctgatgtgtaggagaacacatggttatggtgttccacagactggcattttattcattcattgaaaggcttacctcgcttatggtgttccacagagtgacatgaaactattttcacttatgcaaaagatttgtgcattaagaatattttttatcagagttcactcgaggaatgcaagaattaggataggtagattagatcttttttattggtgtatcctgagtttcctctaataagaatcatgtgtcaccacctgagtcaattttactaaacatttttttgctaccagccttaaatacatactacaaatgctgatttaccctaaaattctacacatttactttgttttggttcacgttttacactaaaatccgtacgagccagaaacaaggcacaatcggatatgcgcgatttttatgctataattttggacatcattcgctcttatgaaacatatcaatgatttacgacaaaatttgtatatatttatgatgttttggttcacgttacgctaaaatccgctcgagtcataacctgcgtacgattttcatgccgtaattttaggcatcattcgttgttacgaaacaaatcgatgatttacactaaattttgtactcgtt

SEQ ID NO: 33945 - DNA, 2734 bp, Zea Mays
ccccaagcccccaacccgatctctctcatcagctcgctctttcctgtcccctctccgccacctcaccgccggctcgctcaaaaatcctcgcgccggacgccggccctgcctccgcctccgcctccgctgcgccatgcccgtcggcgcctgattcatgtctcagtcctacgccgccgccgcctcgaagcgccccttctcgtcccccaccacatctccgtccccgacgtcatcccctgcgacgccgcttatgaagaaggccaagcatcccgccgccgcctcctcctcttccgtggggaccgtagagaagaacggcatccagcttgataccgttgccgccgccatgggtgggggccgaacgaatggcgaggaggatgcggacatggtgctcgtcaaccaggacaagctccccgcgcccagcgtgccggcctctgctggcgttgccgccaacctctttcgaaagaaggccacgctcccgcagccgtcgacctccgcccgcaagccgctccgcatcaaaataggtcaaccaaaactgccaaaaaacttcgaagaggatacatggtcgattttgaaggatgctatcacagctatttttctcaagcagaaactttcttgtgatgttgagaaactctatcaggctgctggtgatctttgtttacacaagctaggggcaaacctatacgaccgaatcaagaaagaatgtggaatacatatagctgaaaaaatatcagcattagtgggtcaaagcccagatctggttgtattcttgtctctggtccaaagaacatggcaagatttttgtgatcagatgttgattattcgtggtattgctttacttcttgatgtaaaatatgtcaagaatgtggcaaatatctgttcagtgtgggatatggggctgcaactgttccgcaagcatctatcactatccacggagattgaacacaaaactgtaactggccttctcagattgatcgagagtgagaggcttggtgaagcaatagataggacattacttagtcatcttctgaagatgcttactgctcttggaatgtattctgagagttttgaaaaaccctttcttgaatgtacttctgaattttatgctacggaaggtgttagatatatgcaacaatctgatattccagattacctgaagcatgtggagtcgaggttgcaagaagaacacgaaaggtgtattctatatttggaagctaacacgaggaagccactgattgcaactactgaaaagcaattgctagaacgtcatacatctgccattattgagaaggggttcactatgctcatggatgccaatcgtataaatgacctctcgaggatgtacaaccttttccagagggtgaatgctgttgagctgctaaaactagcgcttagttcatatatccgggctacaggccagggcattattatggatgaagaaaaggacagagaattggttccatttcttcttgattttaaggcatccctcgacaaaatattggaagaaagttttgccaagaacgaggctttctccaataccataaaagattcatttgagcaccttatcaatctacgacagaaccgacctgcggaattgattgcaaagtttcttgatgagaaacttcgagctggcaataaagggacatcggaagaagagctggagggtatacttgataaagttctggtcctgtttcggtttatacaactcaaaactgagtgtggaagtcagtttaccaacaagctggagggaatgttcaaggacattgaattatccaaagaaataaatgattcattcagacaatcatctcaagctaggacaaagcttccctctggcattgaaatgagtgtccatgtgcttacaacaggctattggcctacatatccgccaatggacgtgaaactcccacacgaactgaatgtgtatcaggatatatttaaagagttctatttaagcaagtacagtggaaggcgtttaatgtggcagaattctttgggacactgtgtcttgaaagcagactttcccaaaggcaaaaaggaacttgcagtatcattgttccagagcgtggttttgatgttgttcaatgacgcacaaaagttaagcttcattgacatcaaagattccactggtatcgaggataaagaattgagacgaacattgcaatctcttgcatgtggtaaagttcgggttctccaaaagataccaaaagggagagatgtagaagataaggatgaatttgtattcaatgaagattttagtgctcctctctaccgcataaaggtaaatgcaattcaaatgaaagagacggtagaagaaaacacgagcaccactgagagagtgttccaggatcggcagtatcaggttgacgcggccatagttcgaataatgaagacgcggaaggtcctcagccacacccttctaataactgagctttaccagcagctcaagttccctgttaagccagctgatatcaagaaaagaatagagagcttgatcgaccgggagtacctggagcgcgacaggagtaacccccagatctacaactatctggcttgacaacgttttggtggatcgttcccatttcattactatcagaaaaaggcactgtaaattaatttattttccggtttcttgttctttcatgcttttcttctctgggaggaagttgtagttgtagctgctgcaacgtgtttatatagaacaattttttcggcatcagtataaaatcaggttccttaaagc

SEQ ID NO: 33946 - DNA, 588 bp, Zea Mays
aagaaagcagtccagcctgcctctgcctgtttcgtgtgtctgaggatctcctgatctccttcctccctgtccttctcctcccctccccggctacggaggtgctggtgggtgctacggaggagtactacgacgacgacggcgaggaggagactctgcgcggctgctgacaaagagtgcagaattgccaagactagtacgccgacgaccaccagcagcagctgtccgggttccatggagggcggcgacggcgagacgacgctgtccgggttcggcgtcggcggcgtggacaccaaggtgctgcacgcgttccagaccagcttcgtgcaggtgcagacgctgctggaccagaaccgcctcctgatcagcgagatcaaccacaaccacgagtccaaggtgcccggcgacctctcccgcaacgtcggcctcatcagggagctcaacaacaacatccgccgcgtcgtcgacctctacgccgacctctcctcgctcttcgccgcatccgacggcgcgtccgagggcgggtccgtcggcaccgtccgccaggcgggcgccgccggacacaagaggatcaggtccggcctcgactga

SEQ ID NO: 33947 - DNA, 979 bp, Zea Mays
  misc_feature (978)..(979): n is a, c, g, or t
tgaccacatccaatccaactgcccttgctgcacaaccgaatcccacgccttctcttccttttcccttgctctctccagcccctgctgctcctgccgggcgctgcctgccgccgctgaccgcccccgctctctctctctctctctctctctctctctctctctctctcgtcccccaatcaccccaattgccgggtgctcctcttcctgtcacccccatgttgactgctgcccgccaggccgccagagagggaggattaggaaaggggggaaagagagacggacggcttctcgggagtgggttgctggccgtggaacatttcttcagttgggcccactctctggtaagtgccggttccatcgggttttgacgcaagagtagaggacttggaacccgtaaaacccatccggagaattttccctgcgcgtcccatgattaggagctgcggctggacagtgccctacgctctggagttttagtgcgaatcgttgccagtttcagtcaacttttgatggagcccaggtgttgagcgccaatttgggagttccagctgacgctgcagtctgcattcttctaaggccatcagtgaggaattttcgttccttggtggcagatgggttcctccagctctaaagtggacaatgaggagcccgtgaggcgctccaaggacaggaggcggctcatgaagcagctggtgcgccgccgcccagagcttgcagctgcgcacattgcatacctgcacgccctccgcaacacaggagccactctccggcaatttgtggagctggagtctgctttgtcacagcagcctccggtaggccttgcggcgccgccctcgcctactccacagtcgctgccgcagccgcagcccccgccacctcctgaaccctcactgccaccctcgccacaccccccgccgcctctgccttttagtccagtaaccaccataagaaagatggagaagagggatggtgaattcnn

SEQ ID NO: 33948 - DNA, 3723 bp, Zea Mays
cgatcatcaccttcatcctcaccgcaggtactttcttctctaaatcggttcaataatttgggaacaagacttgtctccaaactgaagtacatgtctgctaatcgtaaaaaacttatttgggatttgaggatttatcatttcgtcattaggataccatcacagaattgtgaaaggaaagaacttgccatggttattgatgctggggatgtattcattcagtctaaagatacaattgacgatatttctcgaacacaagaaagcaattcctttcttgatcacatatcaaaaagtcttcctagttatttttctgatgatctgttactcggtatccagttggatgagctttataaccagtttgagcttggccttactgggtttcaggtgaaggtattgttgcctgacagacataatgtttcctctacactgattaagcttgatgcttccattgcacttcgattgtgtgtattcctagatgaaccagtgctaaaacaattggaggtcggttttattgtgtcatctattgatgcatacctctctcagacaatgtacagtaccattgttaatttgcctagaatgaaagaaactaaccttttcaagaacagcgtatttgataataccaagacacatgtacccaagaaattggccttgaatgtgtctgtgtctctgaagctcgccaagttaggtttacatgttgaccttgatggtaattttgaggaaagttctggtctcattgttggcattgaagacattgatatcaggtatgctatctgtgaattgtcagatctttctcttgccatgaagacggtcaatgttactttcagatattggaaggataaatcagattcacatgtgctatgcttatctgggaacttaacacgatgtcctgaaaattctgttgaaacttgtttggatctgcattatagaactcacaagcatgacgatcaaatacatcatgtataccggctgattttatgtgatgttgatctgcatgttaacccatctgttattggtcagataaggatgtttttaagaaaacttgattcaggaccttcaattggcagtgatgttgaatccacaatgattggtcagagttccatgaaatccggggcagctaatggcatacttcccatgttctttttgtcaaatttatgtggtgcagatggcactgtattcgcaggagtttctgttgaccacttcccatttttagttgcagatcacagttgtggatataattttgggtgcttaggaactcaaaatgttgaagcacaagaaagtttatactcaaagaatgagcactgtcatgacacttcaggtttgaatggttatcatgcatcagatctcaccagcaatacatacggtaaaacccagcgttcagattgttcatctggctcatcaaatgaccccaagaatgccagcagaactgttctggatctatcacttatttctgttagaatacattttcctgaatcatgtggtactttagtaacaataaccattcctgaatcgatatcaacactcacttattttgatgcaagctcatgggacttactattgtctgctaacaatttgactcttgcttcaccatggactccaccaaatgtcaacgagctggtctggggcacagcttcacatcgcaatgctagtgtactcaacgttcgagttaaaaaggacttacctgcactgtcaaccgaagtatgtgttggaattcaaaacgtttgttgtgtattaccatccaagttactggctatgtttgttggattctttttgttggatgattggaatcgtattgcagaacaggaattccttgtggcagataacaaccttgaaggcttgagagaatcacatgactgtgtaacatataaatttgatatcagtgattgtgttgtattttttcctgtggaagagcaaggtttatcgtgtctaaagctggaggttccacattttttctgtgagttcattgcgaacggaagctctgtagaatttgcaaagcgtatccccaaagaattcttcagttcagagtgcatagtttccagaagagttgatgtcatctgcatatatgcaagaaatgcatccatatcacttctaattgtaagcgaccaaacagattttatgctaaagcttgatgagaacgttcctaagagaatccattctcttattgaaaagcttgatgccgacgtatggattcaggttccttgcaaagatataccatactcgcagcagcctacttcacctacctccgttatgagcaaaatatcacgatgcaacttgattgctgaagatttatattttataaatgggatggagacagttattggtgttgttgaccagttgatttcgatcggcaatgaaagtaaaatgtacaaaggcaatgcctcacagtttttagatcatagaagtttctgtgagggcaaccctgatcctaatgagtgtaccaatctcactatttcgatcaaggatctgatgattctcttgggccagtctaaagctaaaggtctggcactggagaggattgccactgcaaacatggagtttgatgtttctgctgtactagttggtgaaaaaccagagcgcatagactttgacgttgtttctttaacactgcagtcacctggtggttacacactcatctccattgtttcggatgggccactatctcctgtttttttcaagtttacaaagcaccatactggacaagatgagatattactaagtgtacccctttttgagatctggttatatttacaggattggaatacaattatcaatcattcccattcatacataaagacagaagtaaacagtatgcctgtggagcatgcagctgctttgtctcagtttccagaaatggtatcgtcaccacttattgcatcagaatttggttcaccagatgacttcaacttagtggtaacatgtgaaactatttctggtgtactccatatacctatctgggggaaagaagaaaatcacacaagcaatcacatgggtgtgactcctgcttcttttccaatggaagtgggcactcatgagacagatgatattcaatattgtgaaccaaaaggttgcaagtttgtcaccttaacttttgatactaaacattttgtggtgatgtcaggtgatagctgcataaattttagatgtgatttagagagattgaaggtattgctggaaatgattcaagagaataagggtacctctgttccatttgtgcatatatctaaggttaaatcttctggttatgttcgtcaatcagaaaggaatttggaacatctttctgttgatctacaagctgaatacatggatgttagtttttcacaccagatatttaacttctggcataacatggaactcaaatttcctgctgcatcatctgcatcctctttttattctgtggcattcaaggcaggattgaggaaagggtctcttctgctaagcgatggaaggtggagcagtcatggacctgtaatagagacgttattgaagaatctaactgtgcagttcagtcaaatgaaggataggacagaagtgtctgcttttgttgaccttttagtaaattacaataacattgataaggttatgtgggaaccttttgtagaaccctcaagatttcagttaaatatgctaagaaaatgtggtgattgtggattggatatatcacccagtactgatgtgtgtttaagttcaagcaagcagcttaatctgaatatatcagaacccttaattgag

SEQ ID NO: 33949 - DNA, 2214 bp, Zea Mays
aaaatgaagactaagccatactccatcacattgatcatgatattcacattcacaggcactgggcaccaactcatgataagaaattactcgctcaagttctccatttgcagtttcatggtagagaagtgcactcgttgtgtttcataaatccagcaagccattcagatcctgagaatagctcagatctgttgatagcaaccgggtgtgaagatggaactgtgcgccttacagggtaaatctgtttcttaagtgaaagtgtttgtgcatcgtatgtttcattttgatactaatatctattacagatttttgactggtagttctggaaaatggcattcctcaaagttgctaggggagcatgtaggcgggtcagctgtgcgagctacatgcttcataccagagacctacacagtaacatataattcatgtaactacagttcgaacggtatttctgatggcattgctgttgaaaaagacgagactttcttactcatatctgttggatcaaagcaagtcctcactacttggattttgcaaccgaggaatgcagaaaacagacaagtatattcaagtggcttagatattgactccaagcaaaactccagaaacttggaaaacgttgattcagccatgtcatttcaatggctaactacccacatgccaccaaagcttcctaggaacagactgaaatctggccacataaaacagagggttgaggaaggaaatttttctgttgttcagccaaatatggacgttatggatcacatggaaaatgactggcgttacctttctgttacagcatttcatttgaagcatccggttctcaggttgacagtatgttttgttgctgttgcttgctcggatgcaacagttgtgctccgtgctcttctgttaccttctcgattgtggtttgacgttgccttcttggttccacatgcatcaccagttttggtgctgcggcatattatcatcaatgctagccactataaagatgatgctggagacagataccttattgcgagtggatcaacagatggtagcatcactttttggaacctgacagagaccattcatggcttcatgcaactaatatcagagactcaaccacatatgagtattgattatcaaaagcgtcccaggacaggaagagggagtcaaggtggtcgtctccggtggagatcactgtcatacgcttcgaagaagagagatggagatatgtcatcctctgacggaagcaacccgggtagcctaaacactgctgaaaattcatctgaagcttctggtgtggaaaacactcagattgtagtgcatgaagcaagtgacagctcaaaaactgagatgccttcaagtacccagtcatgtgatatacctgaattgagaccaatgcactcgttatccggtgttcaccagtcaggcgttaattgcctccacatatcattctcaacacctgacaagtcatactgcattataagtggtggagatgatcaatctgttcagcgcttcaacttcagagtaatatcttcggaggattgcttaacaaccccagcaaggctaaattcgcatgacaatgacacacttaaaattctatatcaacataaggtagcatcagctcatagtgcagcagttaaaggaatctggacagacggcacttggtcgttctctactggccttgatcagagagtaagatgctggaagatgggattagccggccaattcacggaatactcccatgctatcattagcgtgcccgagcctgaaactctagatgttttccatgaccgggcaaagaggaagtaccacattgctgttgctggaaggggtatgcaaatggtcgagttctcaccacctgaagatgattgactacaatgattgcaacccctgctatggatgtcacatggatgttgattttgctcggcttgcgtggatcatgtagttctatactgagacggttttttttaaaaaaaaaatggttaaggatgtaacaaacagagaatttgatgtgttatcaggctatgacaaacagatcctacatatacacatataaaacactgttttgcatttgcaatgtataatgtactatttacagagtggagtttcaaatgagggattgagatgagtaagctgctagagatagtcttagaaacgtttggtgcgcaggggagcactgtagcagggaagtgtggcctgacgatacgtaaactgttgagatcatcgttg

SEQ ID NO: 33950 - DNA, 234 bp, Zea Mays
gcacaattttacaggtactctggaggatatggttgctggagcgacttggccgtccaccctgccatcgggttggacagtcgagtgggaccccacctcagcgggagaggagcatgaggagtgattggccaggcttccccatcctcccttttatttttaccgttagttaatttccgctgcatcgagaacaatggttacttcttttgaaactccggcgatgatgtaataaccttaagt

SEQ ID NO: 33951 - DNA, 1398 bp, Zea Mays
ccagacttgagtttttcaatcactaaggtgtgttaattcttgcatgcacccactactgataattggactaaagcgaagatgattcttagttctacggatggaactggatatacaaaactttatgcagaaccctcagctgcaggagtttgaattccagaactttccgacttcttacctccgctgtgctgctcatcgtgttgcacaacattatggcttagagactatagtagcagatagtttagtagaaggctcagttagcaggattgttgcaagaaaaacagcagaaagcaggcccaaagcattccaaaatggaagcgctgattctagaaacaagagtggtgtaccaaaaactgttgatgagagaatagaggaatataataaagcacgagcacgcatcttcaatggttccatttctgcagattctgatgctgcaagtattatgggaactctttctactggcaaagatgaaccagtaaatgttgacccttctgttgatgaaaccaaagtcagcacaatgaacagtcgttccagagttgctgtttttaaggatactgaaaaggatcgtagtgacccagactacgatcgaaactacaaaaggtatgttaggagctcagtgcctggcttcaacttgagcccaggtgtttttaactttgttgtgcctcagtttatgcagtatgacattggttatgtgcaatctcctggcatgtccacaaaccagcatactatgtactttggccagcctgatctaacaatagggtcttctggagctgctgtttatcgacattggccaaccccaacaatgatgtatccccattgctatgataatgttagtccaatgatgtctcaggttcctctgtaccagtctttcaaccatgattaggagattctgcttgctggaaagttgggaacaattctctgttgaacttgctatgttgtgttgtcctatgttaagtggagttcctttagattcgagccgtttttattacaaaaaattgtataaggagtcctaattcgttgaaactatttcgtgaactagtctggaactgtgatgcttgtctaatgtctagttctcgtttgcaatttgctcccggtttatagttagtagtgtgctgcgactggtcttgaaccgtgtcgcgtggtcgtactggtagaaccaggttgctacttgccagcagtcattgctttgattccgattttttatttaacttctttttaatcaagtatttcaaataatctaccctagaagttacttttacatctagttgtgccagaccacaaggacgacaaaataagattgttaaaatatgaaatgtaaatagaatttgccattgtttttcccattgagtttagagttcaaatgtcacaccggtatattccttaaattttcttatattcctc

SEQ ID NO: 33952 - DNA, 258 bp, Zea Mays
ggacctacaactgctgtggaaatggctgtccattctaatccggagttctgtttggcgagattggggtggtcatagtggtgaaaagttcctctatcattcgtgctagatagctgtgtctcggattactgtgtcgtccgaagtagtccgtattgcacattatgcttcttctcgttttcgttcaacttcgctagccggtgactatttgataggtagtatagagtcccgacgagctggacgaactgattaataatgtgcatg

SEQ ID NO: 33953 - DNA, 919 bp, Zea Mays
cattgcccttaggtgaactgatcgcgcggatgggaagactttcaagaagccaaggcggccgtatgagaaggagcgcctagatgctgagctgaagctggttggtgagtatggcctgcggtgcaagcgtgagctgtggcgcgtgcagtatgccctgagccgtatcaggaatgcagccagggagttgctcaccctggatgagaagaacccacgccgtatctttgagggcgaggcgctcctccgtcgcatgaacagatatggtcttcttggcgagggacagaacaagcttgattacgtgcttgccctcactgttgagaacttcctccagcgccgcctccagaccatcgtcttcaagaatggcatggccaagtccatccaccatgctcgtgtcctgatcaggcagcgccacatcagggtgggaaggcagctcgtcaacatcccctcgttcatggtcagggtcgaatcagagaagcacatcgacttctccctcaccagccctctgggtggtggtcctgccggaagggtgaagcggaagaaccagaagaaggcctcagggggcggcgacgctgaggaggacgaggagtagagggccacgtagggattctgcgaccgcaattggttgaaatgtgaggtggacactttagttgttgtgcctgagtgtgtttgttcattgtaatgaattcagaaattctactgtggtagacaattttgcacccccactactgacactcctgtttaaatttaaacattggcatcgtgtctagacaggatgaattgtattctggtttggccgtttgggtggctatttgctagtttggtctttaggccaatgtttaagactgaaacaaattggtagccaactttactttattatgctctgctggtctgtttggtgatttttttttacccatgcaaatacacg

SEQ ID NO: 33954 - DNA, 820 bp, Zea Mays
ggagaagcgcttctgggtggcctccttcctcgtcgtatgggcagcagcgctgcagggccacatgatgtggatgcagcgccaggacaccttcaagcacaagtttggtatcgaccaagcagacggacccgatgctcaggattcctcatcttcgtcttcgtcttcctcttcttagtaggtcagttaccttgtatcgtctgaagcggtttgttcggaacaaatgagacatccatcctttaataaagcgggcgggagagaaggcagatgacaagacaagtgcagtgtgtgtaaccactaccaggcgttcctttgatgaatgtcatttttcttctctttagtcctgaataaattctgataccatatcttttgggtgtgggatgcaaaactctgctagcttatcattgccacaaactcatgtatttgagttgtgttttatagattgaagtgcactttccagcaggtttcatagactggacagtggactgccgttggttgtctctcggtgagtgtggaacccactttcatcacaatccttaagcacatccatccctacaggatcagtcagcctgactattccataactcctgaaatatttgagaaacaagtggggcgatttcatatttcattctacaagtgtagtgtgcctgaatattacctggaaccagcaggtaggaccaaaagcaattaagaacaaaggaaccacagatggatgccaggcacaaggcactttatgtacaagtgtagtagctattagcaaaggacacttgcctggttggatctgtgggtgcgaccacaaatgcacagtctctggtagcatgaccta

SEQ ID NO: 33955 - DNA, 393 bp, Zea Mays
tctaacctgacgaagagctggaggcgatgttatcgcagtgcgcggtaactccactgcggaaagctcaccttggtgctcactggcgtgtccgcgatggctccggcccggacgtccttcacacgagctcccttcgccccgtctgtcaaccccgagcacccccgcgggtaagcacgatgacagagaattggcgtgtggtgatggcagcccctaaaatctccgtatgtccgcggcggcgatcaaaacggtgcgcaacgctctacttggtggcggcgaaccctaaggcactcgagcagtagggcacacgaccaacttttatccgctacgggtctgcgattggtggggggatcaccgccgattttctcggcgtccgcgcagaacttccgaagtgcggtt

SEQ ID NO: 33956 - DNA, 3170 bp, Zea Mays
gcgtcgtgtgtctgggggctccaaccgaggttagcgtgggccctcccgatcaagggcccgattaaaggaacgatagttgggttaagcccaatccagtctctattgaccggctgtagaggacacacccaacactccaatctcaggggatggtggtgggggtggaggtcaccacggcgagatggatcaatggattagggggaacggagatctgaggagaaaaccaaaacactgccgagtaggaatacctgcgagaggaaatgcacaggggtcagcaagatctcgatgacggaggatgaagaagaagaacagaggatccacgtaagcaccggagtctgggtcgaagcacaccgacggcgacagtgcacggctatgccatcggcaacaactggcgaaagaaagaaatgaagaacaacccgagtcaacaacgggagaaggtgctaatggatttgaagtcaagctactaacgagaaatctcacgcgaaacggaggcagaggcacgaaggggaaccaaaagttgttaatggcgatcagcaaaagctgttgccatatctttaaagagctcggttcggttataataccacgaatgcaattatgtgcttcgtgttgctatttctacgatgccgcatccataccggatgccaaattgccaacaggaaatattgtaattgtaacgtcaaactttccatgctcgttcgactacaacgtgctgcggttgacataagggtcccacgtgttgaagccccaccgatcagccgcaccagcttccccgcacagccgtcgtcgttatccccagtccacaccggccgcgccgcagcggcccatcccacccgtcagcgtcggcgtaggcccccgccggctccttcctctcgccgtcgcgagaccgagcagccagtagcagcaggagtgggtgctccgtgccccgccatccaacaccaaaagtggaacccctcacacccacgcgaggtggtcgacactcgacggagagccgcaaaggaggaggagctggcggtggcgggatccagcaggccgcccatgtcgagcggcgcggacggatcggatccgatcacgggccttggcccgtcgacgatcccagagccgccggaccgtgagccgcctcatctacagtctccgtcgccggcggcgcagcaggaggtggcggcgtcgcaagccgagacgccggtgccagcggtgaccatcgtgatctcgcggccaggggaggaggttcagacgcctgatgcaatgggtggctccccggcgtgctccacgcaggccggtgacggcaaggctacagccacctcggtttcgttgaccgcttcggcggctgccaaggaggccgagttggcaaggtccgacagcttcgacgactacgagcaatgcaggtattcagtcggtgtgggattccctgcgcgcaagctcagggtattttagtgaattgcgagttggaaaggggacgagggtgtgttctgcttgggagtgttccaattttgtatgggtaccttgttaggtttagtagttgcgcgttttatccatctatgaatcacctgctatggctttgggtgctccctatcttgggggcgttgcttcctcatgcggtgtagtgattgtaggtgtatcaacaaatttccatttatgatgtactgattcatttcttgaagtcaccctagaacatggatcatgtcaactggactgtttactttagctgcccttttctgtctgtaactacaccaatagatttttgcctgcagttgggtggatgttgttcatcacatataacatgcgagcaataagtttgtgaacacgttcattgtcagtttatctgcatcttcattagtattgactttgccggtgcttgtgacatgtgcttatttagaggccatatattagtgcaattaggctgtcacagagtgcaaatgggactacatagcattcctgttagctatgatattttagggtctcgagggtatttaggcgttgatgagaatgtaggttatgcttccaatgcagttgggttgaccttgatccttgaatgtagaagcaaaagatattcgcaataagtttgctgatggtaagatcatttgtgtgtagaattattaaagattgggacttcatagattcaataattcaatgaataaatatgatatttgattcttggttatgaaaggctaactggcagctatgagctgcaggtgaaaaacaatacgaggaagaatgctggaaactgataatcaacttctggctgagtatttcttgtaccacaaatgtgctgtgagcatgaactgcatgcaccgttgctttgccatagtttgtcaacagaagacagaagaacctctggtcgaccttggatgtagatgtcgtggtgatcttgcaaaagcacatcgcacatgcattgatgtttggtttcgtactagaggttcaaacaagtgtgagatatgccagcaggttgctgccaatatcccccctccagagacgcaagcaagtggatggtttagcccactttgggttgcatttgcaatcctgattggtggtctcttattggatgtgctgatatctgtttctcttggtgtttccgcacttcctgtcaatataataattggcgttcttatagttctcggattgggcaccgcccttcgtcttgctctcgagtgctgccaggaatggggctcaaggaggaacgtaggcaatatgccgaggctggagaacataccgccgactgggtaccaccctgcagtagtataatcattatgggacttgtaaatagcggtaggaacatctaaccttgtgctggctcttggattgtattagctttagctcacacgttgctcgttaatgtcgagctcaaattcaaagcttgttgattacgatcgggtccatactccactagtccaatgcaatgtaaatgcagagttactgatactcggtcttcatggactagtgctgatgccgaattgccagcatcttaattggttgtctggctaatcgttcagcatgacagcgcttggtttcttcttccttgtacggtttgctctcacaaatcacttgttgtgtttcatcttatctgtggcttgttggtataggcatttgtgaaggccatttgagcgaatgctgttttcatacgtttatgcacagagttgtgtggatatagcatttttatgtgaactaataacctgctg

SEQ ID NO: 33957 - DNA, 1102 bp, Zea Mays
cgacctccaggaaggaccgcactccttagtccttacacccaccaccaccagacccctgtcgcactcgtgtgccggccggcgacggcgatgatggcgactggccgatcgctcgccggggtatactccgccagagccacccgccccatgcctctacgcgccggcgcacgggcgccctgcgccggtgccgccgcggccgagcctgcggccgagcacgtgcggaggctcgtggcggagttcgacccggcggtcccgctggactccgcggtcacgccgccgagcgggtggtacaccgacccggattttctccagctcgagatcgacagcgtcttcttccgcgggtggcaggctgtcggtcacatatggcaagtgaagaacccaaatgatttcttcacaggaagatgaagcaacaggctgggaaatgtggaatttgtcgtatgtcgggatgcaaatgggaaacttcatgctttccacaatgtgtgccgacatcatgcttcactccttgcatgtggaagtggtcataagacttgcttccagtgcccttaccatggatggacatatggattggatggcacccttctgaaggctacaagaatatcaggaattaaaaacttcaataagaatgattttggtctcataccaatcaaggtggctacttggggaccttttgtgttgatcagatttgatgatgagtccactgaagataatgtttatgacacagttggaaatgaatggttgggtagtgcttcagatctgttgggtacaaatggcattgacacttcactgccgcatatttgcaggtcttctgtgacaattacctagacggtggatatcatgttccatacgcacatggggatcttgcatcgggtctgcagcttcaatcctatgaaacacttacatatgaaagagttagtgttcaaagatgtgaaagtgcaccagcagaaccagatgacttcgatcgcttagggacaaaagctctatatgcctttgtttatccaaactttatgatcaacagatatggtccatggatggacactaatctagctgtcccattagattcaaccagatgcaaggtggtatttgattattttcttgacaagtcttt

SEQ ID NO: 33958 - DNA, 1187 bp, Zea Mays
cagacagccaaatgccccaccacagcgtagcccctcctcactgactcgcctgcaaaaaccacttgcaaaccacacaaaccgaaaacgccagctcccctgcctccatttttagcaacttttcccttctgtcttcccatcacagtcacccttcttgcccccacgcagccgagcgtgcctacccctcctcgacccttctctggggccgccgttggacgctcatggagaggagtcgtccgggcgccgcgccgacaccatcgccagaggaggaggtggcggcggagggccatgcgcatggtgacgatgtgacggggcaggaggaggaggcgacgccagtggtgctcaagaagggcccgtggacggcctcggaggatgccatgctcatggaccacgtccggcaccacggcgaggggaactggaacgcagtgcagaggatgaccggcctgctgcgctgcggcaagagctgccgcctgcgctggaccaaccacctccgccccaacctcaagaagggctccttctcccccgacgaggagctcctcatagcccagctccacgcgcagctcggcaacaagtgggcgcgcatggccgcgcactttcagtcccagagagcagaatcagcggcctgcagcgtcggggtgacgacatggacacgctgttcggcctggtgcacccagcgctcggcgcgccggagacggcgccggcggccgccgcctccaaccactccggctcgacctcgcggcacagcaccgccgaccagaacccgtccaccgtcggcaacagctcgccggaccaggactggggcctcgacggcgtctgccagtggagcaacgtgtccaggatctgctgatcgcgtgcaagagctgcaggggggggggggggggggggggggtcggcgtagccatgccgaatcatcgattaggacacccatccgacccgatgattctgagaagggccggagacggaatgccgaccttttcttttttttgcttttgaacatttcagcctgtcagatgccaagcatcacggacaaatctgtctgtgttctgttctccgttcctgaccgactagttgccggctcaatctcgaactcagctgcgatcgaatctgcgtcagcgtctctagctagcatgttgttttccagtttcccgttcaattgacatcatcaatcaattgtagaatttaaaggtaga

SEQ ID NO: 33959 - DNA, 1258 bp, Zea Mays
taatcatatgatatcattaagatatttttgttatataatcatgaataaacatcgacaatactgaattacatttataccttcgacttgacagaaggtaaaaatccgagcgtgacgagcgagtgaatacaagtcagcgtgaacagtacaggggtactgttcatctatttataggcccgggacgcagcccgcatgaaattacatttgtgtccttggtaactaatcattactaaaacacaacttatcatggactaaatggtcttttactctttaagtcggtgttgaccttcgtctcaagacacatcgtcatgtcgaagctccctggattgtagcttcggcttataacttcatgttgtgtctgcttgcatatcaccctgccgaaggtgtttttacttggaggaccttcagcgaggaagaaggccccaatagtagccccttcgcggtgctagatcgtttttcgtaacgagctcgatccgcgaaaaatctcaaaggctttggaatgccaaaggtcccaaaaacaccttccctgagctcgttgccgagaaacaattaaaatactccaagcgtcgggtggtccaccgttcagtgggtgcgagcgatctggcgattcaccttccaggcaccgagtggtccaccgttcagcgggtgtgggcgatttggcggttcaccttcccacctgcagcactatataaacagacgagttggtacagagttatcacaacattcattgccattgcaccgttgtgctgttaaaaaatttaaccacagccgaagctttttcactgcgctgtcaagcgaacacttcatcatttagagttaacttcatcaaaagagtgagcttcatcaaaactgcaaaaagtatcatcaactttgtaaaaaccgcaaaaaatccatcagatggccagagtgcgctcgactgcaagggtgactcgtgaaggagaggaaaccgaggccaccaagacagctccaatttccgaagttatgagacagtcaggtctagttgtgacagagaaagctactgatgaaggtgctcctgctaccgaagctgaacatactgttgctgaagaagaagaagatattgatgaagaggaagattacattattttgatcccaagtaaactcagtcatctagattttaagaaatctacagtgtctaaagctgacgtacccatgatgacgaagctgggttactttggagaagttgaaaggaaactggaacaagacaaaaaagagttaaaatgaatgagttatgcattttctg

SEQ ID NO: 33960 - DNA, 1251 bp, Zea Mays
gtggcgtgcgaaccaaaaccaggtgtcaccttgggtgcgtgcatggaagacaagagggcaaacacaagctgagatacggcggaaggcaacaagaacggccgccttcgcctccgttcatctctatcccagatactactagcgagcacgccatggagcaaaccgaggcggcggtgagcggcgcgcttggagcgggagtggaaggtggcgacaagacggcgaggaaggcgctgaaggtggtggcggccgtggacgcgagcgaggagagcctgcacgcgctgtcgtgggcgctggacaacgtcgtgcggtgccacccggacgcgacgctcgtcgtcgttcacgcccagcacgccgccgaccacttcgcctaccccgtcgccgcgcacggcatcgtgtacgccccgtcctcggcggtggagtccgtgcgggcggcgcaggaggagagctcccgcagggtcgtggcgcgcgcgctggacatctgcaaggagaggcaggtggacgccacgggggccgtcgtggagggcgacgccaaggaggccatccgccaggccgtggagcgtatgcaggccgggcttctcgtcctcggcagccggggcctcggcgcgatcaaaagggcgttcctgggcagcgtgagcgactacctcatccatcacgcctgctgcccggtgctggtcgtcaggcccaggccgaccaagtgaactcgcctatcgttctcgagcagtactccagtcatgtacgcagtgccctgtgccgctgcgcggtcagtaataccagtatatgtatgctcatagaaaaaaaatgtagaaaactgaataaagaacctatgcatggttgtatctgcacaaattatcaacgcgcctccttgcctgcacttccgaactttgccgttatcaccaaagaattaagacaggactgcaatacgatcatttttgttggcacgttgtatgaacttggattagtgttaaaagctcttgtgttgtttcacaaaattctagctccgatgcagctagccttccgtagtagtgtcgtttagatgccttacacaaatgtccaatgtgactgagcgcccgccgcctacagcatgattgttgtcacctttattgtaacttttatgtttggtgtacaagtccactaggtaacatggatcacaaaacatacttgatccttgtattgaccaagggacagtgacaccaccgggatagtattcaatgtgtctccaccggggcgttgtgaagacttttcgaggcatttttg

SEQ ID NO: 33961 - DNA, 1584 bp, Zea Mays
cactctacattttcaccctgcaagtctcctgtttcagctctcttcccttcactccatcggctcgtctgtacagcatcccgtgtagcgtgtatccacctcgtcgccacctcaatcctcattccccaatcccgtccgcttctctccccgtcccttacctcgcccaggaggggagcctcccgcttacaaaccctagcctctactcctctgagcttccaccgctccgctccccatggaggacgaggacaccggccccggcgatgggggcgaggcctctcctccgcaccacgtcgcggcgtcgagcgaccgggcgcgcgacatggtggcgtccccgaccagctcgcgctctgtgacgcagacggtgaacgggtcccaccacttcgtgatccagggctactcgctcgctaagggcatgggcgtggggaagcacatcgccagcgagacattcaccgtgggcggttaccagtgggcgatctacttctaccccgacgggaagaaccccgaggacaactccacctacgtctccgtcttcatcgcgctcgcgtccgacggcaccgacgtgcgcgcgctcttcgagctcacgctcctcgaccagagcggaaagggcaagcataaggggctacaaaaggttctttcggcgtactgctcttgagcaatcagattttcttaaagatgattgcttgaagataaactgtactgtgggtgttgtagtatcaactatggattattctaggccacattcaatagaggttccagagtctgacataggctttcattttggaacgcttttggacactcaggaaggtgtagatgttatttttagtgtagcaggagagaagtttcatgcccataagttggtattggctgcccgatctcccttttttagatctgaatttttcgatcatgaattgggtgaagagaagaacggaactgatacgggggatgaaatcaaagagatcgttattgatgacatggatcctgtagtgttcaaggctgtgcttcattttatctacagggacaatcttgttaatgatgacgagttgtctgcatcaagctctgactgctctatctttgatcgtttgtccgggaagttaatggctgcagcagacaaatatgagttgccaaggttaagattgttgtgtgaatcttacttgtgcaagcatatttctgtaaattccgtggcaactactctagcattggctgatcggcaccatgctatggagcttaaatccgtttgcctcaaatttgctgccgaaaacctgtcagctgtgatccggactgagggtttcgactatctcaaagacaactgcccatctctgcagtcagagatactgcggacagttgccgggtgtgaggagccatgtagcagcggcttgaaaagccagagcgtgtgggcgcagctctctgacggcggcgacaccagcgggcgcagggtgaggccaagggtctgagacgcaaaccccggaagcactgacctttgtaatcaaaagctgttgtggtgtaaatgggacggcttttcttaattttcacttgagacaacgatttaaataacatgattgacgtgtttgtggtgctcgcaaaaaaagt

SEQ ID NO: 33962 - DNA, 501 bp, Zea Mays
tctgtaaaaaaaaaaaaattggggtcctccgcctcccgcaatgcctcccccttccgcctccgcctcccgcttggcgacccactggatagctgacgccctcgccgacgacgagtccctcgacttctccgtgctgaaggctctgttgggggactcgtcgaagtccctcgcgggagccccggaggccacgcgtgagcgggtcgcgctccggtgcattcaggaggtgtcgtccgtgatagcctctgggggtgatgccgcggccccggcgggggtgcctagggttgatggcgcttggtcatgcgaggatgtgttgtttcggcttatcagagacgttggaagctccggagaattggagaaggatttgcttccacctttaagtcaagacatccaggaatatatatgtaccaagaaatttacactaccagaaacttctttccagttgggcctcagtgtatcagggttgcatgagattcagtgtagcagggtagcaggggattcggtgta

SEQ ID NO: 33963 - DNA, 3018 bp, Zea Mays
tatgactgtatgagttggagaaaaaattgctattctaaaacaaacaccaatttcgtctctttctcctttcagtcctcggcgaactcgactcaaaccctaagcccctctccttgccatcccgacccatggatcgcgagcgctcctcacggcgccctcgcgacgacgatgtgcaccaccggtctcgcgaacgggacgacgaccgacaccgccgccgcagtcgccacgacaccgacggtcaccacaggtatgagggcggagacgaggatcgccgccgccgccaccgccaccgcgacaaggacggtagcggaggcggcgaggatgaccgccgtcaccgcaaccatcatgacaatgacgacagccgtagccacagctaccgcgacggcggtgacgacgatcgccgccgcgggaaacggcggtccgtttccccgtccgagtccccgccaccttcggtgaagcgggatcgctcgtctagccgcccgcgggagtccgttgagcgtcgcgactccaccgaccgcgagccgcggtcgtcgtcgcggaagcggaaggaccacgagggcggtggcgacggggatgagcccgttcgcgaagggggcaagcgggccagggcctccgtggacctgcctccgtccaaggaggagaggcctagacgggagcgcaggaggtttgaggatgtcgatgagaacgggaagaatggtgatatgggtaaatggggcaaggaaatctcatctcatgagctgcagaaggaggagttatcaattaatggtggtttacagagctacgatgcacctaatgctggttctcagcaaccactcagtgctgtttctgtgccatcttctgttcccattccttcaaagatggaagtgcaatgtctgctgctagcaaaagtagtaacctatctcttgatgctttagccaaagcaaaaaaagctttgcaactgaagaaggaactgtcagaaaaactcaagaaattacctatgcttaataataaactcgctacagctgttactgctacacaagtttctaaagaagcagcaaaaacttctgtatcagctgtagatgcacaacacttttctaaaggagaagcaaaacttactgatgtttctagtctgccaactagtagcatctccggaacgccagccattggtggtgtgattggtattccaggtcttacacacatacccaatctcgattctgtgaagagagcccaagagcttgctgctaagatggggttccgccaagatccacaatttgctcctgttatcaacttcttccctgggaaatgttatcagcatgacaaagccaacgaatctgagtactctgaaggtcaatataaacaagcagaagaaagaagcttttcaaataatcaagccggacttggattctcttgcaaaatcaagtgttcattttgatgaaaggatgggcataaaccaaaagaagctcctccgtcctaaaaggccaggatttcagtttgttgaagagggtaaactctctaggcaggctgaattgcaaaaaattaagagtcaatttggtgaagcacaagctaaagagcttaaagtaaagcaagcccagcttgctaaggcaaaggcagaagtagacattaatccaaactttattgaggttgctcctggtgtgagagctccaaaacaaaagcagaatgaagatatccctgaaattgagccatgggatgcaaaaattttactttctgccacatatgaggatatctctgtggaggagattaatatggacaagatcaccatatatgttgaacatccagaaccatatgatccacctgctgaacctgcaccaccaccgccccagccactgaagttgactaagaaggagcagaagaagttgagaacacaaaggcgtcttgctaaggaaaaagataggcaagaaatgattaggcaaggcctcttggagccacccaagcccaaggtcaaaatgagcaatcttatgaaagtactaggctctgaagctgtgcaagatcccacacggttggagatggaaataagaactgctgctgcagagcgtgagcaggctcacgttgaccgtaacattgcccgcaagctcacaccatctgagcgccgcgagaagaaagaacggaagctttttgatgatcctactaacacaatagagactatagtttgtgtttacaagataagagacctgtcccatccacaaacacgcttcaaagtcgatgtgaatgctcaagagaataaactaacaggtgctgtggtcatcactgatagtatcagtgttgtggttgttgaaggggggaagaagtcaatcaaaagatataataagctcatgctaaaccgtatagactggcctgctgctgttggtggtgatgaagacacagaaatggaagctgacaagccagtgaatagctgtgtattggtctggcagggtagtgtggcaaaacccaccttccacaggttcactgtacataactgccggagtgaggctgcagctaagaaggttttcgttgatgtttctgttcctcactactgggaccttgctgtcaatttctcagaagattcttcctgagcaaagcacctgttcagaaccttggtagcttctgctgacctttgctggctacatgctagagatgtgtggccagtgttatagcacttgtcatgatggtaagtcctgttatcacgagtttctacaccaatgggcacatctgctgaaccgaggaatgcctgctgttggcctgttgtcaatctgttgtgaagatgtcatttcagtgatgtttattgctggattttcctatggtctagaaatgtgttgtgagcaactgttgaattttgcagcgtacatttggaataaatccattgcaacaaatgtctatgcgtgttttagtattgttgcggagcgaattgttgtgaaacaagtgtcttcttaaatagataccccttcgtgtgtgtgcgcgtgagtggcattatgaagactataatagccactagtaaatgttttaggtggttaccgtagccactaaaagtgcaatttctatgatcag

SEQ ID NO: 33964 - DNA, 1503 bp, Zea Mays
ggaaataagggatggcgtctaaaaacaggggcaaataaaggattaactcaaaagaaaatggtcttgcggtcttgctctccttcctcgtggtcggcggccggtgcagctgtagccacgcgcgcctcggcaaaccctccgcctcctcgcccatcctcccctccatcccgtcccagccgcagggccatggactctgctgccggcgcaggccgccaccgcgttcgaatcgcagtcgtcggcgacgtgcacaatgattgggcccttgaggaagattcaaaggcgcttcgatttcttcagccggatttagtgctttttacaggcgattatggaaatgagaatgttgaacttgtcagaagcatttcagatcttcagttaccaaaggcggcaattcttggcaatcatgattgctggcacacacatcaattctcagagaagaaggtcgatcgtgttcggcttcagctcgcaagccttggtgagcagcatgttggatacaaatgtttggacttcccatcaattaagctgagcgttgttggtggacggccattttcttgtgggggtgataggctacttagaccaaggcttctctcaaaatggttgttatggtgtcaatgatatggctggaagtgcaaagaagatatacgatgctgctgcaggtgcaccagagggacattctgttgtattgcttgcacataatggaccaacaggtctaggttcaagaatggatgatatctgtgggcgggattgggtacctggtggcggtgaccatggcgatccagatcttgagcgagccatctccgatttgcaaagggaagccagagtttccatcccgctggtcgtttttgggcacatgcacaagagcctggcctacgggagaggcttgaggaagatgatcgcctttggagccaaccacatcatatatctgaacggagcagttgtgcctagagtgaaatttgcccaaacaactcctgggcacgagcaaaatcaacccgaaggatcgggatccagagctccaacgttgcgcgcgttcaccattgccgatctctatgaagggcgtgtggagaagatctctgaggtctgggtactggtgagtggcgccaggaccgaggtcgaggaggaaatcgtcttgtacaagcatcctcgagagcagcatatgtgatggttatgagaccattatcttaccaaaaaaagatgtggagttgtgagacgaaaatgtgactgttgtgaatgccgtaaatgtgggggcgatgctgaagttgtgtgttataaagtgccttgtattccaactgaaaggagcacttcattatagagagcctgttacggcttctacctctggcactctgtgactgttattagtaagtaataattgtagctgattgacggaagagagatcttttgaaaaagaaaaatgtgtctccattctaaggatggattcgggtgtctggagatccgaattatttgtattcggataaagtgctaatatagatatccgtattcatattcgatttt

SEQ ID NO: 33965 - DNA, 11770 bp, Zea Mays
cggcggccgatgagattgacggcgtggcggtcgcgacaatgcaaacccctcgtccctcctacgcgcaccaccagctccagcagcacctctcctccctcctttccgccgccgccgccgatcccccgcacccctccgacgatgcctcccgcaccgccgccctctccaacctccgtctctccttcctccacccacctaaccgccccctgttacctgccctcgctcccttcctcgccccgcccctttcggtcctcctcgccgacgatgcgtcctatgccgtgcggcgggcggcggtatcggcgtacgcggcgctctgcgcggtgctgtgctcgcacgaagcgcccgggggcctgccggacgggttcgtcgcctgggcactgccgctcctgggtgacccctcctcagctgctctcgtcgccgaggggctccgggagctcctgtccactggggacgtgtccccagtcgagaggacctagctgatgcagatcgcagcatgatcattgatagttttccgcagtttcagtggcattggcttgggaatctgcagttttcacttggattactgcccaagttcttggccgatatggaggggcttgtgcatgatctcaacctgggaggcagccataatcctgggaggcttcgttcgctgtttgcttgtttctctacggtactgcagattatgtcttctggtgtggctgagcgaaataacctaagagaacttgtagctgggcctctggaaggtttagctcctcaacttttaaggtgtgcatcagtgatagcctctaaccttggctggtctgagaggatggaagacgcatccaaatgcttggtcttgcttgcagagattctgcaggaaaggtttgctgatttttatgtccattttgtggatgtgttggtccagagcttggaagttgcctcctcggcacagttggcggcagcacttaagactaacctgcaagttctatcactgcaaaatttggggctccatgcagcttctgttggagctttgcttgacttcagttcaattttatctaagtcacgtcttcatccaaaccacagcgtggttgcaaactcagcagctacctacattttttgcttacagcatggattggaagatgtagttgatcaagcaattgcatcagtgatgaatgagttggagctgataaaatctctgctagcggaagggcaagcaagttgccctgatatccatagtccccccttagaattgaacagtgaaaggaaaaacgagtcgaactcaggtgtgcattgttggccacaatattcagaggatcagttgctttgcctaatgaaatttgatctcaagattcttctggcgactattgcactggatacaaaaaagagaaatgagagaacaactaacttgatacaattcatcttaaagaagcttgacccatttggtgcccctttccataatttccttgagatgcagtttcagattttctctacactacacaaactgagcaacatggaactctcaagcaatatgccagcatctgaaccatttgaaagagactctggaggttataaaacacagccggttgtgttagaaaagaagatttcttgtgaatgtaaaaagaagtttgtgcataaatatggcaaatacatagttcagggccttaatgcatcatcatctttgacactgaaattagaggctctagattggataggttcatttgaaaaattgatccatggattggagaggggtgtggataatttcagtttctcttatgaggtaatttgggatgctaccctttcgagtgatatcctttttgctgtcttggattgtgcatatgatagggagtctaaagtaaggtaccatgttgcaataaccttggagttactatttctgggaaggctcatcaaccccatgaatttctatgttgttgctcaggttctgctagacaagcttagtgatccagatagtaatgtaaaggatgcattcttaaggttattttcaatcaccttgcctatcacaacatatgcgtttggcttgtttgcagatgaacataattatcgtaattcctcagatattgttaacatgtccaaccattgcatgaactggaggcatgtgcttgctgtgaagcaacagcctaggaaactccactggcagcagcttgtttctgttttgagttacctttctctcagattgaagttacctctttcgtcttgggtgcaacggctggtctttagttaccgtgggaagaaagatacgcgttatggtcaaattgatatgtttggagatgctgatgggaatgaactccccaaaggccctggtgtggacagaaatactattgatataatatactcagtaaataatcatgctgctgtttggtggggaatccatgaagctgcccggcactgcattaaccttcggcttcgaactcatctaggtggtcccactcagacatttgcagctctagaacgcatgcttttggatgtaacaaatgtattaatggtggaagctaaggaagctgaaggaaggtatatagggccagctgacatttgcttattgccaatgcgtcttctattggattttgttgaggcattgaaaaaatatgcttacaatgcatatgaaggttcctttgttctatcacccccaccaaaagcaagttccgtgtttttccatgcaaacaaacgagtttgtgaagagtggttttcacgaatttgtgatccaatgttgaatgcaggattagctatgcattgcagtgatgcagtcattcactattgttcactgcggctggtagatctcagaaacctggctgcatcatctctcagaggcaatagtcacatgggtggggctactgaaagtcatgcctttagagagaggttagaagcagatgttatgaaagtcctccggcatgcttccctggcactctgcagatgtcatgaaacagatgccttagttggacttcagaagtgggctgcatcaacattctattcttactttgagcaagataatcaactagttcggggcgtatctgatcgcgacaatcgcttctcctggatatcaggattgatctatcaatcccaggggcagtatgaaaaggctgctgcacattattcacatctactgcagtcggaggaagcccttatctccatgaaatctgatggcattcagtacatcatagagcgtgttattgagtgctacacatccctttcagattggaaatgcttagagagttggcttgctgagttacaagtgctccgtgctgtacacgccggcaaacctttttcaggagctctaacaagtgctggcaacgaacttaatgctatccatgcaatggcgtgctttgatgagggggactttcattcagcttggggttatcttgacctgactccaaaaagcagcaatgagctcacccttgatcccaaggttgcacttgagagaagtgaacttatgcttttgcgtggaatgctgcgatgtaatagcaagttagagggcataacagaggagcttcataaggctaaattgatgttggatgaagcactcactgttgtcccactcaatggattgcctcaagctgctgcttgcgctggccagcttcattgcatatttgcattggaagaagccttggggttgacctcccaaaatggacttaatcaatcacaatcaataatggattctttactgaaagcactgcatgatcctgtcgataaaatgcatcaagattgcaacatgtggctaaaggtcttcaaagtgtaccgtaatacacggccatcttctttatccactcttcttctctgtcagaagcttgcaagtctttctagaaagcagagcaattttatgttggctactcgtttaaatcaatacctcatagatcatcctttgaagtcatctgatgagatggacaaggaaatacttgaattgaacattaagtatgaaggtgccttgctgaagcatgcaaatggaaataatgaagaggctctatctgatctgtggtcactggtccgagctagtgttctgtctagagttagttgttcatctggcattggcacttcacattcactggttgctagggcttgtttgaaactctcaacctggatggagcaagcgaactcaagtcctttaaattcgatcattccaatggtagtaaaagatttcagcgattctgatggatttcaagatggggcagagaaacttctatctggtgatagtgtatctgtttcgactttggattatcatgcacttgctcaagaaatcataggcactgctcgaaagatatcctggcaactttgccccactatgggtaaggcttggcttgcttatgcatcctggtgctttgctcatggcagttattctctgtctggaactgattcaaatttgcagaattcactgtcccctgttcttcagtctgaactctccccgagtagatgtcatttaacagatgacgagaaatctgaggtgggtgaaataatcagaagtatctgtgctgatgaacatgcaaatcatgtgggttgtgaatacccaatgacaccagggtgttacaattctgcaccagagcaccccatatctttacttgttgaacaggcaattagtttgatagaaactgcagctggagcaccaggctttgagtcccgcgaaggtgatgatccctctgcagttctagcatcagagctggtggttctttgtaaatgtgattctggaaaggacactgcacctttgattggcaagcttactgaaatatggtggtctttaaggaaaaggagggtatcactcttcggacatgcggcacatgcttattttcagtatctttcccattcatcaactgagcttcaatcttcatatcaccatgatgctttgaaagggaaaacaagaagctacactatgcgtgcgatgctgtatctacttcacataatgttgaactatggggtggaactgaaggaaacacttgaaagtgggctttcaacagttcctttattgccatggcaggagattatacctcaactttttgcacgcttgagttcccacccagagaagatagtgagggaacttttggagagtatattgctgaagctaggaaagttatctccttgctctattgtatatcctacattggttgatatcagtgcttgcgaaggagaaccctctgaggagcttcagcgcatatcggactttatggttaagctataccccaatttaattaaagatgttaagcttgcaattgaggagctaggtatgattactgttctctgggaggaacaatggctcagcacattacaagatctccattcagatgttttgaggagaatcaatatacttaaagatgaagctgtaagggttgctgcaaattctacactgagttcggcagaaaagaacaagattaatgctgcaaaatattctgctgttatgactccaatagttgtagccttggaacgtcgtctggtgtctacatctcgtgaaccaaaaacaccccatgaaatgtggttccataaagaatacaatgctaagctgaaatctgcagtcacaacccttaagatgccccctggatctccagcagcattaggagagatttggcaaccttttgattcaattgctgcttctttagccacacatcaaagaaggtcacacataatgttaagtgaaattgctccacagctagctgttttgtcaacctctgacattccaatgcctggttttgagaagatacttggttcctcagaatccttttctggaaaccatggcattgtaaccatatcttccttctgtaaagaggtaacaatactttcaacaaagacaaggcctaagaagctcatcttgcaaggatcggatggtcagaggtacacttaccttctcaagggccgggaagatttacgccttgattcacggataatgcaactgttggaggcaataaatagcctgttgtattcgtcttccgacactcgaagtcgaaatatcacactacggttctattccgttacaccggttagtggacgagctggactgatccagtgggtggaaaatgtaagcagcatatacaatgtgtacaaatcatggcaaaagcgttcacagttggcacatgcacatgcagaggcacaagtatcttcagttagcactggtaacattcacaaccctgttgcacctgttccccgtccaagtgacatgttctatggaaagattataccagcactgaaagaaaaagggataaaaagggtagtctcacgaagagattggccattagacgttaaaagaaaagttctattggagcttatgaatgagactccgaaacagattctgtggcaagaaatgtggtgtgcaagcgaagggttcagaaactttaactccaaagtaaatagattctccaggagcgtagcagccatgagcatagttggccatatactgggtcttggagatagacatttggacaacattcttatggatttcagcaatggggatgtggttcatattgattacaacatatgctttgataaagggaagaggttgaagattccagaaattgttccattccgtctcactcaaacaattgaatcagctttaggattgactggcgtggaaggtgtttttagagttacttgtgaggaagttatgggtgtcctcttgaagaacaaagatattatcttgatgttgttggaagtatttatttgggatccattgattgagtggacacgtggaaatatccaagatgaagcaggaattgccggtgaagagaagaaaggaatggaattagcagttagtttgagcttgttctcttctagaattcaagaaattcgtgttcctttgcaggagcacaaggatcttttcttaactaatttgccagctacagtatcgtctctaaagaaattcttggatattttagatcagtatgaggttgcatcggctatattttatcatgctgagaaagagagatcaagtgttttgcagcatgaaatgtcggctaagttggtcctagctgatgctacatcgggtgctgagaaatctcgcacttcatttgaaattcatgctcacgagttagcagaagcaaaagcggcggcagttgatgaagctaacaagcttgcaatatgggtcgaaaaacatgcactggttcttgaggctatacgggagaactctgttgcgtgcattgagtcatgcatgcaattgaattgtaaggacaagacattgagccttatttcagccgtcctagaatcaggggtcccacttacagttgtaccagaaccaacaagagcgcaatgctcggaattggatagggagatttctcaattattatctgagttacagggtggactttcctctgctttagactcacttggtgaatattctttagtcttgaagcaagttcttccggttaactacatcacaaccagtccggttactagttgggcgcaagtcttgcagcgatctgtaaggagtacatcgcaagatatgctttccctggctaaaatacaggctgcagaagtcattgctaaggttcaaggtgaaggcattaatctggtgcaacaaagatatcaggatctcgtaaatcaaatggaaagttatgtttcatgtgtggagaaacttgcgagggagtgttctgaactgatgaattctattgggttgaataacgaagtgcaatcaaaagagcggatactttctgtattcatgaactctgttcagttgccttcacaaaagaaggatggtgatagtactcatttatcgcattcaggaagtcctcagcagggtgagatcaaaactccagccaagggcgatgtacaggagacaacaggtaaggtcctctctattcttgggattgctgtgagtcagctatatggtgatattagagccaaagtgtctgaactctcaattaaagctattggaaaagctaaatttaggacagatgattctggtcttcaagctgatgctggaatgagcttgcaagtatttgaacaacatatagaaaaatgtgcattaatttctggagttgttgatgaagtgcatgaagttattgggagaaccttagcagaaacaagtgctgcttatgcaaagcccagtcctaggcactgggcctctacttttcaggcagctttgcactcaagcatcaacttgattgaacaaatgactgaagcttttcttccagaatttatcagatcagttgttccacataattcagaggtaaaggaaaccgtcaggtcaatttctgaggtacgtggttctgttgataatgctctagagaagctgattgaggttgaacttgagagaacatctcttgctgaattggaacagaactactctgtgaaagttggcagaattactgagcagcaaatagctcttgaagaagctgctgcaagaggtagagaacatctatcatgggaagaagcagaggagctagcttcacaggaggaaatctgtagggctcaattggaacaattacatgaaacatggagacagaaagatatgcgtattttgtcacttatgaaagtagaagacaatatcatgaattcgctgctttcttctaaacagtatgtttcatctttggtggaccatgatcaggaaagtgagtttcattatggacaaattaaggccctcctttcaatcttcgcaaagccctttgctgacctggaatcgctggaccatatgctatcatcatctggcatgtttcctcacatagacaatcccatttccaatattaaagatgctttgtctttgggctcttcattgtctgacgtggtgtggcctttagctggcatattgaaggatcatgctttttttgtttgggaactcaatcttcttgattcggttcttgttttatgcatgcgtgagatttcatcttctcttgagcatggcattaatgccaatcaactttacatgactcttaaaaagaagcttgcgatctatgtggaaaaacaagttttccggtatgttacagaaaggattgctcctgcgctcaccctaaagttagatgaagaaattagcgctttgctgcagctgagtcaaggaataagagcatcagatcagcctaaaagagattctgctgccgttggaagggttgcattaatgcttgaggagtattgtaatgcttatgaaacagctagagctgccgggactgcagtttcgctaatgaaaaggcaattaaatgagctcactgaggctctgcgcaaaattattttggaaatagttcaggttgaatggctacatgatatttcatcgtctcatgcacagaaggtgaaggttttgtcacaaaatattcttagtgatgataagttcatctctttgatgttaaatctgagcagaagcaatttgttagataagatccaatcttctgtctcattaataacaaggtcaattgaagtcctgcaagcttgtgaaagcatttctgtttcggccgaaggacaacttgagagagcaatgggatgggcctgtgctgggccaaatacttccagtgcaggtggttcaacggcaaagggttcaggaatcccccctgaatttcatggtcatctattaaaaagaaggaaattgcttcgggtggttcaaaaagaggcatctgatcttgttaaagtttgcacctctgttttggagtttgaagcatccagagatggactttacttcgttcctgaggataaagcttccgaacaatcttcggacaaaggcagggcctggcatcaaactttcttgaatctcctggcacgtctagatgcggcatttcattcttttacatgtgcagaacaagaatggaaacttggccagctcagtctggaagctgctggaaaaggcctgttttcagctaataaccaggtttcagtagtctctgtgaaagcaaactctgctttagttaatctccaggatgttcttggtgccatgtatggtcatgcttgtgaagcaagtgcattgctatctggattcaaacatgtatcacaagactgcactgctttgacttctgaatgtggttcgttgctcgaggaggttttagctatagcagatgggttgcatgatgtatacactctggggaaggaagctgctgctgctcacagttcccttatgaccaatctttccaaggcaaatacaattttgtttccacttgaggtttgtctatgtgctgatgtaactgttatgtctgaagcgatttcaaacgaaagagagaagaacaatgctagtatgcctcttattcatggaaaggcattataccaatcttataatattaaagttagggaagcttgcaaaactttggaacctctggtgggtccactttctgacaatgcgaaggaactgcattccatggtaatgaagcttggacacctttcaagtcttcatgctgggaatcttcacaaggctctagaagttccaggagaaagggaatctatgagatcccaggatttgctctcaacacatcctgatcttttgcaaagtgattcatcaactgagaaggatagagcctctcttggcatggattctggctctccagatttggaattgaatactgacatttgtttgcaagatagatgttggatttcacctccagagcactcatatactagcagttctggatgtaccacagggttgacccagattaatccctatgacaacttagagaaaatagatgctcttatggatgatggggctgaaatagatggttctggttctactgacctggaaacaaaagacagtaatcaggaagttgaaaccgatttggtggtgggaagaattgaaagtgtggataacaacagtgcagcagccttcagacaagttagaggacaagaatgtgacaacagcgatcctaaatcctatggagactctactactcgagtgaccagaggtaaaaatccttttgccctgtccatcctgaagcaagtggagcataagttacatggacagaatatagatggcaccaggtccttgaatatttctgagcaagttgactatcttcttaaacaagcaacaagcattgacaacttatgcaatatgtacgagggatggacaccttggatatgattcaaagatgtgactttccttcattgtgcatggacaaatagtccagctgcacaaaaaaacgaaggaaccgtagcacgaccaacacatgatatggctgctatggatgctagtgaaacaggagggtttgaattcgatccagcccctcaaatgctggcaaagaagaggctccatggtacgcatgaatgttgaatggctatggattggtccaagtgaattagccaaataacaatcgagcatacacgtgcagcccatggcctggtcatatacaatatcttttctgccgaaccccatatattccgaatatcaacaatgtggaacgctaagctagtgtactgtttttgtaatcgggcttgcacatggtatgcgtcaaatgtgcaattgaacgacccagcatttgcaatttgatggggacacggtacacggcccctctggattaagagttgaagaccttgtagcgacggttgacctggccaaagaggcagagaacattgaagaaaagatgagaaggcaagttactttaggctgacccttgattgttggtctattttggacccctcttcttaagataatgatgtgcagaaaaaaaaactatcctcttttctccataggaaccttatcaactgatgtagactttatctggttcaaatataatgtacatgctgtacctatggttttggtagttcccttttgtaacatataaaggtagacccactgccagtcttccacctttgtggggtgtagtggagtaaactgaggcaggagaggctattttgaacccatgacttggttgactgagacggcgttcatcgtacatagatgttggaaatacaattt

SEQ ID NO: 33966 - DNA, 2237 bp, Zea Mays
cagcggatcccgctgactcctccgctcctactcccctgcgtctgctcgtcgtctccccgctccaaaccctaactcgaagccggaacgaccgacaaaattcgggaaaatcgctcacaatttcgctccaaactacttcctggacggtgatgcgatgatgcacatgctggtagccccggataggggcggaggggagctgcagccgtacgtagcgccgcccgcagagcaggagctggagctcctccgcgacaacgccgatgacggcctcgagggccacgtgcgatgcctaaggtgtggaatatcccggcaatgcgacgccccatatgcgccgggggcctgatggcccaagaactctttgcaatgcgtgtggcattgcttacaggaaggggaaaatgagaagaatgatagaagctgaaccacccatagatgaggctgctcttgcaaagctggttccagagatcgatgaggatgacaaactgacaaacttcttttgggccgaccaaaaatcgagagatgacttcaactatttcggtgatgtgctctgcttagacacaacatacaaaataaacggttatggtagaccgcttgcgttattccttggtgtgaatcaccataaacaaacgattatttttggtgcagctatgctttatgatgaatcatttgattcatacaagtggctttttgatagttttaagatcgccatgcatggaaaacagcctgcagtagctttgatagatcaatctattccattgagcagtgcaatggcagccgcctggccaagtaccactcaacgaatttgtgcttggcatgtgtatcagaattctcttaagcacctcaatcatgttttccaaggttcgaagacattcgcgaaggacttcggcaaatgtgtctttggctacgaggatgaagatgaattcgtgttttcatggagaagtatgctggagaaatatgatcttagacataatgaatggttgtctaaagtgtttgctgagaaggaacagtgggccttggcatatgatagacatatattttgcgctgacatcataagtgcacttcaagccgagagtttcagtagtattttgaagaaattcttgagtcctcaactggagctgctgtccttcttcaagcactatgaaagagcagtggacgaacatcgctatgctgagctgcaagccgacttccaagctagtcagagctatccaagaatacccccagccaagatgttaaagcaaactgctcatacatataccccggtggtatttgagatctttcgtaaagagtttgagctattcatggactctgtgttattcagttgtggggaggctgggacgacatctgagtacaaggttgcttcatctgagaaacccaaggagcactttgttcggttcgattcaagtgattgctcctgtctgtgcacttgtaggaagtttgagtttatgggtatcccgtgctgtcacatgttgaaggtgctagattacagaaatatcaaagagcttcctcaaaaatatctgttgaaacggtggagaaggaccgccaaatctgcaaatgaagacaatgaaggcaatgcaacaaacgccaacaacgggtcattattgattgtccctgctcctcctacaaatcaccatgggcttcagagcttcagtgcaatgattcaagatgcttcagtttctagcatgcattagaatgcatctcatagaagctcttaatgcaggaacttgcagggtcaatgccaacgacgcgtttataccttgcaagactccacagcgttggccactgaagaagcattggatgggccggccaccgtcaagattcaaccacgcatgtgttcaccgtgtaagactcggcgccgttggccactgaagcaacagttaggcggccgcccgtcaaccgcgcccttggataagttgggtgggcggacctgtgttgtacattgttcagccgtaggggatttcagtcaccgaggcaccggtccttagcctaggctgtagagtagatttttttttttaaattttagttttaaaaggcataatgcttgtatttgcgctgccaataatccaggaattttgtgcgcgcctaataaatgctagcccgtttattaggagcaaaaaaaaaatgcaattcaggcccttgtactgtgctggagaagagagagggtgcgtgcgtgcgtctgaaacctgtgtgcagacagacaggcctctgaccttgtggccggccgccggcctgtgcagagcaagtaggcg

SEQ ID NO: 33967 - DNA, 1770 bp, Zea Mays
gacgacacccgcgagccgagacagccacccagttgctcaagtgattccaggcccacgccacgccaaccccgggctcaactcgagtccacacgccccagcaccacccctgcctctcagtccagtcccccacccaccaccaccactcctcccctcgccgccgcccgttcccgaccgatccggccggatcgccccgccatggaccagtacgagaaggtggagaagatcggggagggcacgtacggggtggtgtacaagggcaaggaccgccacaccaacgagacgatcgcgctcaagaagatccgcctcgagcaggaggacgagggcgtcccctccaccgccatccgcgagatctccctcctcaaggagatgcagcaccgcaacatcgtcaggctgcaggacgtcgtgcacaacgacaagtgcatctacctcgtcttcgagtacctcgacctcgacctcaagaagcacatggactcctccacggacttcaagaaccaccgcatagtcaaatccttcctctaccagattctgcggggcatcgcctactgccactcgcaccgcgtgctccaccgcgacctgaagccgcagaacctgctgattgaccgccgcaacaacctcttgaagctcgcggactttggactggcgagggcgttcggcatccctgtccggacgttcactcatgaggggcgttcggcattcatgtcctgacttttactcataaggtacattttacagctgggcaacatgttattggtctggcatgctgacttaaggtgtctgccactctgcctgagacaagccacggtggtgacgctttggtatagagcgcctgaaatccttctcggtgcaaggcattattccacccctgttgatgtgtggtcagttggttgcattttcgctgaaatggtgaaccagaaggcgctttttcctggcgactctgagatcgatgagctgtttaagattttcagaattttgggcactccaactaaagaaacatggccaggcgttgcttcgttgcctgattacaagtcaactttcccaaagtggccacctgtggatcttgcaacggtggtcccgacactcgaaccgtcgggaatcgatctcctatctaagatgctgcgtctagatcccagcaagaggatcaccgcccgcgccgccctcgagcacgactacttcagggacctcgagcacgcctagcaggatatggatggatggatgaaccgtttcccctcccctgctccctctgtaaattacggtagcagccgcgatgcttggggccggcgagtacccccgtctgggcggccgttgagttatgtgtgttactctatagtatgactaagctggagtgcctcatgtccaccatgcagtgcagcttttttctccgacttttttttgctgcgtagagaaatgagatgagaaatgtgatccagagatccttgtgccatgggagacctagtagtagactagtagctatgtaggtgtcggcactggcctctcttgaacctgtatgatggctggagagagaggagagacggcggcttctctggttgataagttggtcctggtatggtgtgcttgccgccgatgcacgtcatggtctttcttcctttctgatgaggacttggggtggacgccgagtgagttcgtgctcatgcacggtttgttggccatgcaagctgaagcagctgcagcagagattttggatgcctggttctattgccgaattttttactatttagttttttaaaaaagaaaatatgccaacaaaatata

SEQ ID NO: 33968 - DNA, 3685 bp, Zea Mays
ggagagcttgaggagtagccgagtagggttggagaggcgtaggggcgcgtgtgggcgctcgagctgttgttgctgggcctcgccggctccgttttcttccacctccgcgcgcagcggcagcgcggcagccagcgggggtgggcgtcaagtcaaggcagcgccgtcgtttcatgtccgcggtcaggtttggtgtctaatgcaggtgtggtactggagtactggactactggtcctgtagagcagttcgggggcgagggagatggactggccctggcccctggtcgctgtgccgctccgaactggggcgagggcgagggcgaggtgttcgtgggtaagggtcgcgggcgatgtgcggctgggaggcgggctaccgaggcgtaagaaataaagcagtagtagacgagagagccgcgatttataaagcgggtttgtgtggctcgctgctcgcctccgctccactcctctcacctggtgactgctcctcccacctcgctgtttcttctacgggatcaggttgctgcttgctgcggttcagatccttatccccttctgctttagatgggcctcgcggagcagtgcatggaggtggaggaggtgcgggactcggcgaatcggaggtgatcccggtcatggggtagagtggagtggagggggttgagcgtgtggtatggagccgtcccgtggcggtgttggcggcggcgggcggcggtggggggaggcggagggtgatgcggcggaggaagggagacgaggggaggacgggggcgaggtgagcctgcgggagtggctggaccggccgggccgagcggtggaggcggcagagtgcgtgcacgtgttcaggcaggtggcggaggcggtggcagtcgcgcacgcgcagggggtggccgtgggcagcgcgcggccgtcgtgcttcgtcgtgtcgccgcccttcgcgcgcgtcgccttcatcgagtccgcctccggctccgacgcctcgggctcgtgctcgggctctgacgcctccgaggacgccgacggcgacccggacccggacccggacccggacgcctcgcctccgctgcggcgacgcgacagcgccgtccccggcgaggagcgcgcggggaggtcgttcccgctcaagagcgtgctggccatggagctcagctggtacaccagccctgaggatgcggacgacagcgccgctaccttcgcctctgacgtctacagactgggtgtgctcttgttcgagctgttctatacgttcgaaacgatggaggacaagatgcgggcaatggcgaatctgcggcaccgggtgttgccaccgcagttgctgttcaaatggcccaaggaagcatccttctgccagttgctaatgcaccctgtgccagaaaccagaccgaagatgagtgaggtgctgcagagtgagttccttaatcagtcaaggaatagcctggaagagcatgaagcggcacttaggttacgcgaagagatagaagaacaagaattattgctggattttcttcagcagttgcagaaaagaaagcaagatatagccgacagtttgcagggcactattgctttcctctcttctgacatcaatgaggtaccccaccagcaatctacaattggccactgtgagaacttcttatccgatggggataaagaggtgtgctctggaactgttgaagagcagagtgattgtggatccaggaagcgttttagacctgagctgcaaggtgttgatatggaggaaaataatcgtagtgttgaagaatgttccagaacagtaccatcctctgagttaatccaggaaagtgttctgtctaaaagctccaggttgatgaagaacttcaaaaaacttgaaacagcctattttctaacaaggtccaagttgatgaagcaagttggcagccaaataagtagctgtgatcgagttgttaagaacactactggttcagctgttgggactgagggaagttcactagatgatttttctttggaaaggcaatatggtacaaggcaaagaggttgggtaaactcttttcttgaaggattgtgcaagtatttgtcattcagtaagttgaaagttcgggcagaactgaagcattgtgatttgctgaactcgtcaaacttagtatgctccgtagggtttgaccgagatagagagttttttgcaactgcaggtgtaaataagaagataaaagtgtttgagtataatatgattgtaaatgaacaccgtgatattcactatcctgtagtagagatgtctaatagatcaaagttgagttgtatttgctggaacagttatatgaagagccatattgcatctagtgattttgagggtatagtacaggtttgggatgttactaggagtcaagtttttgttgggatgagggagcatgagcgacgcgtgtggtcggtggacttctcaattgtggacccaacaaaattggctgggagtattggcactattagaacaagagcaaatgtgtgttctgtacaatttcaacctgatactgctcgctccattgccatcggctctgcagaccacaaaatttactgctatgatctacgtaacatacgagctccttattgtacactagttggccacacaaagactgtaagctatgttaagtatctggatgcatcaacaatactatccgcatctactgacaactcattgaagctttgggacttatcgatgaatccaggaaggataattgacagtccagttcaaacatttacagggcatacaaatacaaagaacttcgttggtctttccatatctgatggttacattgctactggctctgaaacaaatgaggtttttgtctaccacaaagaatttcccatgccagtgttggcttataagttcagcgtgacggaccctatatcgggacaggagattgatgatcagtcacagttcatttcatgcgtctgctggagagggcagtcttcaactctactttctgcaaattccagcggcaacattaagatcttagaaatggactgaggagtttgcatctgtttgagtctcagctataaatagaccgacttcttaggccgtgctcaacaaatcatgcatatagccgtggtagatgtcactgtctagggagttgagtttaaaatgagagattggatgagtaatgctgctagagatagcttaccaagttgtgcgcgtgcgtggcttcaaaatttgtggcgattaaatccagagttgccaacggtgcagcttaatccgagttgcagagttgggaaaggtagtagctgtagcagatttagcgtggttttataggattacagattagcgtggtagcaaaagtagcataaataggaaacagaattggggcgtgggatagtaccacggggaaaggttttgtacatcattggtttgaggtatacttgtacaggcaatcaatccagtttctacctaccagtaccagcatcagacttgctcttgtcatagtgttacttgaaaggtgaaaggtataaatcgctgtacatctgttgaatcagacatcagcatttgcatcattatctcccttttttattttccatataatattgatgaatgtgttaggtcgcagacatcataagacttgttggcattcgtctgcagacgtgaggcgaggagctgtgcataagttaaaagaatcttcagtatttgtctaatgctccgtttgtattgtcgatattggagcacaaa

SEQ ID NO: 33969 - DNA, 3330 bp, Zea Mays
tcaccctcctccgcagccccgcttcacctctctccctccccctcttctccccccacccctccctcccccaccaaatcctcgttcatttttttccaagcgacttcgcgtgtgagggcgggagagcgcgcggggctagggtttccacgggtgatggaagcagaggctgccgcggcggtagtggcgtcgtccgcatctgcctcggcttccgcgggccggtctcgcccatctagcagcgccgcccaggtcaccagtaattcggctgtgcgagctggagaagaaaatgctgcctccctctatgttttatctgttattgactcgttaaaaaagaggattaccgcagatcgtttgacttacattaagaataggataggggagaacaagactaatatcagcagctatacacagaggacttacaatttatcaaaaaataggcaaattagtacatcaaagggtactgattcagcatcaaatttgctcacaaaaaggcaagatgatgcgctatgcaccctgcatagtcttgatattattccggttgacaaagatggtggtacttttcaagacgaaagtcctttctcttcatctaatgttatgtttggtggaaatcttggtcccaagaatgctattattagaccaattaaactaccagaagtgccaaagcttccaccttatacaacatggatatttttggacaggaaccaaaggatgacagaagaccaatctgtacttggtcgacggaggatttactatgataccagttgtggtgaagctctaatttgcagtgatagtgaagatgaagccattgaagatgaggaggaaaaaaaggaatttaaacattctgaagatcacattattcggatgacagttcaagaatgtggcatgtctgatgctgtactgcaaacgctagctcgacacatggagcgggctgctgatgacataaaggccaggtatgaaattctgcatggtgagaaaactaaggattcttgcaagaaagggactgagcataatgtcaaagtggaagatttgtactgtgacaaagatttggatgcagcattggattcttttgacaatctcttctgtcgacgatgtctagtgtttgattgcaagctacatgggtgttctcaagatttagtatttcctacagaaaaacaaccagcttggagtggcgttgatgacagtgtaccctgtggcatctgaaccagatgctgctgctggtgctgatcacatgctttttgatgttgaggagccaactcactcatcagacaatgtgatgaaccagccaggttcaaataggaaaaagaacggctccagtggaaggaagactaaatctcaacaaagtgaaagctcttcaactgcaagagttatctcagaaagcagtgattcggaagtacatccaataagcaataaatctccacaacactcccctagtccctcaaaagttaaaattgggccgaaaggtggaatcagaaagattaccaatagacgaatcgctgagagaattcttatgagtgtgaagaaaggacaaagggaaatggcatcatctgattctaattttgttagtggatatcttttggcaagggacatgaagcttaggtctgatacacgaaatggaaataaggaattaattgtatcctcacaacagagttctccaagcacaagaagttccaaaaagaagagtacacctcaaattgggaacagctcagcttttgctgaggctcataatgattcaacagaggaagcaaataaccgtcattcagcaacagatggttacgatagttcaaggaaagaagaattcgtcaatgagaatttatgcaagcaggaggtgtacttgagatcatggaaggcaattgagcagggacttcttgtgaaaggattagagatttttggaaggaacagttgtttaattgctcggaaccttcttggtggaatgaagacgtgcaaagatgtttttcaatatatgaattatattgaaaacaacagtgcctctggagctcttagtggtgttgattctcttgttaaaggatatattaagggtactgagttgcgcacaagatcaagatattttagaaggcgaggtaaagtccgtcgtttgaagtacacctggaaatctgcaggttacaatttcaaaaggattaccgaaaggaaggatcagccttgtcgacaatataatccttgtggttgtcaatctacatgcggaaagcagtgtccatgtctttcaaatgggacatgttgtgagaaatactgtgggtgtccaaaaatttgcaagaatcgttttcgaggatgtcactgtgcaaagagccagtgtcgcagccgccaatgtccatgttttgcagctgacagggaatgcgatccggatgtttgcagaaactgttgggttgggtgtggtgatggtacattgggagttccaaaccagagaggagataattatgaatgccggaacatgaaactgcttcttaaacaacaacaaagggtcttacttggaagatcagatgtctctggctggggagcattcctcaagaatagtgttagcaaacatgaataccttggtgagtacactggggaactaatctcacacaaagaagcagataagcgtggaaagatatatgatcgtgagaactcatcgttccttttcaacctgaacaatgagtatgttcttgacgcatacagaatgggtgacaagctgaaatttgccaaccatgcccctgacccgaattgctatgccaaggttatcatggtaactggtgatcatagagtgggcatattcgccaaagaaagaatcctcgctggtgaagagttattctacgattaccgctatgagcctgacagagctcctgcttgggcccgtaagcctgaggcgtcgggagcaaaggatgatgggcaaccgttcaatgggcgtgcaaagaagctcgcccaaaacaaccgaggctgaatctgatttgattctttcattgttaggacaaatttggcagccattcaactaatacaaggaacctgtcattcataggccccaatttatttgaactcgtcattgtaactcgtatgtgcttgaattctccatggcatctggtcctgccatccgtagagttaggtcccgtttgttttgtttgttttgaggaactaaaaattaatccctctattttagtcacattgagtctctagattgtcaaacggcgggactaaaacaaagactaaactatttgtctctagttcctcaagccatgacttaaagggaataaatcacataaattttatttttatccttcctttatttcagttacactaatgatgtaataattgtatgaggtattttggtcctcttagagcatctccaag

SEQ ID NO: 33970 - DNA, 2835 bp, Zea Mays
acggctcgccccacatctaccgcgtgccagccgccctcgctcccgttcagtccgtctcccccctctctccatccaaagcctacgcgccgccgccccgccaccgggcgcgccctcgttctcctacctagccgtgttctccaactgcccgctcgtcgccgcggtgctcaccttcgccatcgcgcaatccatcaaggtcctcaccacctggtataaggagaaccggtgggatgcgaagcagctggtgggctccggtgggatgccgtcctcgcactcggccaccgtcacagcgctcgccgtcgccgtcggcctgtaagaggggctcgccagctcgctgttcgccaccgccgtcgtctttgtctccgtgctctattccatcgctcccgtactccctgttgcggcggttgagaacagtggcgacaagatctcatggagagaagctatgcggaccccaggaaaggtgaagtcgtcgtgcgatggtggagatggccgatgggaggctccaccaaccctagggtgcggccaacaagacgctactcgccactgcgtgggtcggcagtgagatctcagggagagaagccatgcaaccccatgaaaggcgaaactgtcgcacgatggtggagacgaccggcggtaggatgcaagtatgagcatttggcaaagagagtattcctccccatgctcccgctccctcctgcaccccacgctcgccgacgagccgctcgacctcgtcgcagcttgccgagccatcatgcgcctcggtgcggtggtcaacatcatccacgccgtcaatcgcttgttggtcctacgctcagtgcatgagtccttcaactggcggtggtggagcaaccgtactaccacagcgcatacacaggacgtagagaacaactccagaaggtgagccccagatctccgctgccgtcttctcgcctgaaaaaagaggggcatctctatcgccaccaaccactagcaggcggcggacgctgctcgcaggaggtaacggcgtgcatcagggtaatatattgcaaacagtttagggtttcagtttcattcacgagtttagtacatgattactgtattttctcgttggattctgagctcccagcctgatgattagcgttgtttgcacaaagaaccgagatatgtcgtcgaagaccacctaattgtttctcatggcagacttgcttgcttgctctggcttggttcattgacaatttaccacttccttagttcctctgatcctctgttctatcagttatggtgtagttttcctctgtgagaagaaacctgtaaccacacatacacgcacatgcatgccactcattgtttggttcatttagttatcatttacttttggcataacaggcacaataagccacttcaggcttcagtctgttctgtgatcagcagaacattatgggctctaaaacaggaggacttttgaggaatggaaaatgtgcatatatgcttctgattgcagtgagattagcctcgtccaagttatgggatctgccatgaactagacaagattataagtttacagaggccttacatcaagagagtacaagattgccataaggaagtaaagtctttgagaaaagtgaccttatgagaagcttgagaaaatcaacttgtgtgtgagaagttttgtctacttgtgctaattagtcatatgatatttttagtcatgaactagacaagatcagaagtttaaagaggttttacatcgagtacaagatcgccataaggaagtacaagtctttgaggaaagtgaccttatgaaaagtttgagcaaatcaacttgtgtgcgagaagttttgtctacttgtgctgatcagtcataccttggaatattgctgaattgttgcctttgttgctcattggcttcaatacttcatacaccatcaaatgagtcatgtgcaaaattcttcgaagcatcagttcttgctctagaagaacttcatcaggtgattactcttttgctttcctttattgaataattagcacatgtgcgttcaaaaaaattgccacatgaatgaaatgatatattctcgaattattctattgagtttttttgttttgatcacaacaccaccctggcgcgctagaggcggggtcgaatcagcaacgacggctgacatgacgctacccatccagttgctcactgctcaggttatagcgaagaacattgtcttagctggatacaaggagatgcagaagctctgagttttgaggatggatctatggatggttacactatcgcatttgggatcagaaatgtgacacacattgagaaagctctatcagaagcttacagttgatggttctaaagcaagggtggaggttcctatgcttggagttgagtcatgtggatgtccctatttttaaatagatgaaaagtttgctcagatgattcaggaagccggattccagagggtggaatatgaaaacctcctgagcggtgtagttgccattcattctggactgaaactgtagagctgaatacagatggttgttttttcatgggtgcaccgattctacaattagtagtatttgttgttttttaatgaattctataataggttcggtggcttgtaaaagcagctggtgctggctgtcagcatcatcacaatatgtagaataagtagtatttgctagaagtatgtgctggagcagtagcgtcagtggctattttggcttttaagccagctgacctcttccatttgtaaagctttttcttggaaacgtgaaaccatccagaacatcaaattagtcttatcacatacctcctgcaatacatttttttgttctgaaaacaatgtcagagttaaaataaga

SEQ ID NO: 33971 - DNA, 2551 bp, Zea Mays
tgttttccggcgacagaccccacggcaccgcacctgctcggcacgtcccgctatataaccgcttgaagttcttccgccgccacgtgctcgctgccgtcgccgcgccgcattcgcatcaccgcatcgcgccgccgaggctgcttactagacggacgaggagtggactggagtaacttgcagcaaccctatcccggcaggccccatcgcgaaaccctagacttcgccgccggcggtcgccggagatggcctcctcgccgccgcgcgccccgcagctattccctttcgaccttaacgtcgcgcaggaggaggtagatgaggagccgattgaggttcttgaggaggatgtcgatgaggagggagccccgttggcgcagccccaggaggttgtcgtcgaggaggttgttgagaaattggtcgagcacgcggtgcctatcacggaggatgaacctgcggaagacgtgatcatggaggagccttcggaggaggtgatcatggaggacgaggagcctacgccgtcgccggcggaggaggtggttggggaggggaagaggaggaaaaagagggtggactatgaggtcttcgtgtccgggctgccgcaggacgccgctgaggaggacgtggcgcaggcgctggcggatgccggagatatcgaggaggtgcgcctcgtgcgggatccggcggaccagcggctcaacaagggattcgcttttgtccgcttcgcggctgcatggcaggcccggtgggcggccaacgacctccgcgaggctacgattaagggaaaagcttgtggaatatgcaagaacagtgaaactgaaacccttcatctccgaaatatatgctttgattggtcaaaggatgatttagctgaaaaactgaaacccttcaagttggaaaacttggatagaattaatctaattgagcacccagacagaaagggtaaaaacagaggctatgcgtttcttgacttcaggactcatgtagatgctgtggaggcttttgtgaaactacaaaaaatagatctgtatcttggtactgactctagagcaaacatatcattttcaaacactctttcacaagatgatgagatcatggaaaaggtgaaatctgttttcttggatggcgtaccacctcactgggatgaagacaaagtgagagaaattttcgggaaatttggtgaaattgatagcatacaacttgctagaaatatgttcacggcagcacgaaaagattttggtttcattggctttacagcaagacagtcagctttagactgcattaagatggtcaataaagatggtgttggtgaaggtagtggaaaggttcccataaaagctagtttacaaaggccaaggcatgctttcaagaagtattcccggcaaggctcaagttccttgctaggcgtcagaagaggatttgtagataaaagttctagtggtagaggacaccactcggacagatataggcattttagtcctgtaaggcgttcgtattcagataatcattctcgccgtcactctattgatgttgaagagaggcatacttctgtgcgaggatacagagcttactatagaagagactctccagtgcatgccccaagctataaatatggaaggacacatctggagaccagaatcagcgaagaatatactgagggaagatacactagtaaatatccaaaacacagacacacgatgcatggaaccatggagcgagatgcaaaccgcaggatcaagtatggacattcataccaggagagggcacatagaacttgcccaggttgtaagctgtgtggtcaaaattacaattaccccaatggtgaggaattttctgcaatcagcggttgtcaggaggcatactaccagacagaccatgatctgattccttcaacttctcaagtagcatctcattgcgagggttcttgctgcaagggccagcagttgaaaccgaaaagttattctgtgatgcgtgattatgactatatcaatcaagagtcaacacctagttcaagtgaccatgccagaacaagatctaatcttccagcgccgcctcatcattggcatgttaaacattctaatgagcatcggaggcatgttactgatgcacattctgcttttgaggtcagggaaagccgaagctggtatctatcttccaaagatgctccaagtactcactccaggaagcaccataggccagcaagataagctgtaactgcaagatagagaaaatctagtagcagctcgcttctgatactgatggatagcatttgttaccggggccctgcttacgtggctgacaccctgttgcggggaggaatctgttccaaggacagcagtataccgtcccaatttataaccaaatactttgccttttctcggttctttgtattcgcgttcgatttctcgaaatgtggtgctgacaaatagggatgaaaacggaaactgtaatttttgaataacgggaattgtttttaaagtttaaccgaaatttaggtctaaacggaaatggaaacgattactgaaaatacggaaatagaatcggtagaagaactcag

SEQ ID NO: 33972 - DNA, 1827 bp, Zea Mays
tttttttggaaaacaaatcggtcacgcggcacatagaaacccaaaagaaacgccattgaaaacgcgactggggcacgcaactctatcgatctccgcccacctcgtccctcacttgccctctccctgccaggcttgccggaaccctagcctcatcgcccctcccctcccggcccgatctccctatcgccggattcgtgctgcgggatggactccgacgtggagatgaacgccgccagcgacgaggagacatttgtggttctaaatgaagaagttatatctgagcgtcaagaggaagatgtaagcaaggtatcagccgtgttactgattacaagggaagaggcatgtgccctcctgcatcactataaatggaacatcagcaagttgagtgatgaatggtttgcagatgaagaaaaagtccgccatactgttggcttacttttgaatggaaatcatgagcccggctctaggaagctaacctgtggaatatgttttgaagggtattcttctgatacgatgagctctgctggttgtgctcatttttattgccatgaatgttgggaaggctacattagcgctgcaataggtggtggtccaggatgtttgtctttgcgatgtcctgatccatcatgcagtgctatggttcttcaagggatggttaatgaattagctaaagatgaggacaaagcaaagtacgcacgatttctcttacgtgcatacgttgaaggtagcaagaagactaaatggtgtccagctcctgactgtacatgtgctgtggagtttcttggtgatgaaaactatgatgtctcatgcaattgcaagttcagcttttgctggaattgcactgaggaagctcatcgaccagtgaactgcgagactgtttctaagtggatattaaagaatagtgcagaatctgaaaatatgaactggtttgtcgcaggctcaggactagcgtttgatatgtggtcttcaagtttctgtttttgttgataccatctttagttaagacatggcatataaataaggagttccttgattttattttggatgattcaacctattcaactttataccttctgattttgattattttttgtaatgtttcgtttatcagttcagactaagcacaatgataactaattcttgtgtggttggatcttcatatcctatttcaccgaccttttagcggtttattgaacaatgtaaatgtcacaatcctggaactattcgccttgactgctgacaataagtgagatggtgaaacaaatctgcctaaagctagttgtttagggcctttaggctcacaggcttttgataccatttctctaaggcatttaagctgaattggaaatgggtggggaagccacggcaaatatttatgtgaggttgaatcataggtgttgtgactgttgtcaactatgaaaaatatcctagtaatttaattattttaacataattttaagatagcatttttgtttactgcaagttgcttgggatcaataggcattgtcgttactgctgctatagattgacgatagctaccttttctctgaacatgtaggagagctgcatatcattatattaagaaggtgatgagtatagctagtttgactttatgtggcttgtaaatgtttgggattgatttaattttcatttatttgtcttgttgtttcttaaaaaaatccctcactaggcagtaggcacaagcaactaaggcactgttcaacttaaacttcgcattacctgcattatataaacatgttattgaggtaatgtgccaatgattgtttttattagctggtaatcatgattttttattctattccttgt

SEQ ID NO: 33973 - DNA, 204 bp, Zea Mays
aggcaatcgttttttagacaagcaacagaaccactttccctgctgagcgtcgctctccccctgcagctgaccgtcgtttgctagacaagcaattgaccgtcgctccccttgctgcgccaatagaaccattttcgtcagtgctgctactgatagacaccgctgctatctgaacccaacagctatctgaaccatggatgcgcacaa

SEQ ID NO: 33974 - DNA, 2625 bp, Zea Mays
caactatgttctgcctccgcaccctccgatcgcccgccgcgtccgattcccctgaccccgcctcgcccgcaatctccgccgccgcgcccgcgacatccatcacccccacccgcgacatcccgcctcgcacgccatcaactcgcagcggcccttctccgaacgtggtttgttttttcgtttgctcgagcagccagccgactcgtctccagcaatgcggccggggtcggctcgctggaggtgggcgtcgccgccgacacctccaacgcctccaggcagggattaggtgagccgtcggctaatcactcgtcattgggaggatctcctcctcccgttcagatttgggcaagaaaggcccgggcgcgatgtccatggccgaggaggggagtgaggccgaggaggggagtgaggccgaggcgctcgagaaagacggcagcaaggcttcttcaccttcggggccagccagtcgactcgtctccagcaatgcggccggggtcggctcgctggaggtgggcgccgccaccgacacctccaacgcctccaggcagggattagatttgggcaagaaaggcccgggcgcgatgtccatggccgaggaggggagtgaggccgaggaggggagtgaggccgaggcgctcgagaaagacggcagcaaggcttcttcaccttcggggccagccagccgactcgtctccagcaatgcggccggggtcggctcgctggaggtgggcgccgccgccgacacctccaacgcctccaggcagggattagatttgggcaagaaaggcccgggcgcgatgtccatggccgaggaggggagtgaggccgaggaggggagtgaggctgaggcgctcgagaaagacggcagcaaggcttcttcaccttcggggccaagcggtcttgaggacgaggagctacaggtgcaggatgcagttgccagtggttccaagaggagcaaagactccgccgccgccgccacacgcagcgccaatgtcagctcgccctctgtggttcactctcaccctgccatcctccctgctcccgcgcagcagattccagaggttaagcaagcagtatgtataccatacggatttcatagattaaagagtttggagtattcaaagcttgtatctcagtgcctaaacactgaatggacagctaccatagggcaaagtgaagaaacggaagagttgagcaagatcacattagagaataaggatattcagcttgatatcaatataagagaagaatctcggagttcttcacaacaagggaactttgacacagaaggtaccagctccagtgaggctttcttgcttggaacggttgcttcagaaaagatgcttgagaaactgaaacataaatctggaagatgtgagcctgctttagaaaaggctattgtggaactggagcatggtataaacggtttgaagtactttgtttgccttgatccacggttgcaggtttgttccgccactgataccaggtgaagcttcacccttcagatccctgtcgtgacgaatggttcgtgggtgctggggagggattggatccgttggattcatgagatgtgtggattgttcctgccggatatcgtgacatgtttttagatctagcagacaaaaccatgaactgtctagggctcctccgttgcctagatctactagagtgagtgagcctacagagttgacctcatccaggctccagttccaccccacggtcatcgtcctctgttgctctacgtttcatgcttctcacctcctctcctcaatctcatcactagaggcggaaagcagatcagatgagatttttggtcttgcgtggttcttttaatctgctcacatgatacttcttattcattgccgtccagtgaaattaattgccctcggttgaattggttcctttgccattttacttaggaggataaaggagacactaccttggtacatgcctgttgccacaatggacaaaagaagattagtgttgtataattttatgtctgggctgaaggtcgtgtttgatcgagagaggaaggtcttgggctggaaaaactttgattgttacagcgtgggcaactcaagaagcaaccttccagtgaacccaaatccttctggtgttccccctgcccctggcttgggaccgaacagctacactcactcctgaagctaccaagggtgcctcaccgaatggcacccaagtcaatgtcttgcaaccttctgcaagtttttcgccgaagctgcattgcaacagaaacgtcctcgtcatcgctgctctgctgttcctcgaccttcggcgaaaatttccagatacccgtactcttttcatatggcataacacactagcattaagtcttatgagagaccttgctaaagaattagtgcttggaggggaagaatgacctagaactgaagatggatgagctgatgtgaaaaatgaggggaagaatgacctagaactgaagatggaggagctcaggtgaaaaatgaacttgttcattgtgtgttttctgaccttttttggaattgtattaaaatatactgtaatgaattggtgtaagaatgtgttggaagtagcaaagaacctgatgccttttgcaatgagaatgtctttctggcaatttatcctgat

SEQ ID NO: 33975 - DNA, 2803 bp, Zea Mays
tgtttattgtctctaatgccggcaggattttttgagtaggcctaaacctttttaaggctagtttggcactttggcaaccccatttttccaagggattttcattttcccaagggaagttagttcattttcccttgggaaaacaggaattccttgggaaaatggagttgccaaactagcccttacatgttggattttccccttggatgcaaagttgctgttgagctgcatggttcagtttttagcacacttctcaatactctttatggatttattatgaggatttattatgaactgatagatgtaaacttctctttggaagtcttcaagttgatacatttaaggaattcctgaatttatggaggcaaaatttttattgccaacatctctgacttttatgtacctaacaattttctgttttagcgcattgcacaacgtattcggcaagatggtgggactgcagatgcatctcttcgtcgtgagatccaaactgaatcggttcagctaggaatttcgatgcaacatttgggtgctatgttctttgagcttggtcggacgatgatgatgcttcgcacagggcaatctccttctgaggcttttgtaaattctgggcctgctgtttatataaactccacaggaccaaacccaatcatggttcagccatcttttcaaaacacccctccttttggtgtatctaatataccagttctgggtggaatttctggtgcttttggtattgttgatccttctcgacatatgaatatcccaagtaacggtgcatctgcaacaagtggttcagctgctggtactaccaccggttctgaaggagctatccacgggaaccgccaagatgcggcaagaactcaaggaggtaacccaccaggtttcctggctgcaacacgtggattgccaaccagaacagttgttgctgctgttccagcacggtcctcagtgggcaatggagctcaaggaaattcaacatctgctattccacaagcttctgttggtggtgtttctggtgttcctcttatagcggcacaggtagccaatgcattggcaaatgcaccaagccaggtttctttatctacacaaagtgcagcagatcagggatttcacctgactacagacaacagagctgatgttctgagttcatcaacaccagccactacaccacagaatggtccctcaggtacttccggttccagtttgccatctcaagacaggaatactttaaatgttcccagtcttgatagtatacaacagcatccacaattgggagatacttgtgcagatacagctgacttatcaggagacgccacagccatcagtactcatgatgctccttcgaacccatcagttgacagttctgtgctgaagaacaaatcctcggatgaagtaggttcacagaccactgagccttctgcaagtggcagtgctgaaccattaggtcttggtggaggtctgattccaattccaaagaggcggagcaaagcagtaaagccatctgggagcacaactgatcctagtagggatttgtcctcagtcagccaaaaccaagatcctatttcagtagcccagcagtttctggaaggttttgcttcccgaaatactaatggtagcagaagcaacaccctctcctctggtcctccatcttctgtgccacaggctactgaagttcctccgagaagacagggtggtggacaacctgatattggcagcatgatatctggtatgctcaacaacccagttttcagcaacatgttgtcgaatgtggcaacacaggcagggggctctagtgctgatttgaagagcgtgatggaaggattacaaagccctgctattgtagatacgataagcaatatcgtgcagaatgtggatgagcaagacctgggggccatgtttggttcaggcagaggacaaggtggcatggatttgtcaaggatgttgcagcaaatgatgcccgttgtatcccaggctcttggtggtgcaggggggcgttctgctggtgcaaatggtggacagcataggtcgcggcctcagcgcattgacggtgaaggaaatgcaccagccagcagttctcagattgatctccatgaagctcgtcaaagcattgaacagcatgaatccccagagaatatcttccgcgctgtccttgaaactgctgctcaggcccatggtgaagataacagcattcagggcatggtcgaagaacttgccactgatcaagagcttgccgatgactacatgaaacttttgatggaacaagttcggcagaggatacagtcagagtcgcagtcggggagccagccttgaaggattgggcggcagggtcgtgtagccagccattcgctctgcgatatttatctatgggaaagaacagaaccaaagctgttgtctgggcgtttttcatgattaggtgcccggtgtacatgtggcgttgtaattttccgagataatgtatctgcagcagcatatctcgtactctggttagaactgtttttttttacgaattttgctagaggtacatacaacgagttttaaaggtggtgacgtctgaatttcgtggaattgacaatgacatgtctgtatgattggtgtcgcaactctccagttcggaaatttgttagcacaggttgtccttgttcctggcatgtgtttcaccttttagccattaaataccattttggttcatgtaaggtagtaaccttgtgcactgggtccggttataaatgattccttaagggctcatttgagatcaaaggtaatgaagaggaataagggatcaaaattccgtactatttaaaat

SEQ ID NO: 33976 - DNA, 7313 bp, Zea Mays
gcccaaggacgcgcaggtggctgtccatttccgaaataacgcgacaacgacaggagtgacccgcaaaaaaggcacccagtcctatcgctcctcccaacgcagttcctcacatctctcactctccctaacggacgcaccagcacacacacaccgccagcgcagtgggcgagcgagtgcagcgacagtgagacgaaccgccgccgtcgcccaccaccgtccacccgccaacggaattataaaataattcaaggtgtaaagctggtatggatctaagcatggcaagtttgaacttgtcagaacctcgagactctagagaatcaacttcgcccgcaccatcaacatcatcttctatatcaagagaaaaaggtgacctggcagaagttgatgatcctgaaagtgcaatgtccactgttgctagattgttggaagacctccatgctagcatggtgtctccatcggggaaggaagctacaaccagaaggttacttgaactggctagagcgaaaaaggaggcaaggattttgataggtagccattctcaggcaatgccactactcatatctacccttagagttgggtcatctgcagcaaaagtaaatgctgcagctctacttagtgcactctgtaaggaagaggacttgcgtgtgagggtcctcttaggaggctgtataccacccttaatctctcttttgaagtctgagtctgctgaagcgaagaaggctgctgctgaagctatttatgaagtatcttctggtgggcttttggatgatcacataggcaggaaaatatttgtgactgaaggtgtggtgccaactctgtgggacttgcttaatcctaggtctcaccaagatagagtagttgagggctttgtgactggggctttaaggaatctttgtggggacaaagatggttattggaaggccacacttgaggctggaggtgttgaaattattactggtcttctttcatccaagaatactgcttcacagtcgaatgctgcttctctgttggcacggtttatctctgcttctggtgatagcattcccaaagttatagatgctggggctgttaaggctctccttcaccttctaaatcgagataatatcatttctgttcgtgaaagtgcggctgatgctttggaggccctgtcttccaagtccagtattgcaaagaaagctgtggtggatgcaggaggccttcctattctgattggagctgttgtagcgccctcaaaggaatgcatgcagggtgggacatgtcattctctgcaaagccatgctgtccgtgctttatcaaatatttgtgggggaacaacttctctgttgctttaccttggtgagctctgccaagcaccccggtcacctgttcccctcgctgatattcttggagcgcttgcttattccttgatggtttttgacggctctgatgataaatcatttgaccctgttgagattgaaattactttggttgcgctcctaaaatctcatgacagcaagcttgatcgtattcttgaggctttagcaagtctatatgggaatgattgtttctccgacaggcttgatcactcttattctaagaaggttcttgttgggctgattaccatagctcctgctgatgttcaagagcttcttgttcgtgccttaactagcttgtgttgcgatggtgttggaatatgggaggctcttggaaagagagaaggggttcagttgctaatatcattacttgggctttccagtgagcagcagcaggaatatgcagtttccttattggctatcttgagtgatgaagtagatgacagcaaatgggcaataacagctgctggaggtatccctccacttgtccagctactagaaacaggatctcaaaaagcaaaggaggatgcagcttacatcatgtggaacatgtgctctgacagtgatgatatcagggcatgtattgagagtgctggggctgttatggcgctaatttggcttctaaagagtggtagccctggtggacaggaggcatcagttaaagcactgaagaagttgatacgatcagcagattctgctatgatcaatcagttactagcattactgctcagtgactcattgagctcaaaggcccatgtcattactgttctcgggcatgtccttgtgctggcgcctcagagagctctaatccagagtggagctccagctaataaagttcttaggtcactggttcttgttcttgaatcatcaaatgaagaaacacaggagattgctgcaactgtgttggctgatattttcactatgcgtcaggatatttgtgatgtaatggcaattgatgaaattgtccagccatgcatgaagcttttgacaagtggaaaccaagtgattgccacacaatctgccagagctttaggagcactgtcatgttcagctagttccatgtcaaaaaacaaaatgtcttgcttaactgaaggtgatgtgcgacctcttatagagatggcaaagacatcatctattgatgttgctgaaacagcatttgctgcattagcaaatctcctatcagatgcacagattgctaaagaagcattagatgacaatattgtcttggctttgactagagtgctcaaggatgggagtttagaaggcaagattagtgcttcgcggtcacttcgtcagttggtcaaccagtttcccctcagtgaagttctcccagattacttgcagtgctgttttataattcatgcactgttggtatgtctatctggcatcagtttagaaaatgttacaagtttggaaccccttgatgttcttacattgatggctacaacaaaggagggttcgcattatagcccccctctatgcactggttttcttgaagttccagaaagcttagaacctttagttcgctgtattagtattgggcttccacctgttcaagataagtccattcaaatcctagcaagtctctgtcagggtcgaccttcgctacttggtgaatatttaaacagaagtcaaggatgcatcacttctcttgctactagagttatagagtcaaatgacatggaaataaggatcagcagtgcagtcatcctcatatctgcaatgagggacagcagagaacggtccatcgatgttctggaagcatcaaaagttctgaagaatctgatatctgcactcattgatatgctgaagcaacattcctctttaacatccctagacattgaaatctggaaaccttccacagaaaaaagttcgcttaattatgagcaggatgttttgagtgtgcctgaacttggaaaggtttctgaagaaactgttgcactatggttgctctcactgatttgttcttatcatggaaggagtaaatatactgttatggagctcaatggcgttgacacagtatctgatagacttgctagctatactgctaaccgacaggaacagtatgaagactcagaaaatatatggacttgtgcccttctgttggctactctgtttcaggattcagtggttgttcagtcttctgaaataacacgaaccataccttccttagcatccttgctaaaatctgatgatattatcaataaatactttgctgctcaggcactggctagccttgtttccactgggagcagaggtatacagcttgctattgcgaattctggtgcagttttgggtgctgtagcattgatcggacaggtagaatctgatatgccaaaccttgttacaatggctgaagaattcaagttgtcagacaatccatgtcaaataatgttgagaagcctttttgagcttgaagatgtctgcactggtgcttccgcccggaggtccatacccttgctagtggatctacttaaaccaatgccagataggccaggtgcacctctgattgctttgcaccttctgactcaactagcggaaggtagtgagtcaaataaaattgctatggcagaggctggagctttggatgccttgactaagtatctatctttaagccctcaagactcaactgaaactactataaccaatctgttggggattttatacactaatcctgatcttctttaccatgaatcatcacgtagcacttcaaatcagctggtagctgtcttgcgtttgggttcgagaagttctaggcttagtgcagtaaggacgttgcagaaactctttgattcagagaatataagggacaccgaagtggcccggcaagctattcaaccactacttgacatgcttgagtcaggaactgaaatagaacagcaggcagcacttggtgcgcttatcaagctttctgctgggaacatcgctaaggattctgctatgtttgatgtagaaggcaacacacttgaaaatctttacaaagttttatccttcagttcgtcattggagctgaagaaggatgctgctcaactctgctatattttatttgagaactcaactgtacgtgcatcaccaattgcaacagaatgtcttcaacccctgatatcactgatgacatcaggatctagtttggctattgaaccagcagtttgtgctctaaacagattactggatgaggactacaatgcagaaattgctgcaactagcgaagttattgatcttcttgtcagttttgttcctggtacaaactatcagttgtctgaagcatgtatcggtgctctcataaagttgggcaaggatcgtccaaactgcaagcttgacatggttaaagctggtatcattgagcatgcacttgatatgattcttgatgttcctgtatctgttagttcatccattgctgaattgcttcgcattttgacaaacaacagtggcattgctaaaagttctgctgctgcaaaaatggtggagccacttttcttgcttttacgtcgccctgatgttactatgtgggatcagcacagtgccttgcaagcactcgtaaatattttggagaaacctcagagtctagcagcattgaagttgactcccagtcaaataattgagcctttaatatcatttcttgagtctccctctcaagcaattcagcaacttggcactgaggtgctctcacatcttctagaacaggaacattttcaacaggatatcactacaaaaaatgcagttgttcctctggtgcagcttgctggtattggaatcttgagcttacaacaaactgcagttaaagcacttgaaaacatctcacagagttggcccaaggcagtagccgatgcaggtggaatttttgaactttcaaaggtaattgtccaggatgatcctcagccaagtcaagcattatgggaatctgcagcacttgtgttatgcaatgttctgcgttataattctgacaactatgtcaaagtctcaatggctgtacttgtgagattgctgaactccaccatggagagtaccgtcacgatagctctcagtgctctacttgttcaagagaaaagtagctcacgctgtgctgtggccatggctgaggctggggcagtacgggcactcttggagctcctgaagagccatcgatgtgaggaatctgcagcaagattgcttgaagccctgataaacaattcaagggtccgtgaaacaaaagttgccaagtatgctattgctccactggcacagtacctgttagatcctcaatctaagaaccagtcagcaaagtttctggttactcttgcactaggtgacattttccagcatgaagctcttgcaagggcaagtgactctgtgtctgcctgccgtgctcttgtaagcctacttgaggaccagcctacggatgacatgacaacagttgctatttgtgcactgcaaagcttagtgatgcacagcaggacaaataggcgtgctgttgctgaagctgggggcattttggttgtgcaagaattgcttctttcaccaaatgtggatatttcaggacaggctgcccttctaatgaagtacctattttcaaatcatacgctgcaagaatacgtgtcgaatgagcttattcgatctcttactgctgccttagagagagagctgctctctacgtcaactatcaatgaagttattctgaagaccatatatgtgatattcagcaacttcaaaaaggttcggttttctgaggccgcaaccttgtgcataccacacctggtttgtgctttgaaggatggaaatgaggctgcccaagagagcgtgcttgacaccctttgcttgcttaaagaatcttggccgcaaatgaatgaagacatcgctaaagcccagtccctgatttcagctgaagccatacctgtactacaaatgcttatgaagacatgtcctcccagttttcacgagagagccgatagtttgcttcattgcttgcctggttgcttgacagtgaccatcattcgtgggaataatctgaaacagacaatggggggtacaaatgcattttgttgcctgcaaataggaaatggtcctccaaggcaaactaaggtggtaaaccacagcatgtgcccagcttggaacgagggtttcacttggttatttgacgtggcccctaaagggcagaagctctacatcatatgcaaaagcaaaaatacgtttggaaagtcaacccttggaagagtgaccatccagatcgacaaggttgtcaccgagggtgtatacagcgggttcttcagcctcagccacgacggaggtaaggacggctcaaggaccctagagatagagatcgtatggtccaataggccatccaacgactgtatgtagcgtacggatgatttacctgacgccaattcttgtactcttggcttccatgtaaatcagccccccccccataatcatccgaattcatttatttgtacgtagaaagttaagacacttagataactcgcgccatcattcaattattgaggtcatttccgggattgtggccctgctgctgtaaactgattttgcacccgggtatttttttttgtacaggtgaatttatttcatgtagttatagcttagtgtagattggtggtgagtacggacaagccctagtgacagtaacattgggtgtgatgtgtggcgtgatatttgctcccgtgggtgtgtttccggcacttgtagcctcaggatacacatggctgagcttggcactgttctatttgtcaggcatgtttgtttacctgtttggttctggctacgcaaaactttttttttacatccaccttgccatagccgtaccagcggtacgaggaatctgaggtacctttttcttccatctcggcagaagtttgatgtttggcgaaactgtctcaggttacatggtaataacaatactatttgcaaaaccaaacacgccacataccagtactgcttgctggcagcctgaaccaatgttttaacggt

SEQ ID NO: 33977 - DNA, 2216 bp, Zea Mays
gttcgcctccgggttggccgcgagccgggaaagcgaccgcccctcctcttctcctccctttctctcgtctcgtcggctcctagctcctcctcctcgctcgccaagggagacgcacccggtccattcgtcctctcctcctatcgcctccccctctcctccccggagatccccgctaccgaaggattatcccgtgcagaggcccactagtatatcagcttggagttgaggagaatggctgttggtgggactcaaccagtccttaggaagtacctaggcgccctcaaggacacgacgactgtgagcttggcaaaagtgaacagtgattataaggaattggacattgcaatcgtcaaggccacaaaccatgttgagcgcccatcgaaggagaagtacataagagaaattttccattccatttctgctgctaggccacgggcagatgtagcctattgcattcatgcccttgctagacgtctttcgaagacgcgcaactgggcggttgcgctcaagacattgattgtcattcatcgcgcccttcgggaagttgatcccacttttcgtgaagagcttattagttatggcagatctaggtcccatatgttgaacatggcctactttaaggatgactctagtgcagaagcttgggattattctgcatgggtgcgcatttatgctttatatttagaggagaggctcgaatgtttccgagtgttgaagtatgatgtagaaacagatcctccgccacaaggagcgtcgtcttacaatgttataatccagcatgcactctcaatggttgctttagagagtattaagatctacactgcgattagtgatggaacaatcaatctagttgacaagttcttcgagatgcaaagaaatgatgctgttagggcacttgatgtatacaaaagagcaactaaccaggctgaacgactttcagagttttatgaagtgtgcaaaactatacacattgggcgtggtgagaaattcctgaaaatcgagcagcctccagcatcattcctgaataccatggaggagtatgttagagatgctccaacaggtcaaaaagagaaggctatactagcgatagaatacaaaaaagagccagaggaggaagaaaaaccgtcctcacctcctgcggctccagaaccagaaccggaacaagtgcctgagccagaacccgagccagtgaaagaggaagcaccagaagctgaaccagatttgctgggtctgaacgaacccaaccctgctgcaactgcgatagaagagcagaatgctttggcgctagccattgttccgatagatgatgctccgaaagctgctcccacttttggaaatggagtcactggctgggaactggcccttgtgacagcaccaagttcaaatgagaccgccgttgccccaagcaagaaactggccggtggtctggacttgctgacccttgacagcctgtacgacgaggcgaaccggagagcgagccagccagcaagctacaacccctgggaggcgacccccgccgcgcctgccccgatgatgaccatggcgccggtgatgcacgacccgttctacgcctcgaacgggtacgctgcgccgcacggcgtgcagatggcggcgatggcgcagcagcagcaggccttcatgctgcagcagcagcagatgatgacgatggccccggcgcagccggtggtccaccacccgatgcagatgcagcagaaccccgcgaacccgttcggcaaccccttcgcggccgccggcatgccgctccacgccgggcccggcaacgtgtacacggggctgatctgatccggtccggcggtccatttcttggtctgcattagcgctgctgttaccacatcattcattcttttttgcccgagttttcttgttgccattgtgagaaggaaatttgtagcacagacacagacacaggtagagtgtattatagcgtcggtcggagtgtatagcaagcagggggtcgtcatcagtggtatcccgtacgtagaaggtgattgcatgtatattatacacacagagtttggtcacctgttcatgtgcagttgagagtccattcttgcggcgaggagacgcggcacggcgccacgtcgagattgagattggattattcttaacattggatacggttgaataatgcagcagccattctttttagcacatgacactgttcgatggaatggaacaggacggttgagatcgac

SEQ ID NO: 33978 - DNA, 5669 bp, Zea Mays
cgatcgcctacgccccacgcaacgccacgagcccacgacgcaccccgcaagcgaagcaaagcaagccccaggcggcgccgccggcggaggacgcgatggggaataagatcgcgcggacgacgcaggcgtcggcgacggagtactacctccacgacctgccgtccacctacaatctcgtgctcctcgacgtcgtcagccgcggccgcttcctcaagtccgtccgctgcaagcacgacgaggggttgctcctcgtcaaggtctactttaagcgcgccggcgagtccatagacctcaaggagcacgagcggaggctggagcggattaggaacgcgttcaaggggatcgaggggtcccacgtatggcccttccaggtttggctgcaaacagataaggcagcatatctcttgagacaatacttcttcagcaacttgcaagatcggttgagtacacgccctttcctcagtcaggttgcaaagaaatggcttgcctttcagttaattcatgcagtggaacagagccatagtaagggaatttgccatggtgacataaaatgtgaaaatgtgctcgttacttcttggaattggctatatcttgcggactttgcatcattcaagccaacgtatatcccggatgatgacccgtctgatttctcattctactttgacactggaggaagacgacgatgctatctagcacctgaagtgtgttcttgctgaacttttccttgaaggccagccactttttgagctttctcaacttctggcttaccggcgtggtcaatatgaccccatacataccctagaaaagatacaagatactggtatccgtgacatgatacttcacatgatccagttggaccccaaaaaaagggtaccatgtcgaagctatctgcagaaatatgaatctgttgtgttcccattttatttttcaaaatttctgcacaagttcttctcggatatcgttccacttgattccgatgctagggtaagtgtcattttattctgtagtaacctcaatttcgctgctactgttcggcaatgtttttttaacataattctgtttgcaggttgagaagactcaagaaaattttggaaagatacaggaaataatgatgggtagttcaacaattgaacaaattgagaggtctacatcgtgtgagcatagtgaaccatctgggagaaaaggcatggaaggggaaattttaaactcgccaggaaattatagaaatagcacatctgtatttaagaaaaatactcctgtagaccatcaacatattattggagatatcaatttcctcctcaaagaagtggagggcaggagtaacaacacaagcacaaaggtcacaaaagacacttatcattttgttgcaccgagcattacctgtgcaaatggtgttcagtcctctcatctagttaatccagcaggaagacaaattggaactggtttgatgggccacaaacatgttgtatctcatgtgaagatctcaaagagtaacatacgctccttggtggctacttatgatgatcaatcagatacctatagttttgatatttttcagcagacagactccaaggtgagctgtgaaggcatggtcttgcttgcctcattactttgctcatgcatacgcagtgtgaaaaaacctgagctaagaagggccagcctcattcttctgaagttctcgtccacatacatagatgatgatagtcgcctacagctagtggttccctatgtgattgcgatgctttcagatccgtctgccattgtccgctgtgctgctttggaaaccctatgtgatgttctttgtcttgtgcaagatttccctatcagtgatgctgttatattccctgagtatatcctcccaatgctctctttgctccctgatgatacggaagagagtgttagggtttgctatgctagcaatattcataagctggctttaacagcttataggttcctacttcgttctcgtagcattgcagatattcgacctctggatgaatcagtggtagctcacagatcccaatctgcagattcaccagcgaagaggcaagataatttttttcgccagcttgcagaactgaggaaatctatttatgagatagtgcaagatttggtgatgggacaaaagcagacacctaatacccgtagagctcttctgcaggatataggttatttgtgttacttctttgggcacaaacaaagtaacgattttcttcttcctatacttccagcatttctaaatgatcatgatgagcagctccgtgcagttttctttggccagattgtctatgtttgctattttattggagcaagaagtgttgaggaatatcttctgccatatcttgaacaggcactaagtgatgacatggaggctgtccttgtaaatgcacttgattgcttgaccatgatgtgcagaagtggttatttgaggaaaagagtaattgttggtctattggtaaagattctccccctgctccggtatccaatcaattgggttaaacagtctgctgtaagatttgttgctgcctgcagcgagagcttaggatctgtagatacttatgtgtatctttctcctcatctaaggcagttcctacacatggagccaccttcattggcctctgaaactgctcttctttcatgtcttaagcctccactaccaaaatcaatcttctatgaaggtttagagcatgctcaggacattggagacattttactgaagagcagtggcaagaaagaacagatagtacatggtggaagatatcctggtacagcacaaagtggatccttggccaaccttgaagatatcctgcgaccgaaaggccctaatatttccagcagcatgtccttgtatgtcaaaaactctgtttcttttgaaaaatcactatattctggttttgctctgcatgcatctgctgcaaatagctccttttatgatggcttatctaaaggaataccatcatattctttttgtactgataataagcggggtttaggagaaacacacatggtccctgattcatcagtgtataaagcttcaataaggctaccttggttggaaccaaaccgtcctgccatgcagaccagagatgatcattttagtagcacgcgacaagatttcagcatcaatgactctatgaagagcaattcctctttgcaaggggatatcattccgaactctgatactggagggttgcctttctccagatcagcagtgaacttggagactggatggaagcctcgtggaattctagtggcacatctccaggagcatcgctcttctgtcaatgacattgccgtatcaaatgataataccttttttgtgactgcttctgatgactcaagtatcaaaatatgggatacaagaaaattggaaaaggacattgctttcagatctaggttaacatacagcatgggtaatagccgagctctatgtacgacaatggttcatggtacttcacaggttattgtcggtgccagcgatggaacattacacttgttttctgtggattgtgcacgcagcgttgggactgttgtggaaaggtatgctggaattgttgatgtaaaaaggaacgagattaaagaagacgcaattctcagcgttgtaaattgttcaaccgacagctttagcccgactgttcttttcagcactgaacattgtggcatccataaatgggatacaagaaccaactcagaatcttggtcttttaaatcctctccggaggagggctatatatcggcacttgttgtgggcccgtgtgggaattggttcatctcaggttcttcgagaggcgtccttacactgtgggataataggtttttagtacctgttaaatcgtggaattattcaacattaagcccaatagagaaactatgcttgcttatacctccaccaagttcgatatcctctgctggaaggcctttagtttttgttgccgctggatgcaacgaagtttctctgtggaatgctgagaatggaaactgccatcagatgtttagaacagcaagcactgacaatgaagctgtgatgtcaaaggcgccatcgaggcctgttaacaagccagtcatcaaagatataaggcgagcaggcaattataagtacagaatcgatgaattgaatgacccacctgtacgccatccagggatacgttctttgctgcccttgccaggtggtgatctattaactggaggaacagatttgaagattcgttactgggatcaagcaagtccgttcggcaaaaggagatatcttggagaaagcagttggaaacgatgagtcttacgatataagatccagttttggaatacaggaaatgtacaaacagagtagctcggtctccggtttgacgcccaagactcagctcgcggtggcagctgcagattctgcagggtgccatcgtgacgcaatactcgcgttggcatccttcaacttgtctagccagagattggtatcaggcagcagagacggcgctgtcaaagtgtggaaatagcttctccagcatgggctatgattattcaggctatggtgcctctacaggaaaaccatcagagtacaacacatacaatgacatagaggccgtttatgattgcttgaaaaaggagtatgggatagaagaagaggatttaatcttgtatgggcaatcagttggaagtggaccgacattgcatttagcctcacgtctggaaaatataagaggggttgtgcttcacagtggtatactctctggcatacgggttctgtatccagtcaaagtgacactttggttcgacatcttcaagaacatcgacaaaataaagcaggttgactgccctgtgttggtcatacatggcacagccgatgagatcgtggacttcacgcatggcaagcggctgtgggagctagccaaggagaagtacgagccgctgtggatcaaaggcggtgggcattgcaacctggagacgtacccggagtacatcaggcacctgcgcaagttcataaacgccatggagaagctggcaaaggacagcaaggcggccagggcgccgccgccgtcgagcatggccgacgaagtaagacgcaccaagtgcttgagattcgggaagagatgaggctggcggcgaggccatgcgggtctcggccgtctttagctgcgtacgccagtcactaaccccctgctgcattgcattgcattgctttgctgctgctcgtgccgtgtgcaagtcgaaggagcgatgtcactggtcgtcgatgaggaaggaagggactaaggaaagcaggcagatgaatggggattgtttgcctgttgagttgtacgtgctgctctctctgcagacgtcgacgacctgggaaggaaacgcagcagcaaccctaggtcatgtatgatccgtgtgagctgagttcagagtagagtagacagaaagacctgtggctgctgcagtgtgctgcagatcgggagatgcctttgctttcctagtggttgtgcaaaggaattcgtagcgtaatttttctttctcatttttcctacctgtattgtagtcactgtgcaaaggaattcgttttgattgattgattggttgctgcaacaaagtgaagtgcgctgtgacacttgacgacgtagaggctagaaacgagaccctgacgagtgacgaccatattgtttccttgcggcaatgttcgggtccgaccagaggag

SEQ ID NO: 33979 - DNA, 642 bp, Zea Mays
tggcgctagcgctcggctggaccgggcgggcggtggctgcggctggagccttggaggcttctaccggagtggagtgcttcacaaaactgggcgctgcccaactccctgcccaagctgctggattaaaccccccttgtcgtcgcttcggttcaagcgaggaagagagagagagcgagagttgtacaaggggcgccggcggccgcattgtagagtacgtcgagcttgttcactgccgtcgcggcctcaaagcaagccacatcatcgatggcggacgcagctcacgtcttcctgctggtagcggtggccgccgcgctcgccggccgctcagacggcgcgtggtgcgtgtgccgcccggagctggcggacagcgcgctgcagaaggcgctggactacgcgtgcggcgccggcgccgactgcaagcccatcctgcagagcggcgcctgcttcgccccggacaccgtcaaggcccactgctcctacgccgtcaacagcttctaccagcgcaacagccagaacccgcaggcctgcgtcttctccggcaccgccacgctcagcaacagcgacccgagcggcaatggctgcacgtaccctgcgaccccaagaatcacagtccagccgccgactgagggtattttcatctcg

SEQ ID NO: 33980 - DNA, 2573 bp, Zea Mays
ccacatggccgacgtgattgatatggatgttttcacgaaacctgaccagtagccgtcctcgtcttccacgttgtgtttctcgcccacctatctatatttatcataaaaaacagccaaatcgagcgaggcgacgagggcgagtagtagttggcgagttggagcagagatcgccatggacgcatcggcggaggtggaccacctcgccgccgagaggtcggccgcgcgcttcgatgtcgaggcgatgaaggttgcatgggctggctcgcgacacgccgtcgaagtcggcgaccgcatggcccgactcgtcgcgtccgaccctgtcttccgcaaggataacaggaccatgctctccaggaaggacttgtttaaggacactctaagaaaggcagcccatgcatggaagcgtattgtggaactacgtctcacagaggaggaagcaggtatgctgaggctatacgtcgatcagcctggttatgttgatctgcattggggcatgtttgttcctgctataaaaggtcaaggtactgaggagcagcagaaaaagtggttaccaatggcttacaagttccaaataattgggtgctatgctcagactgaactcggtcatggctcaaacgttcagggccttgaaacaactgccacatttgatccaaagactgatgagtttgtcatccacagtccaactctgacctccagcaaatggtggcctggtggcttggggaaagcttccactcatgcagtggtgtatgctcggctgataactgaaggaaaggactatggtatacatggtttcattgtgcaactgcgaagcttagaggatcactcccctcttcctggtattactctgggtgatattggtggaaaatttggcagtggtgcatataacagtatggacaatggtgttctgcgatttgaccatgtgcgcataccaagggatcaaatgttgatgaggctttcacaagttacaagggaggggaaatatgttcattcagatgtcccaaagcagctgctttatgggacaatggtttttgttcgccagacaatagtcgcagatgcttctaaggctttgtcccgtgctgtttgcattgctgtacgatacagcgccatccgaaagcagtttggctctcaagatggtggccctgagactaaggtccttgattacaagactcaacaaagcagactctttccgttgctggcttcagcatatgcatttagatttgtgggtgactggctgaagtggctatacatggatgtcactcagaaactggaagctaaagactactcaacactgcaagaagcccatgcctgtactgctggtttgaaggctgtgacaacatctgcaacagctgatgccattgaagaatgtagaaagctctgtggcggacatggttacctgaacagcagtgggcttcctgaattgtttgctgtctatgttcctgcttgcacttatgaaggagacaatattgttctgcttttgcaggttgcaaggattctaatgaagaccttatctcaattgacatctggaaaacaacctgttggtacaatggcttacatgggcaatgtacaatatctgatgcaatgcaaatgtgctgttaacacagctgaagattggcttaaccctgttgccatacaagaggcgtttgaagccagggctctcaggatggcagtaaactgtgcccagaacataggccaagcagcaaaccaagaagaaggtttctatgagcggtcccctgatttgctagaggctgcagtagctcacatccagttggtcattgtaaccaagttcatttcgaaggtgcagcaggacattcctggacctggagtgaaggaacagctccagaacctttgcaatgtctatgccctctacattctccacaagcacctgggcgacttcctggcaaccgggtgcatcacacccaagcagggagcgctggcaaacgagcagctgggcaagctttacgcacaggtgcgtccaaatgctgttgcgctggttgatgccttcaactacacagaccactacctggggtctgtgctggggcggtacgatgggaatgtgtacccagcgctgtacgaggaggcgtggaaggaccctctgaacgagacggtggtgcccgaggggtaccacgagtacctccgccccttgctcaagcagcagctcaagctctccaggctctagtctgatcggctaccccccctggaattctccatggcggctgccttctcagaaaatctcacgcgacctccgaatgaaagtgatgtaagctactaacgattcttgttagagccaggaaagaggctctccagccaattataaatttattcctcaagctctgaggatcaagttcaagctgtggattatataggaagcacgtttaataattaataaagagggagaggatgagcatctctctgttgctgctcaagtgttgtgcgcagtgcgagtagtagaatgaatatgtatgtacgagtgcgtgtattgtatggtgaattgaagttccatttgtttgctaaaagtatatcagaaaacaatggcttgatttgcctaagtccaaaatgaaagccagattccgaac

SEQ ID NO: 33981 - DNA, 2136 bp, Zea Mays
ggattttccatcccaggcatgggcgttgggcgagcagtcccccccttccacccgcgttcgcttcttccccagcatccagcaaggaaggaggaagaagaagagggaggagaggggacggtccgcgaatcctgcctagccttcgccgccttcctccgctcgagcggctcgccgagcgaaagggcgctatgagttcagcgaatggtacaaccaatgtccatgggaaagaagcagcaccgtatgaggagcagctgttcaagattggtaaagttagaactgacctaggacaactatctggaaaatcagctctatattgctcagatgcttcaattgcaaggtacctgatagcaaggaactgggacataaggaaggctactaaaatgctgaagaaaaccttaaaatggcgttcagaatataagccagatgaaatccgttgggtgagatgcaacctctctgtatttgcgggaagaaggtttgccttggtttattactttcctagatcctacccatgtgggaacctccagcacttggtttattacttgctttgaaggatgtgacaatgttttgatgaaggatgtgacaaagttttgatgaaggatatgacaatgtgtgattaggtttatgtcagcacaaagcttttcagcatgctttgtgaaacatctggtgcattatgacatctgatttgacgggttataatctggtagaaaatcttattttgcatttcttcatgtaggatgacatatctgatgaagcggtaactggaaaaacttaccgaactgattactttgacaagatcgggcggagtatccttgtcatgagacctggatgccagaataccaagaatgccaatgggcaagtcaagtacttggtgtactgtatggagaatgcaattctaaatctgccacatggtcaggatcagatggtttggctcattgattttgctggtttcaatttaggcaacttgtcaattcaggtgacaaagatgacggcagatgtcctacaaggccattatcctgaaaggttgggtgtggcaattctttttaacgctccaaagttttttgagcctttctggaagatggcaagcccccttcttgagaagaagaccagaaacaaggtcaaatttgtatactcagatagacctgacaccatgaagatcatggaagaccttttcaacatggatgagttagaatgtgcgtttggtggcaagaacccagctactttcaatataaatgattatgctgcgaggatgagagaagatgacaagaagatgccatcattttggagccctgagaattcagctcttgcttctgagccatatcagatgagcagccaaaaagccctaggaagcgtttcaggtgcgaagactgaagatgctggatctggaaagatggacgacatggagactgctcctgaaaagagtgaagaatcgggtactgaatctggagaggaggtacaaacacggactgaatcaagcacagttgagcagaaaaacttgcctggagaagataatgccccagcagataaaagtggcctttaatctgatctccgggtatcaccatgaaacataaatgtgaaacattgataggagctctaccacatttcactaaggtttgaacatgaaaggcgacgagaaactcttttaacacggcaaatcggcatgcctgacttgttttgtagtcggcacctatttctctgtcctcaagatcttatttggggaaccttttcatgacagaatgagatctaccagatggtaaagaactaataccatactgttaccctcagttttcatgacagaatatggtctggtgttcagtttctgatatgcccttgtattttcgctggaaaagaaaaatactattgtatctggagctgttgggttaataatatatcattgttcagtttgtattctgttcagtaaccaccattgactttcagttagtatagccccacttggtacaaagacaagtgttaggcttcaaaaacttgggccttttcgctacaaacgtttatgatctttgtaacctactctatcatcacgagtcaaaacttcagaagtcgtcatagaagctgtgtctcttgggtatcgcgggggagtcgcagtggatcctagcgtccagagtcgagtagccctttctgatc

SEQ ID NO: 33982 - DNA, 2199 bp, Zea Mays
atctctttctctttctctctctctctctcctgaaatctctctctcgctgacctgagagttatccaaatactctggtatggcgagatccccctcctcgggttcccactcaactgctgtatcgtagtagtcgactacttccctgcaatccgttggtcagctcacaatagcagatgagtccattggaggagttcgactagtctccaccgctgctgcgagattccgccaggttccgcgcataccctgacggcaagccatgtaccgggtgaagagccaggcggagggcgagggcgagggcaaggacgagatgatgtcgcaggaccagatggactcgccggtggacaacgatgtcagcagcagccgcaggtcgcctcgcaggggcgtcggggcgcccctgaagaaagggccctggacggacgcggaggacgccatcctgatagactacgttaagaagcacggcgtgggcaactggaacgcggtgcggaagaacaccgagctattgcgctgcggcaagagctgccgcctcaggtgggcgaaccacctcaggcccaacctcaagaaggaggccttcaccccggaggaggagcgcctcatcatccagctccacgccaagctggggaacaagtggtcgaggatggctattcatttgccagggcgtactgacaacgaaataaaaaactactggaacacacgaaaaaagagatgtgaacgagctagccttcctatctatcctgctggtgtacgtaatcaatcttcaaatgaagaccagcaattgtctggtgatttgaacggtggcgagaacatgtccaatgatcttctatccggaaacagcctttgtctaccagattttaacaatgacagtttccgtgcgaaactgaaggctttaccaccacagctgccagctgtttcaataagcaatttgctcggccaaagctttgcatcaaaaggttgtagcttcatggatcaggtagaccaagcagggatgctgaaacaatctggcagtgcgcttcctacattgagcgatgccattgacgatgtgatttcctcggttgatcaattttcaaatgactctgagaagctcatgcagactttaggttttggttatctcaatgaagccaacgctaccagcaagagtattgcgccttttggggttgcacttactggcagccatgcccctttaaatggtattttctctgcatctaggctcacaaatggtccttcgaagatggagcccccttcagtccaaaatagcaggctcaagtatactgtggatcctgcaatgcagcctactgagttagtagatccttacatgcagtctctatcagcgaccccttcagtgaaatcagagtgtgcatcgccgagaaacagtggtcttttcgaagagctgcttcatgaacctcatgcactaagatctgggaagagccaacaaccatcggtccgaagttcaagttcttctgctggcacaccttatgggactatggttagctcagaatttgatatgggtcaggaatattgggaagaacagcccggttctctcctcagcgaatatgctcacttcagtgggaattatttggctgaatgcgctcctcctgttagcgctgcatcaactgatatctttccgctccccaagatttctcctgcagaaagcccttcaatgggctctggcgagcaggcgttagagcctaaacatgagtcagcagcttcacgtacgtcatcttggaaacttgaggcatgatgcattattctctgggaacacagcccattcatccagtttcaacgataccatagcaatgctcatcggcgatgtacctgttcttggtgatggaattgtgctcgattcttcctcatgggacaacatgccacatgcttttcaaatggcggaattcaaatgagttccatataatttctttgtgatgctgaagggcttcttcctgcttgttttggggtcaatatcagggaacgccccactgattgtgacgctgcattcctgacagagatccttgtgatcttcatgcggatagtccttttgtctaattaagtgcatggaagataacctggatattatttttaattttttgctttgtattagagaaccgtttttgccatccctgacagcatttctgttggaaacgtgtcatgacttttgtttgaacaatttaaatatcggttatagataatgtgatgtgtgccatcccttgatgc

SEQ ID NO: 33983 - DNA, 3769 bp, Zea Mays
gcagtggggaaaaaacgcccacgcgttgcgccgcacgccggctacgagtatccagcagcaccagcagcgctccagcctccctccagggctccagcaagccgggccggtgaattaacagcgactgcggtgaggcgaccgttgcggtgccgtgcattaaaccaccctgccccccctgtcccccgcccccctctgcccccgctcctcgccgtcggcacccgcacccgcgcggcacggcggcgtccggggtccggtgggctgggctgagtcgacgagcgcttgagctgagccgtcccagtgcgggggcgatcgcgtcgcctccggcctactccaggagcttcaactgatcgggcaatcggttgtcttcgtcccgcgttgaagtagattcggtcaaaaagtcaaaccgacgtgaggggaatttttctggtttggtttggtttggtttggtttggtctggatccgaaatgctgtgctggaaagcggttggtcagtaaatcgccgctgctaaagtttctgctccctgagctcagttggatcggagagttttagttcagtgtgcccatcctaaaacagggcgagttctgccgtgaatttgttggcttgtgttgtttgatcacaactgtattaaaaaaaaaggatcgatctttgcggctacaagagagtgacaacaaggaggcttggtcagctcgttcctttcacctgtttggcgagtgcttgaggaagaagacgacctgctcagctcctcctttggttgctcatcgaatcaaagaagactagggaaatgggggtaatgtcccggcgggttctgcccgcctgcagcagcctttgctacttctgcccatctctgcgggcgcgctctcggcagcctgtcaagcggtacaagaagatcatagcagatatctaccagctgcaaccggatggagagccaaatgatagaaggatcgggaaactctgtgattatgtctcgagaaatccaacacgcataccaaagatcacagagtatcttgaacagagattctataaagatctaaggcatgagaattttacgttggccaaagttgtgccatgcatctataggaaaattctatgttcatgcaaggagctcaggccattgctagccacaagctcattaagcaccattcgcactcttcttgatatgaaagcgcatgatgatctacaagttctgggttgtcttatgcttgttgacttcctgaatggccaggttgatagcacacatatgtttaatttggaaggcctcataccaaaactttgcaaaattggtcacgaattaagagaagatgatgaagggctccgtcttcgatctgcagctcttcaggctcttgcttctatggtccaatacatgggcgaccactcacacatttcaatggaacttgatgaagttgtctcagtgatcataagctgttacgaggctaatcaaacactctcaataaaagaggtagtcagatttcaagatgatgatgatttggtcattaatgggaacttggctgtgttaccagtgtctggacaaaatagtgccaaagtggcatctgatacaatgtctgcatctgaaaatccagcatactgggcaagggtttgcttgcgaaatatggctaatattgcaaaggaggccacaactgtgcggcgtattcttgaccctcttttccgcctttttgacagccacgactattggtctcctgaaagtgggattgccctttccgttctgcaagaaatgcagaaactgatggacaaatcagtgcactttatgtggccttggaggagtgcctagtgcagttgacagaaaaggttggggatgttggtcctattcttgatatggttggggtaatgcttgagaatctctctcatactgctaccatcgcaagaacaacaatttcatctgtttatcgcacatcacaaatagcagcatctgtctacaagtcatcataccatcagaaggcatttcctgaagctttatttcaccagcttctcttagcaatgttgcactcagacaataagacaaggattggttcacatcgtgttctatctaccattgtagcaccttcaatggcgtgtccatggtcggacatcagctttcctatcccaatgaagggtgatgattcacataacttgcatttgttggttctctcagctttctcttctgaggccataatcaatgaaacacggaccaaaaacaagatccaagaatccttgcaagaaaacaacaaatcagaagctatagtggatcctgagaatggatacacacagacagaaccagataaaaggaagtattcaggggggccatgtctaaatgagcattatcgtacagcttttaatgatgaaaacttaaagttcatgaagttgaacgaccaccagattgttctccttctttcatctatttggagtcaagcatctctggatgacaacttacctgcaaattttgaagcaatgggccttgtctacagcattgctttattatgttcaaaaccaaaaagctccagtcatgtgacacgtattcgttgtttccagttggcgttctctctcaggagaaactctcttagccctgaaagtgatttgaagccatctcgtagaaggtgtctgtatacgatggcatcagcgatgctcatcttttcagcaaaaattgctgatctccaccagataattcctcttgtgaaagccgcagcaccagagaaaatggttgatcctcatcttcgcttgatggatgactgccagcttgttaatacctctgcagagtcatctaacagcgagatggtttatggttccgaggaagatgaaagtgatgcactggcttttctttcagccatcaacaagcctgacacagagttaatagaaaccgtgatgtgccacttcagggagaagttcgaaaatttaccagagaaggttaacgggatagaagagcaacttcttcaagagttttccctggatgattcgtttcctcttggtgctccactattcatggagatgccacactcttgttcaatgtatgcagaaaaggatgaagaatgttttgacgaggacactgttccttctgagctagacgatgacgacatcatctttgagcatagtgggtctcaatctgaccggaaaacgtcaggttccatggcttcgtcagatgttctaactgtcaaccaactaatagaatctgttcatgagaccgcaaggcaagttgccaacgttccagttcccgccaaccctgtaccgtacgaccagatgaagagtcagtgcgaagccctggtcatggagaagcaacagaagatgtctgtcctcttgagcttgaagcattcgaggactgactcacatggttcagccggtgtggatgggcttgaaacgaatgagtcttctctgctgtctgagcctgagttacagtcaacaaggaaggggcgcatgcgccgctgcgattcagcgtccagcgaatctgactgttcgttcaggctgccacctgctagcccatatgacaagttcctgaaggcggctggacggtagcctgatgcggttgcggcagcttggcgcttcagttttcaactctctcaagtctgcatgagagttcagtacaagtgattcatcggcactctctcgttctcggagtccattctttcaagtgtatattatatttacatccctcgacacaaggtgtataaagttctgttactgtttccttcagaataaaccgaagtgtataggcactagcggatgatcatgttcaagacggtatttgttcatttgttgatcgtgaaaagaaaacattttacacaaatca

SEQ ID NO: 33984 - DNA, 599 bp, Zea Mays
ggaggcaacacgatataaataaacagacaatctgcgagcacttcagaaatccagtccaacaagagcggatactcgaagaaaaaaaaagtggtatctgcgggtgcttaatcagctgccgaaatcaagccgaaaaacctcagacagatcatgaagacatcaaactatcaaagtgagatctttctcgcaggaagccacatcaaacccactctaccagatgaagataaggggggaaagcagtggctctaaaaacacaaccacagagacgaatcaagaagcagggagggagtaccactgtcccacacgcaggctgaccaccgaactctagcacgaagcaatgcgatccaaagcacctcttggattggagtaggaggggtgtaggactaggagcaggagtagtaggtggggggcagcggcaatggcgatggcgagatccagggaacaggcccccctgagctgcaggctgcagcgcggtgacttctagaacagctcgtggtctctatcaatggcctccctccctcgtccctctctctctccagcttttgccttttatctttgccttttgtttggaggcagctcaattcgtaacaccgacgcgctcg

SEQ ID NO: 33985 - DNA, 1306 bp, Zea Mays
ctcggctcctccttcccctcgaagccctccctgtattttcgtcagacagacactcgcacagtcgcactccccagaaaccgtccaaaaaccagcagccggccccgccccgcgcgcggagtgctcgatcgctctggttttccactcccggtgcccgttggcgcagcctgaggccgcggcggcggcggcggcggcgctcggcgtttcgcgcgagcggtggttacgagggaggggccgagatggtccactccaacgccctgctgtggaagaagggaccggtccacacggtgtggaaggcgtcgttctgcaaagagtcagagctcagccgggacaaggtcgcgggcacggacatcgtcgcctccgttggcgagattatgttggatgtccgcagcccccatggacttcaccttgcagtactggcaaagcttctgtttggaattgttaggatattctccaagaagatggagttcctcctccatgatttcaatgagctttctcggtcatttcgactaagtcaacttgctgaacctactttgccaagtggaaggttgacactcggagttttgaagcaagcgaataaagatgtccgtgtaggaaggttagtggtaggccagcaaaacacctgcaaagtacaaaaaactgttcatgctgtgagaacaactgaagtctctagtgcaatatcaagtgaaggccactctgtaagggtagaaacagaagttactctagggatatctgtggtaatcaaagaaacacgtttgccagatggtctgccaaccttcacaattccaagatcatttgagcttgactctttcaatttggggattgctgaagatatagatgatgaaggtgatgaccaccatcagttggcacaccaagatattttattgagagatgagagacatcatgccccctatttttatgagccttatcaaagagtgtcatgttcatatgctgttgattctgctggttttctgccggaatacattgctcttccaaataatattctagacttcaccgaagggggtaaatctgaaatagaaaacaagaatgccgattctgcttggttcacaccattgaaggatgttcttccacctgagatgatgggtatggtggctgaagcaaaggatcttgcaaaggaaagcaaaactggggataattccgtaagacaagtgaacatgaatgagaataacaggggttctgattgtactatgatttctatccctctgcaagaaagtcaagaactgcaatgctctgataatgctctggagaatatggcttgtggaagtaggagtgcaaattacaccacaac

SEQ ID NO: 33986 - DNA, 3380 bp, Zea Mays
cgttttctctggtacctaataagcatatatcctttggggacatacctgaaacttgtatccagaaggagtgaatggggtagctttcttgccacctttagaaagtccatttgattattttctcttggacaggacaggcagtgagatgagctgcgtcaagcaagcactgccagtgccagcagcagatataagcagaaggcaggtgatgcgaatggccgtccgtccatggcgttgcccattgagcattcctcaaggccgaccctggggtttcccttggggacggccctcttgctcctcgtgatctttgccctgagtggcatgttctcgtgctgctaccactgggacaagctccgctccctcctccggtctcggcatccaggcatgttccaggagggcacctccgtcgcgtcctcgccgagcaagacgacctgtgatcacaagctggacagagcgtgtggtttgcccgttatcatgcctggggacaaggtccccaggttcttcgcgaggccctgccctcacgagacgtctttgtgtttgccccaagctgcagagaagacggctggagttccgtcggagaccagatcatgcatgagccgtccgtcagtatctgtataaacacctgcatgacgcagttagctgttacggtgaccgactgtgtgtgtatatcatatgcttttggtaatacaatacaaagtgtgcaaacattccacttgtgatatatactatatacaagatttagacagtgttaggacttattcgttttgttctcaatctatgtgtaatagatgagattgagtgagtttaaattctaaacaagtcaaaatctttcataatttttttaataccatcaactccatatgccaaacaaacctggtgcactgcatgctcgtgtggaaataatcgtgcttgttgatgggcaaccaaatgagcccacgggcccagctacttcctctcggcccacgcgttcgcggtcagcaaggacgccgcgtcaccttccctccctgacccgacaaaccaacgccgcgtactcctctctactctctgccccgccaccaagctcgaccgaccgatgatcctcagccgcctgcatgtccgtgtcacccgccgatcccccgcgtccgccgccctccgcgatgcggcaacgcgcgccttggcctccgcgggcctcttccgtggcctccacggcggcgcctcctccgagcacggccgcgaacccgcaggtcctcttacgctctacaggaagctagtgagccaagggaagctcacgcatgatagttaccaggaaaatgtagcttccgaattagacaacctacttagtaggcttcaacggtacgagatggaaatggaggattatcatgacaagctgtacttctgggagaatagcagggagaaagagcggcgcaggcttcttgtcgaagaagctgaagataagcagcgtggtggtgtatggattgatgagagaaggggatttcttgacaagttggttgcacggagaagaagaggaagcatagaacctggagttggtaagtgggtctcgtacctgaaccgagagaagaaactagatacattggtaggccatagaccagtcgctcctgttgctcctaaaggattgtatctctatggaaatgttggaagtgggaagacaatgttgatggacatgttctatggggccactgaaggtgtcatcaaacacaggaggaggtttcactttcatgaggccatgcttgaaatacatgatcatatgcatgatgtatggaagagacgtgatgatgacaaatctattcactcaagtgctttcagttggatatcaagccttccttttgacacaaaaattaaggagtggttgattggcgaagagaagtacaaacaacagacacaggaaaagcacatccttttggcagttgctgacaagtttttggttgatagacaggcaaataaaactggagcaagcattctatgctttgatgagatacagaccattgatgtttttgctgtggtagcactttctggcattctaagcaggctgttaagcacggggacagtacttgtagcaaccagtaataaagcaccagaagatctgaatcaggatgggatgcaaagggacatcttccttgagttattatcaaaattggatgaaagctgcaatgagattcttgtgggtactgaaaaggattatcgccgcctaattccgacagaaggctcaactgaggttcactatttttggcctgccacttctgatgctcgcagcatgtatgaggctatgtggcatgacataactgaccaatcaggagaaaatattgtttctgtcaccattcctgtaatgtttgggaggtctattgagattcctcaaagctgtaatggtgtcgcaaggtttgacttcgagtatctatgtggtcgcccagtaatatctcaacctcatttcgtatctgtctgcagttcaagttagatggaaagaaaaatttattactgcagaatagcttatattattacttgcactatagctgatagtagtcaaatacataaacttaaatttcccaacagtagttccttttttattatatctgagagcatagtagctctttcgctaatacatcgatcacccctatactaatttctcaggtcggagcagcagattatatagcaatagctaggaactaccatacaattttcatatcagaaattccagcgatgagtatgaagatccgtgacaaggcaagaaggtttatcactcttatcgatgagttgtacaaccaccactgccgccttatatgcctagctgcctcatccattgatgatctttttcaaggaactgaggaaggacctctttttgatttagagagttttcagtttgaaaccgagtccgaagggacaaagctgaggagggatgttttggcggaaggcaatgctggctcaggaccatctactaccggccttgtggcgatattgtctggtcaagaagagatgtttgcgttccgcagggcgatatcacggcttatcgagatgcagaccccgctgtatctggagcgtgtgctggctgtacatccctcgttccgtcgtcctggtcttgcaagaaataacaggcctgcagttcctcagcctgctccggcggtttgaggtttgacagcctcgcgctgtaccattgctttatttcgagtttcgtgtgacaaggcaataaaaccaaccagagatggtaacagtgagacattgtaaatgattgtagaaaggttgtgattattaataagttaaaatttactattttaaacttcaacaggttacacatactatctgtcatttcatcttatattttaaactttactctacgaacggtacagtctaccatttaaaactatgttttggatgactatatggataacctggtggac

SEQ ID NO: 33987 - DNA, 8570 bp, Zea Mays
atggacacaccgacgcgagttcttccccctgctgggcaaatccgatccataaatgtaactccgggaaggctcaccgatggcttgttacccttaccaatgatgaacatgggcccagatttgagccgggtctggtcatggttcgtggtcccatgcagacttgatgcgtgtaggcacacaacagcaaaacagctatttgaggagatgccgtcattgtcatccttactctctggctccaatactgcgagtgctgagcttcctctaatcccttgcaagctctgcaatggggtggtgattgagcgggtctccaaacaaccagaaaccacgtcgaggaagttctaccggtgcagagccaagaaaacggatgggtttgtcagtggtgatcgacgccttgagttgttaatgatcgcacttaatgatcatggcaaagccgttgaatctctaaccaattccatcagagagatgaagaaaaagctgtccaacctggagttagtgatggaagagctggataacgtgaaaaatttgatgaaggcagccatggttgaaattgaggaaaacaagaaatcgacagctgctgcattgaaactgatggagaatgagctgcaaaagctgaaagggtcaactaaagtgaaacctaggaatatggcacagtgttttctgcttttggcattgattgggtgtgttatgttccatgtcccgtgtcactttctggagtctaccgtggtgctcctgctaagtgttgagtcggatgttgattttgggaggacccacgggcgaagggcgtgtcactttcatgaggtatagtgttgggttccttctcagtgtagcgttccttcaaggtgttgagttttagggtcccatgttgatttttgggaggacccacggtccgaagcccgtgtcactttccggagtccacagtgttgcgctctgaatgctagtgttaggttccatgtcccgtgtcactttctggagtctactgtggggctactgctaagtgttgagtcagattggcggatgttgattttgggaggacccactggcgaaccccgtgtcactttcataagttcatagtgttgagttctggaaggtagtgttacgttccatgtcccgtgtcacttctaggagtctacagtgttgcgttcctgatcagtgttgagctctaaacgatggtgttgcgttgctgatcagtattgagttgggcgcatgttgattttgggaggacccacgggccaacgacgtgtcactttcatgagttataagtgtcgggttccaggtcagtgttgggttctgaacgatggtgttgcgttcctccaaggtgttgagtttcaggggcccatgttgatttttgaaggacccacgggccgaaccccgtgtcactttcatgaggtatagtgttgggttccttatcagagttgcgttcggatatatagagttgtgttcctccaatctgtgctgggtttcagggttccatgttgatttttgggaggacccgcggtcggaagcccgtgtcactttccggagtctacagcgttgcgttctgaatgctagtgttatgttccatgtcccgtgtcactttctggagtctaccgtggcgctcctgctaagtgttgagtcggatgggcggatgttgattttgggaggacccacgggtgaagggtgtgtccctttcatgcggtatagtgttgggttccttatcagtgttgcgttccttcaaggcgttgagtttcagggtcccatgttgatttttgggaggacccacgtgttggagtctaccatggggctcctgctaagtgttgagtcagatgggcagatgttggttttgggaggacccacgggcgaagggcgtgtcactttcatgcggtatagtgttgcgttcctccaatctgttgggtttcagggtcccatgttgatttttgggaggacccgcggtccgtagtccgtgtcactttccggagtctacagtgttgcgttctgaatgctagtgttatgttccataacccgtgtcactttctggagtctaccgtggggcccttctaagtgttgagtcggatggggggatgttggttttcggaggacccacgggcgaagggcgtgtcactttcatgcggtatagtgttgtgttccttcatctgttgcgtttcagggttccatgttgattttttggaggacccgtggtccgtagtccgtgtcactttccggagtctacagtgttgcgttctgaatgctagtgttatgttccataacccgtgtcactttctggagtctaccgtggggctccttctaagtgttgagtcggatgggcggatgttggttttgggaggacccacgggcgaacgacgtgtcactttcatgagttcgtagtgttgagttccatatcccgtgtcactttcaggagtatatagtgttgcgttcctgatccatgttgagttctaaacgatggtgtggcgttcctaatcagtattgagttgggcgcatgttgattttgggaggacccacgggcgaacgacgtgtcactttcatgagttatagtgttgatttttgaaggacccacgagccgaaccccgtgtcactttcatgaggtatagtgttgggttcgtgctcagtgtggcgttcgacactatggtgttgcgttcctccaatctgttgggtttcagggtcccatgttgatttttggcaggacccgcagtctgaagcccgtgtcactttccggagtctacagtgttgcgttctgaatactagtgttatgttccatgtcccgtgtcactttctggagtctaccgtggcgctcctgctaagtgttgagtcagatttgcggatgttgattttgggaggacccacgggtgaagggcgtgtcactttcatgaggtatagtgttgggctccttctcagtgttgtgttcggaactatgctgttgcgttccttcaaggtgttgagtttcagggtcccatgttgatttttgggagttatagtgttgagtttcagggtcccttttagactggaaaagtcttctgccataatcgtcagatttacctaaatgatgtaaaaaatggtttggaaaactctaaaacattaaataaagatcacataacattaattaataaaaaatgatataatacacaaacattaagtaagaattatagaaagttgaggcaccagtttgtatgcaggattcttcctcctaagatgtggaaagctaattagttttaaaccataatccacctcaatatatatgaattaaagtgcatagatgtggcaacaacgttgaagataaacatctatttgtacagcaaacgcaggcttcccaaagcggcatggtcagttcgagctcgccctggggatgccgccgctctgcccatcgcagacgccgtggagcatcgacggcgacgtcgcaggacatgaggtcgcctaccagctggtgacccgaaacacccaggcggcccgccgccacgtcgagataacggccctgacggtgccgacattttggggcagcgggcattgcccggagccgctcgtcatcctaagaaagggcagcacggtggcctgctagtacgtgacgggatctggcagcgcagggaacggagggacagacggcaagagcatgcaccacatcgacgtgaacatggagtgagcgagccaacggagaaatggcgatgggaatggaggtgcagctggtgggagcagttggcacgccgatgaccggacgaagcaagtgaggcaagggatggacgtcgcacttcaatacgtgcctggcggcaccgacattccgatgcagcggctacccccggagccactcgtcgtccatgaaaagggcgacgaactggcctggcaagatctggcggcgcggggatcgaatggacggacgacaagagcgagcgaagaagtcctggcggcttggtgagaaaatggtggcgctgggggcgatgggaacggaggtgcggatggtggcagcagtggagtgagcgagcgtggcctggtttcttcttgaggaaatggcattgcagaggcgatgggaatggagatgcgaatggggggaggagttgccgtgccgacggccgaccgcgatttttttgggaagaatcgtgagaagggataacacacagagagaaaaatgagtgttaccttcgcgttacaggaatgaagcgacggcgacgtcgagactgattgtcgtcgtccgcggccatggggcggagcaccttccggagaagtcgagacttatacgattaaaaaaggtaggcgaagagtcggcgcagcatttcacacgcagtagtgactgacacctggatggttggattagtggcacggacaaacgatcttacggctacggaaatttggacgatgtgtccaccttcgtttgcgagcagcggaccctggtttgatatattaaaaaaaggcagccgaagagtcggcgcagcatttcacacgcagtagtgagtgacacctggatggttggattagtggcacggacaaacgatcttacggctacggaaatttggacgacgtgtccaccctcgtttgcgagtagcggaccctggtttaatatatagaaatagtgttgagttctcaacactgtatactcctgaaagtgacacgggcccatggaatgtgacactatcgttcagaactcatgaaagtgacacgttgttcggtgtgaaagtgttgatttagggtttagtgtaaccgcccgttcggtgtggaagtgttcaaatttctctacgcgcgttcggtagcctcaccgacggcgacggcgacctcacctcaccgacggcgacggcctcggcgacggcgacaacgatccccaattctcttcgcgacctgaccgtctccacttcggggtgaagaagaaagccaacatgccacaggggaagagtaagaagaacgtggtgaaggagaaagccaaaaagattaagaagaacgcggaatcgagagccaaagttcatgaaaatacagatcaaattgagatcaacattagagaaggtgtttcaatttggataacaaaggctgcagtgcaaaaatgttttgagtttccccctggtacagataagaagctgccaatagatccaactacaaaaacatttgattcactctacagagtattgagtgtttcagaaaaaaaaatcaatgtaaagaagaagaagatgaaggagaatatgaaggagaagcaggttgaggaggagaagattgagatgaacatggaggagaagaagcagaatctggttgaggatgaaggtagtcaacaggaggaaagtgaagaggaggacggtgaagatggggaaattggagaggaggaaggtgaagatggggcaattggagatgctaaagtggggggagatggagacaaggaaagtgctaaaaggggggggataaaggttgctgtcagaagaaatgttttgactcctttgaacatcaatttgatgttacagaacatcaacaacgatgagattctcaaacttcttgttaaaagaaatgaagacactgatggtacagaaccgaatcttgacattgacctgattgtcagatgtttctttgcggtggtgttggacagactgttgttgccacaagccaccttttatctgagctcagctacattgaaagcagtgactgatctagacagactgaaaacagttgactggtcaattttattttcgaaaatttgaagagcagtgttgctgagtttggcaaggataagaagaaactgatatcagggtgtacaactgtgctaatggttgttttcttggaccatctcgtggaaaaccctttggatcctttgaccatccctaggatcaacttgtatacttcagattttatcgcagacctgataatggtacccaaggatagccctggccctgaaaaaaagcgtcgtaagactcaagatgaaaaagaagactagtaatgttataaagaatctcgctactctcaattttaagaattcggaggatacatgctatcatgaagattcagaaatggtgccaagtccagggagagcatcgccgattgtttgctacctacaggtcatatgcacacagatgtattttatttacaatgccaactgttgtcaaaggattggaaggataaagtaattcttagctggaaagctactcaagaactgattcatcaagatattggagttaaggagctggacaaggaacttactgcagaggttatgaacaaagtggatctggtttgtgctttgttttatattacagtagagttttttcagattgacagtagagtttgtgctttttttagatatttattcctatcattcatgccggtcactggtcccttgttattctttccactgccaaacaagagacatatatccttgactcctacccaaggcacagtggggtggccaaggatgttttaactcaactgcagaagtatttggataataaacacaactttgacatgtctaactacactgaccatgtgccacctgttcagcatcaaaaaaacaattacgattgtggctttcatgttttattgtatattgaagaattcatgaaggagaagatgtataaaatcaacaaaaaaatggtgttgaaattcagaaagcagctttgcatgaatctcttgtaccatcctttgaacagaataaatcttgtggaattcagaaagaagctgggtattacattgaaaagaaaacttcctggtatacttgatcttactattgaaggtgagaggagtgaatctgaggctgcagtgataattgaaatagagaacagagatgataagactctagaggatgaacatatttcagttgagaaagagtaaggtaaaaaagaagagcatgtactatcaactgacacaaagaatgacgaagcttcatccccatctgacgaagagcctgagcagagtgagtcatctgagcagactgtgtatgaaagatggatgattccaaaggatcattatcacctgagaaagagcaagctggagaaaaatatcctcaaacgaaaaaagaggttgggcaaagacaacatgtcctctcaggatatgatttctccagtgtttggcaagaggcttgtgcctgcaaacacacattttacctctcttaggaagttgcgaaaacacaagtttacgtctgataagatcaacgatgagatctgcaaacatatcttgaactacaatgaacgggagttgttaagtgtggggcagactaccatgactgggggtcagctggaaaagtacgtaaatgaaggtgacaatggtgataaaatactcagagcattcatcacatgcttcacttgtgatgaaaagttcaatcaagggaacatcacaaccgtcatcccgccacatgaagtatccgaagagggtgaactctccaaagttgatgctgcacaacttgtagaagaaatcaaagctgtactcaaaggcaccaatgttgcacgtgtacgcaaagacaccgaatccaccaaagatcccaaagtgaaagtctttcgaaacatgaggaggacatttatattttttcctttctacaagaatgaagaattgtttgtatttcatgtcgatacgaaaagactacccatcattgatgctctgttttgcaagatgtcatcattgtcgtttgaagatagatcctgactaggaaagtctatcatgggctgtctactcaaagccatgaaggattccggcttcatggtgaaaaaatatggtgattgtaggttcacagttactgtaactgaactcgaattcaaagatagtgcctcagcgctcataagttttattgagaacttcacttctaagttggacgacaatgccaagaaactgaaaaagggtgacaaggactggctggaaccttacaagaagtcgacagtggcataccttgtttgtcacactgaaaataaggtggtgttgcctgacgatattgtgaagtacaagcaaaacaagtgaggtggttgagtcgttaatgggtccagtggctgtgttttaagacttgtatcacactacttgtatggctttattctctgaagctgttccattgttgccgttagtaacaggtgttgcttttgtctctgctcagtgggtgattcatttcatccagagttgctgcaactttaatcagtctatagtgttgggttcctagctcagtgttgagttctaaatgatcgtgttgtgttcctaccaagtgttgagctgcacgacggcgtgcgcagccgcagccgcaccggcgaggagcgtttagaactctgttgatctacatagtgtttacaccggctcaacagagttctcatgttgatttttgaaggacccacgtgttgggttcctgctcagtgttgagttctgaacgatagtgttatgttccatgggcccttgttgatttcgagaggacccacgggccgaacggcgtgtcactttcatgcgtctatagtgttgggttcctgtctagtgttgagttctcaactatggtgttgtgttcctccaagaagttgagtttcaggggcctattatattgtctcagttaatgggtaactcagttaatcctatatattgtgtcagttaatgggaactcagttaatggtatatgttgtctcagttaatgggtaactcagttaatccagcatatcattgatgag

SEQ ID NO: 33988 - DNA, 1241 bp, Zea Mays
ctcccagcctcgccctcccaccgtcccacgttgttcctcccgaccctcgccgtccctcccgccgcgacccgccctcctcctcccgaccacgccgcccagcccgtgtaccactccctcccagcctcgccctcccacgccgtccctcccgccgtgacccttcctcctcctcccgacctcgccgcctagcccgtgtcgccgccgtcgcccgtgccactctgctgctgcgaccacgacaatggggatgtggaaggtggtgtgcgtcaccgacgcatcagcgtacatcgcgtcctggatcgtcaggctcctcctcgaccgtggctacaccgtccgcgccaccgtgcgagacacagagaggagtcaccaagccaattgtactctctataggcttctttcctctccccggaagataaaggattgtagctgtcttttcttaatagaatggagaaagatctgtactgtgagtatttgtgtacgttgttggtcgatggctcaaatcgtctgaccaaatcttttattcagcgagaatggcaagcaaaatatatttgatcttttgtgttgtgtttttagacatgtgtggattctcacagttcatttggttgcatttttacttgcctttaaacctgatccctgatgctggtcgtcaaatactcagcttgttggctgcaatctgtgtttatcttggtatatccttgaaagttgatagtacagaaccaaagcatattaaggcatactgctattatttatcattcatgtttcaaacacacttgatactgcatatctctacagtttgtttacatgctcagatgttgaactcgatctattccttgccatatttatttatgattgacaaaccaatattcattgaccatgacatcaatgttccctagagtaaatgcatcaaaagtcggaaggagtgatctttgagtagttctatttgttgctggtagtatactgaaagtttcgttagttctcatctctctgatgttttttctttcagttctccacaacctacattcacttaacaaggcactttttcttgagaataataaaaaatgtactcctttcagtgttgctatcatcataaagtgttgcttgtggacttcctttttgtaatattcgtctaatgttgatgagaatctaccggttggtgatgtgaatgaccaaataacattgctaaacactttgttaatgtaacatacatgactggtataggggatccacgagagagaaagcactgggcg

SEQ ID NO: 33989 - DNA, 1266 bp, Zea Mays
atctctggacccaaggccgatccaagcaagtttacataacttatccaccgcaaaaatatttactagtacagtacactagtccaaagcgaaagcgagagagagagaaagggggaaaagataaccagagaccaatacgccaagccctaaaataaaagcgaaggataggccctcgctctcgctcacatgtatcacatcacgaatgagacaatctcggacactctcacaccgtccaccgcctccactactccaccacatgttgactggagcgagctcaggccggtcgtcggcatccgttctccgcgcgggcgcgaacaaaaattcacttttttcccggtgatgctacagcacatgcgctgcttaacaacccggagctaatggcgattaacaagtgtctgtaccttgagcgccgccgaggatctggagggcattgacgaagcggcggtgcagctccggcgaccagcaccgccgcgccttgcggtgcgtctgcggcggtgccgcctgctgcccttccggcgcgttcggcgccggcttgacgttgacgaccccgctctggacggcgtctctccgcgagcccaggacgccaccgttgttgctgccggcggcggcatcaaggtacggcttcctgtcagcgtcggccgcgtccttgtccgcgggcgcgagggcgagctccggcagcgccgcgccttctgccgcggacgcggtcttgtccttggcgaacgggaggaacgcgccgccgccgccgccgccgttgcgctgcccgtggccggcgcccgcggcgccgtgcgcgcactccgcgctctccttgggcgtctgcggccccctggcggccacgtccgccgttgccgcgggcccgttccagagctgcgccgactccatccagctcgccttctccgacgtcgggttccccatcttgtcggcggcggcgtcgatcccgatgttcttgagcggcatgaactcctccagcaccagcggcctcgccggcgcgccctgcaggctccccatctggtacgcctccagctgctgccggtacgactccatggcgtggttgaggagctgcatgcagagggggagctcgcgcttgaaggcgtcgatcttgagccgctcctcctccaggcgcgcgaggaactcccggagcttctgcgtcgtctgctccgccgccgtcagatggtggtggtggtggtgtccgtccaccacgagcgtctcctgcggcggcttcggggtcgtcactgcgtacgcggcgccgttgccgttgggcttgtagtctag

SEQ ID NO: 33990 - DNA, 3992 bp, Zea Mays
ccagcctcccatggaaggaaggggtcaacgagcccaactcgtgcgagtccagcctcctaaagctcggctcgggtcgtcttgccttgccttgcctgccgtgagagtttcggcctccaactaacccttccccgccagccatcgccactcgcccgcgacctcggccccgtccactgacaagcaccacaagtgaattctgcagtagctcctccctctccaagcttcaaccaccaccgccaaccgcgcgccgtgacctgcgtgggatcccgagcccattttcctcgcgccttcgtcgacgccctcaacgcaatgccggtcctgagcatcgatcctttgggcttgggcgcggaacaaggagccgccgtcccggaagcagcgcactcaggctgttcgatgaaataccaccgttgaatcggatcctcccttgggcgacaagggaggctgtcctgactcctgaggccaacgttgatgctttccaggcatgtaaccacttccatgatatgtggtctcatggcagggttattgttcacacatttgcaagcaagcccaagcaccttaagcatttgctcttcatgccctgtgccgcagagtgttggatctaggacatcaaccagctttccctgagagctcatctccagcacccatgggacaagttcttttgatgttgtcaggaccggaacaggtcgcaagcctgtgagcagctcaagaaggacaactccgaagctgtatatatcacctctcagagtggccacccatccgtgcgcatactcaggggggatgtaacctagagtgccaaccaactctgttgtaacatgggttttgttgggaaggatcaaccttgacagtccaaagtctgcaacgtaagcttttaattctttgtctagcaggatgttgctgcatttgatgtcacggtgcacaatctgaggtttgcagtcattatggatgtaagaaaggccacggcttgctccttgcgcaatccttagcctcgtcggccagtcaagaaatgtgctggcatcatcatccctgttgtgaagccaatcatctaggctgccattctccatgtaggagtatatgaggaatctcgagttcccctggatgcagtacccccacagtggcacaagatggtcgtgctgtgccatggacagtgcttcaacctctgcagtgaactccctttccatcaagcacatttcatcattgagcttcttgatagcaagcttgcagccatcaggtagttcagccttatagactagaccataaccaccacacccaatgatgttttccttgttgaagttatttgtggcttttacaatgtcagagaacgtgagcttgttttcatttccctttccttgtggcaccatgatcactccatgctccaagctggagttgaatgtgcttgtttcaagatatccgttgtcctcccttctaccttgggccgttaaacggtttatcctgatggagacaaggagacgccacagcaacaaaagaatggcaatcattgcaaagaacacaccaaatgcaattgcgagaatggccttcttatttcttcctcctgtggataccagaggcacatcggctgaatcgcatcgacgaccgatcataaagccgcacagcttcggattccctagaaagctggagttctgaaatgtaccaaattggccaccggttggaataggcccttccaggtcattgttagaaacgttgaatgtggaaaggaagtgcagattctccaatgcaactgggattttacccgtgagatcattgctggataaatcaagcaccagcaggtttgtgagattgcagatagatgtggggatcggtccggttaagctgttggagctgatatcaagtgaaaggaggcctttcaactgaccaatctctgggggaatctgacctgtgaatctgttgctgcttagatttagaactttaggaaaagcaatcggtatgcggtactgacgtgatggaccatcatagactggcagatcgaaaacgcttgcgtccaaatgagctgcagtcctctctgaagttagcattggtatactcactacttctttcggaatttcccctgtaaggctgttgtttgatatgtctaagtagaaaaggtactccagtgtgtggatccaggttggtatgggtccactgagtcgattgccatctaagaacaacatctccagatttactaacttcgatatccagagaggtatttctcctgacaggaggcagtttccgatgtccagaacctgaagattctcaaaaccgtagatcacggcatcatccggtatggtttcttcaaagaaattgattccaagaagaagcgtggtcaggttcttggagctcctcagtatctgaagcgcgtttgttatatttgaaaggctgttgtttgtaagcgacaggaacgagagggacttcaggttgcctagcccttctgataactgtccatggaacttattcgaagctagccgcagcgcagtcaggtttctacaggagtatatgctctccggaatcgtgccactgaagttattcagcatgagatctatggttcttagactgggcatgttgctgaaatcaacccgggagagttcgccactgaaaccgttgctcctaaggtctagagttatgagatccgtgcagttgctcagggctggtggcagctccccatacatgctgttatagtccagatgaagttcttgcaatctcttgagctgacctatggtatcaggtatcttgccgccgaaactgttgtctcctaggtcaaggacgaccagattggagagcttggctacatgtgcgccatcgactgttccatgcaaaaagttgctggagaaggagaggcgttccagcgatgtagcgttgaaaagctcacgggggagagtcccgctgaggttgttgtggccagccctgagtactctgagcatggagcagttcccaagccctgggggcacgccgccactgaacttgttgtagctgagttcgagcacggcgaaggacggcgctgtggcacagaactggtccgggatctgcccggtcaagctgttgttgctggcgttcagcgcgaccagactccgcatcctctcccacgccgtggacgtgagctgccccgtgaacgagttgctcgagatgttgagtacctcagtcggtgcctcgccagagcccggtgaggccggcgtcgtaagagagctccgcgaggaactggagcagggacgccctctccggctccccgcaggcgctggcgcaggactcccaggagatggagatgagcagcagcgcaagggcgagggcgcgaggccggtggaaggagatttgacttcatatacggcgtgccgttttaccagcgtgggttgacagggaaaagttgcgtgtccggtgttttccaaagaagctgaatgccttcaggattttcaattgaagtcaaattgcagaggaacctgccgggagagcatagcagggtggctccgggactctctgctacctgcagccaggcagacatggagattggggtggaagcacgggacgacaggaggacgcagaagaagccacggggacccacggcaacggcatgcgcgtgtacgtccaaccccatgcgatcggtctcggtcagcgcgctctcttcgttgcacttgcacgactggatgaaaggatgcgcgtggagtggacaacgacggccttcccgtccaaccttacccatgcgtcggtctcggtcagcgcgctcacgggcactgcacgactggatctaacgtggaggtgtggccacacacacacctgcctagcccttgattcacaccggcctcctatgagtttttttattctttaatccattttaaacatactttttttggaaaccaatctctattaagataaactatcgcccacatgtttcagtcaaggcatccatacagagctactcattacttctatgcgaccgtttttaatgtaaacagttgttcatggtcattttattttatttttactattgcttgatatgtcttattaaattgctg

SEQ ID NO: 33991 - DNA, 343 bp, Zea Mays
gcaccagtgcggagtgggatcctaaggcgcaatatcaatgggaagagagggaggggaagaccgaagttgacatgtgaagaggcagcaaaaggagacttcaaaggatggttccatccatcttgcatggctatgaccattgaacaggccaaaaaactagatcactttgtttgctcagactgtttgaaagaaaatggttcaaagagactttcaaatgtatatgccacttcatcaaattcttagcccaaggatgaatcaataaggcagacgaggtgaaaactgagtgccaacatccaggggagatgtgctgcttctgtggcgaatcagcccttgcactggcgagagc

SEQ ID NO: 33992 - DNA, 2285 bp, Zea Mays
actcgctcctcgagcctcctgcctgccatcaacgccagatcctagcccgccattaatgccgttaacccgagctcgagatcggaggcggcggccccgtgttcgcgccaggagtggccaccgtacgtgtgacacgcgccgccgccgtttataaaagcacaccgccgctcgctcgctcgctcgcccgcccgcccgccactactcactcggctcgggttctgctctgcacctcagtacctcacactgtcaccgcgcttctgtgacctgacgaccttcggcggcaggatgctcacgtgcatcgcgtgctccaagcagcagttcgccggcggcggcccgccgctgcacgaaccgccggaggacgacgatgtagttgacggaggaggcggcggcacggcgacgcccagaacacggcacgccatcaaggcgctgactgcccagatcaaggacatggcgctcaaggcgtcgggcgcgtacaggcactgcaagccctgcgcaggctcctcggcggcggcctcgcggcggcaccacccgtaccaccaccgcggcggcagcgccttcgggggctccgacgccggctcggcctccgaccgcttccactacgcgtaccgtcgcgcgggcagttcggcggacgccacgacgtccatgagcgtgcgcacggacttccctgccggcgacggggaggacgacgaggtggcgtcagaagccgctggcggatgcggtggcaaggacgacgacgccaaggagtgggtggcgcaggtggagcccggcgtgctcattaccttcgtctcactggcgcaaggtggcaacgatctaaaacgtattcggttcagccgtgagatattcaacaaatggcaagcacaaaggtggtgggctgaaaattatgacagaattatggaactttacaatgtgcagaggtttaaccaaactgtccctctagtcccgactaccccaaaatctgaagacgagagctccaaggacgacagcccagtaacaccaccactggacaaggaacggctgcctcgcactttccacagacaaggtggtgcagcgaccaacttttttgcattttagcccttatggggtttcttttgcacaattatgccctttgtagtttcatttcaaaaaatggacccttacctcggcgccgtcatcattggcgccgaggtaacacatagtggcgccaatggtactggcgtcgatgtgtgttatctcggcgccaatgatgatggcgccgaggttggggtccatttttttaaatgaaactgtaaagggcatagttgtgcaaaaaaaacccaaaaagggctaaaatccaaaaaagttgggtgcagcgatgggctactcgtcatcagattctctcgagcatcactcaaaccgctactgtactggcctcctgcaccagcatggacaccaatgctgtgattcaatgggcctggcatcaacaccgaagttgtcaagtatcagtggggccaagacagaaacctcatccatggacgcatcgatgaggacaagctcgtcacctgaagaggtcgacaggtctggtgagctcacggtgtccatcagcaatgcaagcgaccaggagagggagtgggtcgaggaagacgagcctggtgtatatatcacaatccgggctttacctggcgggaccagagagcttcgccgtgttcggttcagccgggagaagttcagcgagaggcatgccagactatggtgggaagagaaccgagcgaggatacacgaacaatacctctgagaagaaacgcccgagaccatcagcatcagaagcacagaaagctttccttcggttgagctgatggtacatctggcactaacacttctacatgcatttccagcttcattcaatgttttgatgaccgaagaggcgaaggggtcccgtttccggcattttacattctttcagtccttttgccgttttctcgtcagttttgaactggaaatgcgtgagcgactcatttagctcaaaaaggtctctcgttttgggggtggggtaatgtacgtctttcactgctgagcctgtagtttccactttccggcaaccaaaaggtctctcgtttttcatcaataatactacatatctacctgttgtttcccataggacaaaatagcatgtttgtgtcgttgggcactattttgctgttgtcactgtcttattgtactactcttccagacagcacaattatcaacacacaagttggtactgagtgcgccccaactcaaaaccactttgtgacgggttgattgtatcattaacgatagttggacgcacaacg

SEQ ID NO: 33993 - DNA, 540 bp, Zea Mays
ggggaatctcgcgtgccggtcacgcaagaacccctccatggatctaggcattggttgagaatcttaacaaacccacctatataagccgagcccccccaccttgatcccatctatcgtgtagtcaaagaagcttgggctgagagcatcgaccggataacacagaaaagaaagtatttagagagagaaaacgagggaggcgagggctacccatgagccagtgcgatattggtgtggtcggacttgtcaccatcgatcgccgcgcgtgggtgtgcgttatccgtgcgggggagcccggaattgctcgcaatctttgggtttgaccatagggccacatcacggcgtggccgagctccttcacaaatcggcagcaggtaaagaacaggtatcacaggatgaggtgcatggaggatgttgtgacgagttcgtgaggggtctaggccgtcgtctcctagtcaactttgggttgctggatcgttgtctccttacgatgcaattatttatttattttgtacagaactcctattataaagtaaagatgtg

SEQ ID NO: 33994 - DNA, 1222 bp, Zea Mays
agcgagagcacaagaaccatcgccgccgggaccgtgacgctggacggcctgaagcggctgcggggaggggtgttaaacgggcctttcctgggctacggtggacagcccagttactaagttaaccctcgctcttcctttcccctcggttctcgttgtctgacaggcaaagcggctatgacgacaacggccgccgggtacggctgctgctgggcggggattccgcccttcgcgttgttgccgcggattctctcgacccgccgggagactcctcctcctcctcctcctcgcgcttcccttgtcgcctcctcctcgaagctcagggcgctggcaccacggctgagagtttcgaaccgtccaaggaggctcattgtctccgcttcctcctccggcgaggccaattcggacgcggcgccgtcgccaacggtcagcgctctctatctttcttctctatgatgtttccagattgtcagggtgaattgatttgggttatggatgtgctccgtgttgcctggaatcattcagtgaatgcgattatatagggaatgatttggattgggtagccaccagcaacggggaaacagtaattgcttgggcttttggaccactgtttattattaaccctgaaattggataactgacgagattcaactttaatgattcatatagtcagaatatttgtggttttctagcaccacacatctgctttgtccattgtatgactggcgtacgttgttcatttgaaattgctagttctttcctgagattgtactttgtgtgcatttcttgtaggtctttcgttgcttgtgtgtcttgcagattatggcattcagagaacatcactttttgtaaatttggcaggttgatcgcatacatatgtgagcatatgaaaaagaaatgatattatataattcagcggtttattgcatgaaagacaacataacagattgcttgctgattgaggaacaaactaggttcagaaatgaataacaagtgctcaactttgctggtagattgattactgaagcggcaaactgcacactagtttataggccggaatctccttaatgtacatgttattcgtgtgatgtttcaggaagccgctattgatataaagcttcctagaagaagcttgcttgttcaatttacatgcaacgcatgtggcgaaaggaccaagcgcttgataaacagagtagcctatgaaagaggcacagtttttcttcag

SEQ ID NO: 33995 - DNA, 383 bp, Zea Mays
ctagctcagactattttcgccacaaggagtcatggtgcagggagatctgctgtccgccgccatgactaggcatgcacacgctgtcgtacggacctggcaagggcagtagggtattcgctggtagtcggggatggtgcgcgttgcatcatcaggcaaagcgcgacgatctcggttgatgaattcctcaccgggatggagctccaccgcaggtctgtcgcgtgtcgtggccatggcattagcgctgctagaatcacagtgagcaacccttcaacagtatggtatcgttaccctctatgtgattactttctttgattggagttcgaacatggaagtcaagcttgtttagaggtcagccatggcgcctccatgggcactctgtgccg

SEQ ID NO: 33996 - DNA, 2336 bp, Zea Mays
gatcaacaagtcgcagcgcagtccaactgtccaagcaaggcacgtcggtccaagagcgacgctgccggcccggccgcgctgctcctccgagtccgagatctgaaggcgcgggaggaaggaaacgggcgaaaggatccagcagcaccccgcgcgcgcggcggttaacttgtcccaggtctcggcgtggcgcggcgcctccctcccggccctgccggtgagagcgcggtccgatgaggcggcggccgttcctggaccagcgacggccgtcgttcaagcgccggtggcagcagcggccgtggtgggtgcgcctcttgctctccctcctcctcgccctcgcatgcgtcctcctcctcgctgtcctcctcggctcccccgaccccgacacctcgccgtccacctccgccgcgtcctccggatccgaggccacctcctcccctctcctcagtcagagaacttacttggagggaatcacggatgcgctcaacatgactgacgaaatgctgagcgcaggctcgttctcgaggcagctgatggaccagatttatctagccaaaatgtatgtcgtcgttgccaaggaggcaaacaacctgcagtttgtggtggagcttagtgcccaggtacggcgggcacagagcatcctagcccacgctgcagcccatggtggcacggtgatggaacaggaagcagagaaggcgatcagggatatgtcggtgctgctcttccaggcacagcagcttcggtatgacatcagtatcacgatcatgaagttgaaaggccagattcagtccttagaggacaagtcgaaagctgaggcagagaagagcacaaaatatggccagattgccgctgaggagctcccgaagggactttactgccttggcgttcgattgaccatggaatggttcaagaatcctgaccttcagaggaagttttcagataggagcccagcagcgcagagcaatctaagggataacggcctttatcatttctgtgtcttctcagacaacatccttgctgtttcagttgttgttaattctacggctataaactcgaggcaccctgacaaggttgtttttcacctagtgactgatgatttgaactatgctccgatgaaggcgtggtttgccatgaataactacagaggggtcactgtggagatacaaaaggtggaggactttacctggctcaatgcatcgtatgttcccgttcttaaacagctacaaaacgctgctacccagaagttctatttctctggcagtggtaatcgtggaacaccaattaaattcaggaacccaaagtacttatcaatgcttaaccacttgaggttctacattccagaaatatatcctgaattgcagaaggtggtatttcttgatgatgatattgttgttcagaaggacttgtcagaattgttcactatcaacctcaatggtaatgtgatgggtgctgtagagacttgcatggagacattccacagatttcataagtatcttaaccattcccaccctctaatccgtgctcattttgaccctgatgcatgcggctgggcatttggtatgaacgtgcttgatctggttgaatggaggaacaagaatgtgacaggcatatatcattattggcaggagcgcaatgctgatcataccctatggaagcttgggtctttaccacctggacttcttgctttctatggcttggttgaagcattggatcccaaatggcatgttttgggacttggctacacaactgttgatcttgctactatcaaggaaggggcagtactgcactacaatggaaatatgaagccatggctcaaaataggaatggagaagtacaagagcttttgggataactatgtggactattcacatcctttgattcagcagtgcttcatgcgttgattgatgtgtatcgacattataaatttttgtaagctctgtggtagatatgttccaagcgcatgctccaactgccacacggaaacattgtaattaaatcagtgggcttcgctctcaagttataatctctgacaaaacatcagtggctgtctatagtatctgtatttgatgaaatacagcaatcacatatctccagagtccagccacagtaacaggtacagaaccattggtgctttcagatttgtcgagtaccacaaggcatggaatcgttggagttttcagatttgtctaccacggtttcagaagttgcattttcagtgtttgctcccactacaatgctctcatcattgtggctgctctctgatattgtagtattgttggaattatcttctactgtagcaggaatgggatcactggaattttcggatttgtcaagatcag

SEQ ID NO: 33997 - DNA, 380 bp, Zea Mays
caggtatcttcggaatcagggtacgggtatacaagagtatggtcaagacgaagcttgagtgggatggaaggcgatcatgacgaaggctaagataatcacgaagctatacgcagaaaagcttcggcatgacagcagaaaaggggaaccgacttaaagatgaaaagccaaattagacctcgaagaattactatagagttattgataaatgtaaagggcattaatgtaattttacacgggttgtgtcccgtgtctataaatagatgaacagtactcccgtactgttcacgctgacttggcattcgctctccgcattacgcctgtacctttactttccatcaatccgaaggtacatttataatttgttattgtggatatgataa

SEQ ID NO: 33998 - DNA, 1104 bp, Zea Mays
cttgacgaagatacaatgtcttagctctatgctcgagacagaggactagcatgaagcaggtaatcgatcggtacgactctcattccaagactctccagaggtccgaaccgcagtcgtctcaactgcagtcacatatggatgacggcacttgtgcaaggctaaaggaggaacttgctgaaacaagccttaagctcaggcagatgagaggagaggagctccagaggctgagcgtcgaacagctgcaggagctcgagaagaccctcgaatccggcctcggctctgtactcaaaaccaagagccaaaaaatccttgacgagatcagcggtctggaaagaaagagaacgcagctgatcgaggagaactcaaggctgaaggagcaactgcaggtgacacggatgtcgaggatggagacgcagcttggcgccgatccagagttcgtgtacgaggaagggcagtcgtctgaatccgtgacgaacacgtcctatccgcgcccgtccaccgacaccgacgactgctccgacacatcgctcaggctcggctccaagtgacggagatttgacatgtccggtagcggagcggtgccgattgcttgcccttctccactctagataggtctggattgggggagagcaagcactgctggatcgggaagacccaagtgaccaacgcgtcgcatcagaataaggcattttgagtgctgtatgatgtgtgtattctggctctgaaagtgagacctgcttttgttataatacatacatacaggcagcatggcaatacgtgacggggtatccgctgcctgcagtccgtgacctgtctgtcgtctctgtttctagtacccgtataatcaccctgcaattacctgcagctggtcatcgttaggagaaactccagtccatgcaaatgaactcccagcacttgtgctcttcgcgatgccacgtcgttctttgcagtaggaacttcgatgcgaatgtagcaatagcatacggagcagcaatggaggctaaaactgaagatgctccaagataaagagggcgttcttggcgtccacgggggagagactttaatggtgatgtaggttcaagccaaaggatggcttgttctagt

SEQ ID NO: 33999 - DNA, 255 bp, Zea Mays
tgagtcgattgaattgttattttaacagctgataactaagcaagtaaacaattatctaacatgaataatatgacgaaataatttaatatcaggctcggacagcacgtgatacatgtgaacgatgcgcggcaacatgcgcgaacagcgtgacgacgccgagcgcaacacacgagaatcacaaatagatatcgtgtttacactaaataagttttaaaaaaaacattagagtagacattaaccacattaacatgtatt

SEQ ID NO: 34000 - DNA, 271 bp, Zea Mays
ccgagcagtgccgtccctgggcatgtgcgacatgagcgacggcgcagggcctccaaattctataggcctccaaatatataggacgtacatatagatagacgcatatcacaaacctgtttgtctccaccgtccatgtatggtatcgtcgtatagccctgagtcctgataccctatcggccgccgccgctggccacatcgcaagcgatcgggcgtccgagcggcaagcgtgacgactgacgacaacagcgagcgaggcatttaggcactgaag

SEQ ID NO: 34001 - DNA, 916 bp, Zea Mays
tcaccctccacatcggcgccccagctgctagacctggcctccatgccaggattgttagcccctgctcccgtcgatacctcggtccttcgccatgggggagcccgctcccgccggtgcccgggtcggtcgccaagatccccgccctttgccctgcccgtcccttagctccagcccccgctcttgctagcaatagccctcgccccaaagccccactcgcttgcagtcacggaatggagagtattttcatcatgtccaagcatacgttttccagagcagcctcattggtgagatcatcagttgttttgagaagaagggcttcaatctcaagattctgaaaacagagtgttgctggtccatggaccatagtccatttctccaacacaacagccattgtctcagatagataaccttctacagacatcttatgatcaaggggacaaatgagatcatgccaactctactccatgtactgctggtgtcacaggattaatatacaatgaagatgttgattcttcttggagttgcacgaatgaaccttgtgattgtgattagttacttcaaagcatttttttggtcttaatgcatggatgggagagtgtcggatgcttcttcagatactatttcttggtccgtcaaatctgcttgacccaaatgaaagtttttctcaaatgtggcaaaaataattgtctcatcaattgtcagcgcgcctgcttccagcaaagtttcagagaagatggaatgtaacacaatttttggtggccgcataagtgtggagacttgattcatatatacttagttaggctcatattagtgcaaacagctgatacagttttcattagtatttagtatggcttagagtacacttatgtatgagttatttgacatgtttattatgagaatattgatggtacttatt

SEQ ID NO: 34002 - DNA, 5917 bp, Zea Mays
ttattccataagttccaagagtctgtatggggaaggcaagaaagaaaatacaaaaggaaaaaaaaaaatagtcgtcttcttcctcgtgaaggacggtctaggtgagattgtcctcttgtcgagatcctcacgtcccggtcctcaccaccggtggcgacggggtgtgacagttggtaccagagacggtgtatcctcggcgtggggggcgacggacggccaccagctcttctctgcgctagctatcggggtggcgacgacgattgttggcgcgtcgacggcggatccagcggtccggcgtggtgacctcattgatccggcgcgacctacctccttcagctaacggtggcgctccagcggcccttggctcgagttccgttttgttccgcgatggcttccctttcccccggcaactccttcatcgaggcggtgtcgacggcggtggttgcggcggatttggcggtgctgggctgacgggaggtctcgatttggcggtgctggtggcggcgactccatcaagttgcctgtgtgctccctcaactttcttcctcagatccccttcggcaggcggcgtgcccacgacgccactgtttgggatatctggtgacgagtgctctcagtcacggcactggtgacgggttccctttctctgagactccaaccactggcggcaacacgggatttggtgcgtgtgtgcggcagctacgggagattgtggagctcgagtggctctgcatcccgctcgtagcgctcagatcgtgattggctgctttcatcctctacaatcactagttgagcagattttgggtgagcgcggtgttaatttgttgatgctaaggcaagccagtaacctggcacacaacatgttcgatgatatgtcatttacagaggtggtctgggatgatgaaggggcactattcgatgaaatgcattgcacggatgtcatctgggatgaggagacacatcatggctttgactcacatggcctattgcagcaccatgctgaagcaatggataaccagatgcagggcaaggagaaattggctcaaagtggagattactatgatgagaggaaagtcaatattgaaccagacatcaacaacttgctcattcatgtcaatgaccatttctctatgttggtgattggtgcggattctaggcgaagtgatgttgtgtgggacgaggacatgttatctgacctcgatactcatggtggcttattacagttactggcatgttgtaaagatgatgagctcaaccaggacagagacactccttttctcttgggccttggtatggatcaggtggatgagatgctggccagcccgtccagccttggcatgaatgaggacttgccatctgtacctgagacacatggctcgttattgcagcaagtggcatgggacaggaagcactttgcttatgaaatgtgcacgcttattgctgagatggtcctggaagatgttctcaccgatgttggcaacctcgctttcagcattgattcaagcatgcagatcagtgatcaaccttccaaatatgcgctagtcatcgatgcttatctgctgaagacgcagtacaaaaaaccatacatttctataagccaatgggatccaggaatttggtgcaaaggtactatggcccatgagcagcaacagcttgagatatataggatgtttgagaaacaatgggattcagttatccttaaatggttcaggaatccttttgtgctgctgcaatcatgcaatggggaggatctgaatgaacaaggcacagtgcctgtaaatgacattttcgatgtattggctgctggccaggagttgaattttggcaacgtcaccttgatcatttatgggggatgccaaggagcaatgggtctgcaggttctttttgcagaattacacccttggcaccacaatgtctttacctccatagaattagcaatacagtcatggagaatcaatggtttcagtccaggaagctgcaagctcaacagacaatctatacttgttgctactaacttgcagttcaattataaagcttccaagtttgtatcctttactgatacttatcagatatacaagaacacatgcatttgtatcggagaattggaacctgctagttggagagatacttgttggctacctgagatctcacatgccaatgtgtccacacttgctagtgaggaaatagataacatgcttttccaggttggtgattttcatccaggagagagtgagcagcttgagctttacatgataacattgatacagtgggatctaggtccagtagaattttacaaatcaaactgtaggtgccctgctgcagaactgatagggtggtgctgattctagtttgttcatacaatctgtttatgttatgctgaaagctagtttcttctttatcatgaggtactacttggcccaacagtcatggaatttctgggatctttagtcaccaagatacaattcatggtcatgcggttgtttggggacaagcaaccatttgtgggggtggaaaggatatatggcaacacaggttaaagtcgtgttttaaaatggaaatgcatgctacagtcctgggtgtcaatgatgtattgcagcatatcagtgcttgttctctattcctgcagcttggtcgcagaaaactatatagggtggtgatgacttctgttctaaggcccagagatttgctgctgaagagctatacaacattcttgaccaagtcgatgaactattgttgcttcctgaccaaaagctcgggagaccatggtgtgacactgatctaatatgtgaaccgattctgtcttggagactcaatggtggcagcccaagcaaatgtttgttgcaactcaagacatacatagtcagacagtgggatccaggaatttctgggatctttagtcatcgagatacaattcaaggtcatgcggttgcttggggacaagcaacattttgtgagggtggaaatgtaacatccatgaatagcaacatgtccagggctttagctgacaagcgggccacccacccatgggacccaggtggaagaccagatgctgggtataagttccaagagtctgtatgggggaaggcaagaaagaaaatacaaaaaaatagtcgtcttcttcctcgtgaaggacggtctaggtgagattgtcctcttgtcgagatcctcacgtcccggtcctcaccacgggtggccacggggtgtgacatgatactaggagatgtaacggagcaaagaattctgagaggagccaaagatgaggataagggatactgaagatcctcgtcgagctggacaaggatctcaagtctgctctgtgcgatttggaagacgtcctggatgttattgaatatcgctgaatcgagaagaaagtcatcggtggtgacaaaaagttgatcagcactactatttgcatctgggcgctgcaagctattggcgattggatcacctactggaagcgtagctcgttcgggcaaaagctgttgcagtgcgcgcgcccagaaccagtatcagaagctcagggaccttggagagaagctgcagaagtgcgctcaggatctggatctgaagttttgggaccttgtagctaagctacagcagtgcgcccagaacctgaatcacatgttctgggactttcaagctaagttcttgcagtgcacccaaagcctgccactgtatatccatcagggagcagctgggcaaccaccaatgcggcaatgcctgattcacccgccgcaagatccactgcagaattcagggatgacattgaacaaggaccatcgacgcctgatgatgcaccctcgaatccaccgtcgcctaatgccctcccgaatgctgctggctccaccactggcaatcaacacggatcagctgaggaggcaccgacgcctgatgcaccctcgaattccctggtgcagatgatctgcgactgattggtctatgggtttacagcactccgttctttttatttggctgcgcgtcatcttcgggactggtcatatgaaccgattggcatcaaagaatgatggtggtactgcaacagattgggaccttcctactaatgagataatcagcttgaggaaaaggataaagaacatagaatatattgtcagtgagacaaataaatcacctctgtcgaaacatagtagcagcagcacaaagaatgaaattgatgacaaggaaagcagcagcaccaagaacagcggcaatgtaaggagcaccaaacagaaggaaattgactacgtatacagaagcattgaaaagaaagttaaagttttcggtcgagacaaggtccatgaagatataaggtgcttcataatggaccggctaccgatgcaccaagctccgactccagtaaaccttattctgtgattggcatatatggaattacaggttctgggaagactactctggcacaatatgtttgtgagtatgagaagggtgaggtttcaatcctatcatgttcatccatgtgggaactacattcagtgccggtgaaatattttgtgatatgctggaccagatcacgcaacagcggccctctgatgccaacggtcctaaaagcctaaaaacagagttaaaagatctaacactacagcaaacgccaaaatatacagctactcttgttgactgtccaaattcaaaatacacagcttataagcaaggctgtatatgtttgctactaactcatacctataggcagctaagaccggtgttatgccaagtgacattgaagtgtacatagctgaccataagggaccagacccttccaaacctgaggagttgtgcagtcaggcttgcacagatcggctggcagaatatggtcaagaaatggtgaggcgccatgaaaaggactacgaccggagaaaagcaccaatcgatcccatggtggtgtatgctactggaggcagaaagagtcatgggcggtactccatgtttaatggagtgattgactccagagaggttagatctcagaggtcggggtcttcctccgaacgatcaggggctagaactcatcgccaatcagagcatgagttggaggttgcaagggtgcaagaggagataaggcaacgtgatgcattccaaaggcacaacatgagtactttgcctcattcttggcgcagcagcagaccgtgcttcaagcaactttccaacagcaggggataaacgtagtccttccacaatttcaacctccaccactgccaccaatatggggatcgggtacccaataccttctgcaagtcaaggatcggcggcacaagggccccagatttaccatactccacctgcatagatactagcacctggagaccagttctacggccgatgctggaactacatttgtaaatgcaatcttcggtccaccctctggaggcagcggccaaaactccaatcatctgagaggtggcttgtcacactcggatttaagggcaaactcgggcgcatctcaaatgtgtgctaggatcaagtctcacacatatgatggctcatggtacagaaatcaatgtcatatctttattaaataatcggagtttttttacaaaataactaaatacaatacaccatatggcgacgagatcctccaccaacaaagttgactgggagacgacggcatagatctctccgaactcatcgtaacatccttcatgctctttatcttgcagtacctgtctttgacctggtgtgattatagcaagggtgagctcccatacggtcatcgctcagcaagtgtgggaaataatgtgtatgagctcacttacggtgggagctcatgtgtagtgtaaggctgatcaacaaataatggttaaggctgagcattgcttttaataagttggtcaaaattttattagcaattactaagtataagtaaataccatcccaattaaataattgatcataaatagaataaatttccacg

SEQ ID NO: 34003 - DNA, 1661 bp, Zea Mays
aattatttaaaaacacaaagaagtggttgcatgcaccggggcttgcctttgttgcaatgaagtggttctagatccctctatccaatacccagttagatggcttcatccacttgaggagcaggcattggagtagacttctttaaataccacctcgtctaggtgttctacaagtcaattacaaatgcatgaatgcttatctaatgacatgtaatgcaaactctcacaaggagaggtggggaacagaaacactacaactaaagcacatgacaagaatgcacctatttcttaacgctcgattaaagtgaccaatttgaattcacttagataaaccagggaactaatccaacttatatctcatccaaaaccttaaaacttcttaagcaactttatctcttccctagataaacttatctcctttccaaagcactaacccacactgaactgctattacagctaactgaataaaattcagtcagagtcaatctggcagtccagttttggacagctgttatttcctactttatgtggattcaagcctaacttgcttaaagggatttgttccttataacatggtctttcactttgctataacattcctaccccaattcttcttggattaattaccacaaggacccaaattgaataaaaacacacaaattcagacttaaatattattctaagtctgaatcctaacacctgacagtccaccttttggccacttttacttccaaatttatgtggaaccaagtccacctcactttataaaacttgctctctttactatggtctccagctttgctatggaaactttaatccaataccccatgaatcagtcacaaatgaattccaaactaggcatcctgctgcaattcagttttcagaaatgaataaaaattctgttatgtgtccagccagacagacaaactttagccaacccttttctccaatttttacaaagcaacagaccaaactcacataaccaaagttattccttagatatagctctactactttggtatagtacccctaggttgaaaacattcagaacaatttttatgaagcaccaaaatagagctcaacacactagaacctagtttcagccttctgcactaagtctgggatccaaaaatccaacagcctatttttttgagcgaattttacacctagttcccagcaacagacagtggtagagtacaagtagtaaatggtgtgagcttcactgacctaaggagaacacgaaacttgcactgtacagctggggaatcgcttgtgattgcttgaccgcggcgaggtgggcacttggatgaccctggtcaccacacaggaggttgacactcagctcaggaacaacttaactctacagtaagggagaggactaacactggctggaacaccagaacaacttcacccttgcagtggttattggttagagctcgatgggcaaggagtattctttactggaccatgccctataaatacttgaatatggggcaaggtgttcctgacatgtttgacatgcagctaaggtgtcctcgcatggtgccagcaacatatcagctagcctacgtggctcacatgccctcatacaacaccagcacccagccctaatttaaacattgaacctggtcaactagcacacaaatatcccttgtggatatgct

SEQ ID NO: 34004 - DNA, 148 bp, Zea Mays
accctgcacttcgtctagacagtcgagaagttgctgctgcctctgtcgactctgtgaggtgccctgaaaaagcccactgctcgagctgtcctcgctggccgcgctgcccccactcctcctcgatctcctatgcttgaacatgttcaac

SEQ ID NO: 34005 - DNA, 2714 bp, Zea Mays
atggtggtcattcagggtggaattggtcctgctggcttatccgctgaggaccttcatgttcttgatcttaaacaacaacgaccgcgatggcatagagtggtggttcaaggtcctggtccatggaaaacgacccctggcagatgtatggcccttgatactacggccaagccatatgaatggagaaaacttgaaccggaaggtgaagggccaccaccatgcatggagatggagacggaggtgagtgcgcgggacgttatggccatgaaggatcacatagatctcgaggcctcgcagtcgcagcagcccaggaagctaccgcccaaggacctcaaggagatcgccgggagcttttggcttgtcgcctcgatgttcagcaagaagtggcagaattggaggggcaagcaatacaactttggagaatgcaagttgtgtttctgcctctcagccagtgtagctatatctgatttaaatcatactctgttacagggttccacaaatgttggaaaatctgcatttatcagtgcaatgctaagaacaatggcgtacaaggacccggtggcagcgacagctcaaaaatacaagccaatacaatctgttgttcctggaacaacccttggccctattcaaattgaatcatttttaggcggagggtggcatctggcatgtgaaccagttgagccagtccgccgaggcagcgccgcagcggtcccggaccagaggatgctggccgccgtcgcgtccagaacccgcaacaaatcggccaccaccgtcctctcccttgctatgccattcctcctctccgccgccagcgccagcaccaccaccaaccctcatcctctctccccgttccctcgcagccagaacaatagccgcgtccaccgcctgcaacttccggcacgccgcctccccagcttccccgcggttgctccgggcgcttcctttgctcccctcccgcagaggctaggcatggcgtcgctggcggcgtcagcggccgccgcggcggaggtgacgcacctcacgcagcgcgacgcggcggagatcgacgagcagctcatgggcccgctcgggttcagcgtcgaccagctcatggaacttgctggattgagcgttgcggcagcccttgcggaggtttacaagttgaatgaacatgcaagggtacttgttatctgtggcccaggaaataatggtggtgatggtctggtagctgctcgtcatctttatcactttggatataggccatctatttgctacccaaaacgcacacccaaacctctatattctggtctcgttactcagcttgaatcactgtcgatcccattcatacctgtcgaagacctacctaacgaattaccacgggagtttgatgttattgttgatgcaatgtttggtttctcatttcatggaacacccagaccaccctttgatcatcttatccaaatgcttgtttcattgagtgatattcaaaatccagataagcgcccagcaattgtttctattgatatcccttctggatggcatgttgaagagggagatgtcgatggaggcattaaacctgatatgctggtgtcattgactgcacctaagctctgtgcaaaaaagttcactggcccacaccattttcttgggggaaggtttgtccccccacctattttaaacaaatacggacttcagcttcctccttaccctggcacatcaatgtgtgtgagaattggaaaagctccatctgttgaaatttcatctctcagggagaactatatttcccctgaacttcttgagagtcaagtgatgtctgatccatttgatcagttccttaaatggtttgatgaagcagtaacagccggtctgcgtgagcccaatgcaatggctttgacaactgccaacaaggaaggaaaaccttcttcgaggatggttcttttaaagggagttgataaacagggatttgtttggtatacaaattatggtagccggaaggcgcatgacttgtgtgaaaaccctaacgcagcactccttttctactggaatgagatgaaccgtcaggtaagagttgaagggtcagttgagaaggttccagaagctgaatcagataaatatttccacagccgcccacgtggaagtcagcttggtgccatagtcagcaagcaggagcttgattccaaaacctgaatattggggtggctacaaattgacaccgacactttttgagttctggcaaggacaacagtctcgactgcatgaccggttacaatactcgcagagagaagtagatgggagcacagtgtggcacatcgagaggttgtccccttgactgttagcctgtcaacacttcggtaatagcgttgaggttatcaccagcaaccaaatcttctccagctgcaagatgtgcgaactgccccaagatgttaccgtggtgattagatcccgtgtttgagtaccgcagcccagaagctcagttctgtgcggacacccttttcagtttccacttgggccttccattgtagcggtgggtgaggagagagtgaagtgctttgcaaagtcatcagatctcttttaggcccttgcgtttctcttccgtaaatggtatccatcgaaccaggtttctaaatcctgccgattgtgaacttgtgccgtgatacactagtactgcgggaataatgatcttgggatggcattgtcagcaccgtgctagtaaataaagatgcaatttgatttattcc

SEQ ID NO: 34006 - DNA, 1512 bp, Zea Mays
cccaccccgcaccgcatggagctccattcgcctccaccatggtgccactgcgagcagctccgccccctgcccccccggtcggcggatcccccaccccgccaggtgctctgctaaggcccaccacagtgccagcaactccaccacccccttcctccgctgttggcggttcccccaccccgctaggagcaccgcccaggcggacggcttcaccttcaaagcccatgccacgcagccagcgtcgggatcacccccacctacacccctcgccagaggaccgcccccttgatgccagacagccaacggattcacccccacgccctccacgagcctgataaaggatgctaaaggtcgcggcaagtggctctactgccactccactccgcggcggtgccagcgttgatgaccacctctcggcctactgctacttcttctccagcatgggtctaatccatgtcgcgatacggggttgttcagcatgggtctggtgaatgaaggcatcgacatgaaggagggaaacctagagatcggcatagcaattcttttgcatgacgattagtttttttttattaatctgtgttagatcttcaaatacacgcaatccaatcttgaagatctggttaaataagtatgctgcttgtaccataaaccgtgtgcgacgcaaatttcagtaagtgcattttgctgatgtattgtgatagtagaccgaccttccttctgcagagtggaaccaaaggtatttgatgagttctttggcatgccacatagcagatttgaccgggaagcttgcaggtctactatctgtcctgatttttgtatctgtgtgtcttccttcatgttcaaaatggtgattcagtttatatgagagtattgtcttagtgtttgtgtggataacatcaatatggtgtacgacgatgagtttcctgaacttagtactttcaagtgtgtgacaagaaaggaaagtagcaagctggaaagcaagaaccaagataaattgtttgatgcatatatcatgtatggttctgcaatacaatctacaacacaccagattatatgtgaaggtcagattttatcatctcagatttgttgatttcaatattttatggagtccctatggtttgccaacttcactaacgatggaattgattgaaatcctttttgagaaatgaatagccaataaatttctcatgggaagagggtaagcaatggccaatgttcagggattggatacatagttgcatttacatgtcaatgtcatcttcacatagtagatagaattgtacacaattttcagtaatattggcactgtagatatggtctgtatttaacagtgttgttgacttcttagtgatttgctgaaataatgacgcataactacgcttatatcgagaaggggagaaaggatcaactgtcaccgtctccgtcggcaacatcagccatgttgacagcccgcgctctgtgtgccctcctccccacgcatgtgatggcctatgtttttttcttctccctcacgct

SEQ ID NO: 34007 - DNA, 838 bp, Zea Mays
taattattcttaggtatgtgactttggcctttcaagactgaaagctaacactttcctgtcttccaagtctttggctggaactcctgaatggatggcacctgaagtgcttcgagatgaaccatccaatgagaaatctgatgtctatagcttcggtgttatcctatgggaactaatgacactgcaacaaccatggtgtaacctgaatcctgcccaggtggttgctgctgtaggtttcaaaggaagaaggcttgaaatcccaaaagatctgaatcctctagtagccgtattaattgaatcttgctgggccaagtcggcatggacatcaccaggaaatgtgtatgggttttgattgattactaattcagactttcgtttgggttcttatacgaacaggaattgtcctgtgtgatgtcgggcattgtattaaggctatttttgggttcaaactcatctagaggtccttttgtgtttgtacagtatattactgtaggcaaccatgaaaaccaaaggtttaggctgacctacgtttaggcctcatttctgatacggctccggagcgagcaaatgcagtgccgtagaaggtgatatcagtcgtatgcatgcctgtttcttcgtctcttgtactgtaacatgtcttaaatttacctagtgatggcgcatgtacttctgtcgatctgtaccattgttgctgttgaagacaaagtgcgccaaacaaacacgaaccttttccggtctccttccatgcttgtggggagggttcacatggattgccacgtattttgttcctgcagcagatatgtttgatctgttggaatattttctgttttatggagtggct

SEQ ID NO: 34008 - DNA, 864 bp, Zea Mays
ccgggctttgatgtacctgaccgtcgtttccttcccccaacagccgccttctcgtcttcatccgagaagctgctgcccaggtcggccggggtcggccggcgcctggtggtgctggcagacgtcaaggtcatatcgacgggcgaggcctgccgccgcgggctcgccgccggcatcgatctatttggaaggcggctctgtggggtatccgcccacctccgagcccagtttccacgaggaaacccgcccgatctccagacgtctggcggctatcccgacttgtcttctcctactcgtgtggtcggcgatgctagtgtacccatcatgtccattcctccattcgtgattcacacagctcagtccaccgtcttgaaaacttgtaaaatttgcattgtggagaaattccattccctctggagtggattggattgcatgcatacaacgagtcaattcaataatgcatctattgtcgtagccagaaactgaaccctattttgttcagttgtcatctgccattctcgttgaggcaaactaacatacaaaaaatccaaaaggccattgtttcttgtatttcttataaatacgaagacatagaatcacatatggagatgccttcttttgggaattgtagtaataatctatttgagcttcaaaacaaaaatagtgcctcgtaactgaggcattgcagtttaaaccaaaggtgtgttggtcatatgcagactaagtaagcagtacactttgtctttctaacttattaattttcctcatatcagtatttatataggacctacaaattttaataacacaatccgtgtccaaattgttgtcttgccaagctttagccacctgcttgttttttccatggag

SEQ ID NO: 34009 - DNA, 538 bp, Zea Mays
cggaaggacctctcatttttctcctaattgccgttgaggcataccgcatacgtttctcccccattcctctccccactccgaaccctagccaccgtgctcacttcccaggtcgaacccgccgcggcgcgagtccacggcagtgcaggacctgatcctgcggtctaggccgcggcggtgagatggtgatggtgtcaggcggcggggggaacgcgtgggcgaaggagatgaccctccgccgcaggatagccagcatattcaacaagacgcaggaacacttccctactctgaaagactacaacgattatctggaagaagttgaggatatgactttcaacctgatcgaagggatagatgtcgaggagattgaagcaaaaattgcaagataccaacaggaaaatgcggagcagatatacttgtccagagctaaaagggcggaagatcttgcggcagcacttaaagcaagcaggatgaaccctgtaaaggccgaagcaaatgatacgagatctgataatctgatagctggttgtgtaagtacacg

SEQ ID NO: 34010 - DNA, 956 bp, Zea Mays
atggtggtggtgttcgaggacttcccgacggagaaggcggccgaggtcatgcgcctcgcgaccggcgatgacctgcccatcgcccggaaggcgtcgctgcagcggttcctggccaagcgcaaggaccgcctcgtccagcgcgcgccctacgcccgcccgtcgtaccccacggaggagccggagaagaagacggtcaagccagcctcggccttggcctcctggctcgggctcggcagcacggaagccgaccgcctcaccatcgcgctgttctgcggttctgcccaccctcgacagatcgaggatgccgttcttgaggcgtgccctgaacgaatccagccccttcctagcaatgtagctgaaccggtggatgtcaaggtccacctcaaggtagtcctctccctggcgatgcaaacatggcagattcgaagggttttttcatggatctttaaccatctaaagaagagatgtttcaagcagtttgtaaatcctaaatacatcatgctttactctggtgctacaactactgttttaaaggagaaactattagctttgggatcatccagaatattagcagagcatcaacttcaggcacaattacaagagcagcacttgaaggggatttggttcagcttctcactttgttttttaaatgagaagaagcagacaacaaattatagtgaaggctcctctcatcccctgtcgcatggtggatcacccccatggaaccagcctagccaaagacaggtatgtgcatgatgtcattcttggtacctatcatcatctttggctcagagtgcttctacagttaaatggatgtagtgcaagttttatttttattttctgctccagttgttttctatgctacttccttggtattagttcaccgtgcataagtcatctgcagcaaatgttcttcttcctaaccaactgtatatgctcttaattgtcctctaatt

SEQ ID NO: 34011 - DNA, 1876 bp, Zea Mays
acatcctccattagtccgcctccggccaccccctttcattccgccgcaacgccaccgcccccaacgcaagtttccggcgatggaccccgcggcggccgcgctaggtgcagtacccgccgctggcgcgccacctccgggcgcagccgcaggggaccagcaggcagctccccgggttgagcggctcagcgcgggggtgcagcagcagttgaacctggaggggatgcgcgcgcgcgcggtggggctgtacaaggccatctcccgcatcctcgaggactttgacgtcatcatacgcaccaatcccagcgcctcccccaagtggcaggacgtgctcgggcagttctcgatggtgagcatggagctcttcaacattgtggaggacattaagaatgtgtccaaggtgtttgtcgtgtacccccggaatgtcaatgccgagaatgcaacaagattacgggtacctggagatcagaggcatccacaatctcttcctatccatctgatagaagtgcttcctttaggagacggtgcacaaaattttggtgatagttctggtagttatcccaaaaatatgtcaacatttgcacctaatagtgtcaacagccagggaaatcagattcaggcatccggaggacagttacttggaaggcctgcgccatcacctggaaccacaggaacccctaatttcgagaatgtgtccactcctccaatgccatatgctaactctcctaggtcaggcaccaatatgatgaataccccttccccccagcaacatctaacaccacaacaacagaggcaaaaactgatgcaacattctcaaccgcttcaccagccggtgaggccatcagctgctgggatgctagcacagagcgcacttcctcaactacaagatttacaggggcaggctcaacaaaaactacaggtccctggtcaacagcaaatgcaatacaaccaagcattgtcacaacagtttcataacagacagatgcaacctggacgtatgcaaccaggcatggctcagagtcaattgaatcaaggaactcagctacgaagtcatttaggccagtttactggagctgcaaataatgcgatgttcaatgctgcacaggcatcatcaaactcacaaatgatggcaaatatgcatggatcacagtcgcttatgccacaaatgcagtatggtatggctggtgggcatccacataggagccatccccaaatgctgactgaccaaatgttcggtatgggagccacaaatagcagcatgatgggaatgcagcagcagcagcaagggctatacgggaacatgcaggcaggtgcacagaacgtgccacagggtatggcgggccttcagaaccagacccagaatcccaacttcactcagcagaggcaacaaaaccaacaatgatttaacactaacgttcacggaggttgaaagatgagcaatatatccgtcgttttgctgcttgtctgttggtctttactcagcttatctgtgagactgatagtagccccaggttagccttcgttttgctgtaaatcattagcgagatgcaggtcaattataattatatacgttgtaactgtgtttcggatatgtctaatatgttttgttggaatcgtgttacgcgcgttccttttatttataattaagcctcgcagcaaggccggcaatcgaattgcatacggctagacgggtgggtagttcaccaggatgaaaatcggtcatcaggtggaccctagaattatttgaggaactcacagatgtactgtaatatgtattccctgttgtctttctggataaatatcccaagatgttattacgtctttcatgcttgcaatcatgaggccccattgcttgcatgcaactcgaaaacgccgatga

SEQ ID NO: 34012 - DNA, 465 bp, Zea Mays
gccgttgtcacatccttgcgcggactcgcgcacgccgtggctacaaatgtggttgcccctgttttcattgtgggccacttaagcacttagatagggaaccctcgccagcaactgcagagaccgtgtcatactccgccattgagagacgacgcagccgcctcgtagctactcgcccccaccgtcgtcgagtgcctgattggagccacagaatctcgcctgaacgcagggggaagtcactcagacccgtttctcggacaatcgtgcccttgggcgtgtggaattcctcgccgtagttgaagcttgccgcagagccgcgccgttgcgcggatagtgtcactcgtgctccataccaagaagagcaagtggccgaggatccgattgttcagtaggtagaagttgatgagcatgagctcattgaaggcaagttgtgcccttgaccacttttattacccaataatgttcttt

SEQ ID NO: 34013 - DNA, 2238 bp, Zea Mays
atgcctgcccctgcccccgcccccatccctatgatgcccgcggccacaacgccccctcccctcgacgcgctctgcgcgccatgcctgctaaccatgaccacagcgcctggagcaatggagaggatgtcggccttgcatggcaccggagagggtggcccctgcgcgaacgcagcccccgacctcagccccgatggcggcgcgctgccccaccagccccccgacgcgagcgagcgtggtgcggccccacccaacgacgcgagcgaggcacgcggccctcccggcggggtggacgcggcccctggctgtgaggcgacgatggggctgggggctgcgatggcgctgggcgacccgccggcggactacgcatccatcgcggcggtggggctgttcgtggcactcatgtgcgtctgcatcgtcgtcgggcacctcctcgaggagaaccgctggatgaacgagtccatcaccacgctcttcatcgggctgggaactagagcagtcatcctgttcgcgtcgagcgagaagcattcgcgtgtgttggtgttcagtgaggacctcttatttatttacctgctgccgccgatcatattcaatgcagggttccaagtgaagaagaaacagttctttcgaaacttcattactattacactgtttggtgcagttggcaccttgatctcttttactgtaatatcccttggcgctctaggactaatatcaaggcttaatatcggcgcacttgaactgggagactatcttgcacttggggcaatattctcggccacagactcggtttgcaccttgtaggtgttaagccaagatgagacaccattcttgtatagcctcgtgtttggtgaaggtgttgtcaatgacacaacttctgttgtgttgttcaatgcaatccacaactttgatcctggaaatatcagtggtgccaaattactgaacttcattagcagtttcctttatctgttcggctccaacaccattcttggagtagcttctggacttcttagtgcttataccattaagaagttgtactttggcagaaagttcgagggtcacaaccaacccggtaaagtctatcgctttgagcagcaccattttagccttggtgctggtttcaagagttgcttttgttttcccactatcctttctatcaaatttgaccaaaaaactccaaatggaaagatatcttttaggcagcaggttattgtttggtgggcgggtctcatgagaggtgttgtgtctattgcgttggcttacaataaggcgtttgacttaatgtttccaaggttctgtggcagtgcgaggcattttgggaggtgtgcgaggcattttgggagggacatcatcatgcccaacttgaagtcgtccgtgaccacaatagcgagcgcggtggagtacatggatgaagtattgaaggcgttgccgccaggtgaggccaggaatgaggattcacgaacactgcaattcaattatggttcattcaaacataaggcattggataaatccttaactaaaaagggaaaaacactagcaatcttacatgagttccaagttttgcaggtcgttgctgttggtgaatgtggtttggattatgacagacttcagttctgtccgacagatatgcaaaaaaaattccctggtggggttacatattccttcactgacttagcagaagatcaggataggctactttcttttgagaagatgtttatcggtgttaatggttcctctctaaaaactaacggaaatcttgaggttctacgaggcattcctgtcgagaggttgatgatggaaacagattctccatattgtgacataataaatactcatgctggaagccagtatgtaaaatctgtctggccatccaagaagaaagaaaagtatgagccagattcaacagtaaaaggtcgcaatgagccttgtttagtcagatttaaaagggatagtggggaaacaccattttccgttggtcaagcaattaactcgcctaagttagtgtactttgagaaacaatttgagttggctaaagctgtaaaactgcccatgtttcttcacatgcgtgctgttggtgaagacttatgtgaaatcatgacacgaaatttgcacaggcaagttcttgaggtagtggctggaagcaaagaaatttctgacatagaaggcctgagtagaactctgtaccacaacacatgcaggctcttctttcctcaggatcttgacgcgtctgctaatgcgtag

SEQ ID NO: 34014 - DNA, 1051 bp, Zea Mays
ctcggtctccgcgattaagcatgaagacgcaggcaccaggcagacggacctaaaaaggagcctttgcttctcgtagctccctttaccccttccttttcttttccgctgacagaagccgtaagcatcttgctgctgcgcgactgcgcgagtgctcgtctctccttgtcctcctactacagtcgtcgtcgtctctctccagggacacacatccgccatcacctttgcttcttcgattcgcaaggagcacgagtactcatggagcagggacaggggtggaggaggcggcagatcccggcgttcgggaggtggaaccagcataccgacgaggcggggtacttggagtcggcggtgcaggctggcctcgtcaggcccggccactgctaccacgacgacggcggcaacgaggttgtgctgttcaggtcctccgcctcgccgcctccgcacaagccagccaagaaggtgcgaagcacgatggagggtcacggtcaccaccatcaggttcaggttgaggcggggagcaggaagcagcggccgttcgtggcgggcgacgggtcccgctcccgcgcggccaagccgaggccgagggtcgttagggcggcggtggacgaggacctgtacattgtcccttccgatatgtcgcgcaagaagaaagggaggaaacacgtgaggagcatgtggatggggtgcgtgggcctcaactgcgtcgcctgaccagacatgaccggaccttccgagcctttcttccagctttttcgggtcgcatggaaaaaagagagtccacgagacagacaacccagactatctgtttcatcccatccaatggatgatcgtcaatcaccacgtcggacacgggctcgatgcctgccgtccatccggatgtcgcatatgtatattgcctggtgctgtcattgtgcatgggtatatcaccaggcggcgtgagttgtctgtggtccatgtctacgtctacattgcatgcacttttttttacgataataataatggatagatatttggcttcaatatcttaaagagaggatcttttttcgctggt

SEQ ID NO: 34015 - DNA, 4363 bp, Zea Mays
gtccaatactgctatagtagcttctccaagttatgacactgttaggaagatggttcaacttctctcgaaatgaagcttctgtcttcctatgtatagacaagttgttcagttaggaggtctagattctcttaaaatggtgctatctacgagttaggaggtctaggagcacactgaatgttttagaggttgatgaaatcgttgttttcctaaaaaagcattttttctgctttgtttgaaattgtttgggttttcctccccaactttcataattacctatttctattgtatgtttgatcatttggacttctactccatccacaattttggtttattcagtgaggaactatgtttttaaccactctatagtttgtatagacatgcaacattcatctcagggtcaagaaagaagctcaacttggcatgcttcctgtttaaagcaaggcaagaaacatccccgccagatctctgtcgccaaagcagggctggtgaagaagttgtgtttccctcccggattgtcactactttcatatttgttcatttatgtttgttccaatttatgttggttttttacagttacagaatatgtttgttccagttgagttccagtttgaaaactggaacaaccactagcagatgcaaagttcacaaagtagcttgtcaaataatgtgcatgaactggaacaagcaacttgtgcacgaatgagcattactggaacaagtagcttgtgcatgaacgagtaatactgtagatgattggacatgtatgtctattttagatttttaatatttaatgttatatattcagctcataccatacatgaatttgcatttctgtactatactcacttaatgtcctacctgttttgttagcttcaactatccgctttaaactgacaaaaccagaccaaacatatgcaaatctcatatacctgtgaaagcaacaactgatttgccagattggttaattaaacgtaacaataaatagccccgattaaatggcttataaatatacttggatctgttcatttttcacatatcagctattaatgaagccttcactgggttcattttgtactactccattacttatttacagttacaagtattctaagaaacttaatatttcatcatcaaagttgtattcagacagtttcatttacattgctctgattttttgtactaggagctactgacaatggaaagcaacgattagagtaacttgatgagtgaggactattcattcagttgcttcgatcaataagtgaactaatggatgcatgtttcttttgataagtgagctaactactttagtcacaaagttcgtgttgatttctaaacatggtatgatggttttgtcatcctattcgattgagtttgggaaaaagcctgcacattctgaaaacaaacagactgcacattgtgtggctgataaggttgagtgggtaaataagatcaaagctattatttagacatactgaaaatatagtgaaggaagcgtaagcaatttttctgctatatttatgcattgtatccttgtaaaattatcaatattgttctgacttgtggggaaaggtatgagagtattcatttttttgcctcttttctgtttgcattccttcttcagtataatgtttgttagaataaccaggtgaatttacaaatttcatatccatatactttcttcgatgacaaatataaatctacctaggtttgtcataactcataggtcaatcattctaacttcaattgacattttttataaaaagtatcataaggaaaataatatattatcataaaagtgacgtccatctatatcaaattttagatattgatggtggtcagagttaaaaaacagtttgccttaagacaaaccaagatgaacttgtatttacaatcgaaggaaatattgcacattgcctagacatttaatttattagataaattcttttgttagttgttcaactttgtacgtcttataagtcacaggaacaatgtttatctagaacttcggtctcaaattatacagtagtgttcagccatacctgccatgtcacaagaaagagagataaaaagtatttaatagtagacctaatgatgctcatttgtaattgtagatattcgtatatcctttttctgcaaccttgtgaaacatgtgatggtttgacttggaacaaactttgggtctgatatagtaaaatgcaatgtatgtggagggaagtagtagaacaagacagaacaagtgccaaataaggttatatagtagaatacaatgtgtggagggaaatagtagaacaacacaaaacaagtgccaaataaggttacaaggtttatagtagcgattgcttagctgctacaacgacactcatagattagcctggcatttgcaatgtcgctcttgtatttgccataacctcacttaaggtcacacattgcctctgggaccttgacctccgctactgttgtcgcctggccgcgtcgacttcaccaatgccggggtgtccaacctcatcagcttcaccgtcgtcgactgctcccacacaaccgagctgtgggtcctggtcacatatggaaagtgaagaacccaaatgatttcttcacaggaagactgctaaccttcacacatctaataagatgaagcaacaagctagaaaatgtggaatttgtcatatgtccggatgcaaaacgggtaacttcatgctttccacaatgtgtgtcgacatgatgcttgtagagatgcttggaccaatcttcaactcatggggcgcttcatcctcggcctcctacgcatgcacttctcctgcttctcctgctggtcatcgcccaagtgtgtcagatgtgccgtaacagatgactccaaaatggattgcatgctcttcaaatagctacagataactatcttcacataaaatggagagtacaatgtttataaaagaaggaatatggataaggatccagattctcctatagcatatgaagaggcaaaggaaatggcaagccaaagctgcacaatttctgatgatcactcgttgttactgttatccattatctcctcagaggcattgcttttaaattcaacagcagacatggcaggtgcaggtcctatcctatccattatctacccctgcatgtgtgccagctattctactctatgtttcaatagtttggaaataattcagagctaaggttttctgatacaggtacgtgtccactttcttctcaaggaattgcactagaggttggactttgtgggtcaagagaaatttaatgcctattgttaatacaacctttagctatttttccatgatgatggagttggacaagtaccatattgagtataagtgttagcctattatatctttgtacaaccatggcaaacgaataatttcttataacaccatgaagataatgtttaacgaagtgtgtttgcgtgcgtgtgtaatttcttcttttgttttgctgctaagtttgatagttcaaaacatgattcttgtaaagtttggttttagtctaacaaatacactcaagtcctgacatgtaaactgtaaagttggactgttgcttggtggatctgtattgaactttattttttttaaaatgttttatggcttgtatagtttgtattcacttctcacctaagctacaatttgtttttccagcctttcaagatttggcacattgacataatgacatgggttggtcacggattggatgtcaattttgctccctgtaccttgtagattatcggttatgtcaattttcgaaatttctatcgtgatggataacatttgaataaaacatagttaaataaacatgactactgtttcagtctttcgaaattctgatgctatagtgtcagtatactatgtcattttagggaaaatatatgtcatgtttattttgataaaattatatgatttctcactcaattcttgtcggtggcttcaggatttgttattttgtatatcgatctgtgtcatttgacaaagtactttgacttggtataatatgagtgttacttcgaccaaaagagcttggtaaagtgtgagaaactccgcaaacttcttctgcagacgatgactagcaacagttatgacgagggtcaagatagccgccatacatgatacattgagtacaacatcaagataaacactccctccccacacacaacttttgccttccgttcactctgtatgttgtgtttattacggttgcatatgttgtgtttattatggcatcaacacgttccattagaaaatataactattgtttgtcaagtacaaaatcataatcacatcagcttgtaataatattgcatcactgttttgtaccaaattgtaagttgttgtagcaacgcacgggcacc

SEQ ID NO: 34016 - DNA, 2739 bp, Zea Mays
atcaaatcgaaataaaataaatgggaaaaaatgtcttcgtccctaacccagcctagcgtcgcgtggcctccttccgttactctcctcccaccactctcagatctccccacccctccccgtctcgtgtcgccaccgcccccaaaccctatccccgcctcgttggatcgggtcagacctcggcttcacgccacgaggagcagcggtggcgcccgctgcgtcgatgcggagctctatcgcgacctaccgggagagcctgtctcggctcgccggcgaggtcgacgacgccgctgccgacgaggtccctgggccgccgctcgccccggcagctaggggcgtcgacatatccgccacaccaccgtcgtcgggaaggcgccgacggtactcccgccctggccccggctccgatgccaccgagcccgacgagatttctaaactgagggatgacattcaaaagcttcaagcttctgaggctgaaataaaggcactatctttcaattatgctgcaatgttgaaggaaaaagaggagcaactgggaaaacttcgtgaagaaaatgggtctcttaaaagaagcttggagagctgtaaggcagtttcagccaattctaatggcactttggaaagatcacctagagtgcaaaggaatgcagttcaggaaaattcattgaatctcaccaagcagaacggatatggtggtggttcttctcacagtacccagacaaatggtctgcatccaatggcaggttatcagaagggaagtatatcggaggaagagagatcatcctttactaccaagcaggctagtcttgaaaatgaaatcaaacaattgaaacagcagctcagcaataattctgagaaagaaactgaaattaggaggaggctagaagatgaaaccaagcggagtgaatttcttcagcagcaactaaatgagctcaagatggacaaagagaggatgacaactagcatggaagagctacaaaaggaactgagtgagaagaaatcagagtttagacgtgttcaggatgagcaaagcaaaagggacaaggagcacgtctcggacggatctcttcagagcctaagaaatatgttgatggctttacagaaggagaactctagcctaaagatagagaaagtcaagcttgatgcagatctcaagagtatgaagagtacctcacaaaaaactgttgacagtacattagatgctaacaagatttctgacttggaaaagttctactgtgaaggttaagaaagagatggactctttgaaaagagcattacaggatgcttctcgtgagagagacaaagcagtgcaggatctggctcggctgaagcagcatttgttagataaggatcttgaagaccaagaaaagatggatgaagatagtaaactcattgaagagttgcgggtagtatgcgagcagcaaagggctcatataatgcagttagagagggctttaaaggtcgagatggcaaagcaggaggagaacaaaaaggtcataagtgaagagcaccagaggtcaaatgaacaaatagaaaatttgaactacaagcttgcaagctgtatgagtgcacttgaatcaaaaaatgtggagctgctaaatcttcagactgcccttggacagtactatgctgagagtgaagccaaggaccgacttggaggtgatttagctgttgctagggaagaactgtctaaattgtcagagtcattaaaggtggcaaatcaaaccattgagatttcaagaagggaaaaggaagatatggctaccaaactttcacaagcagagaggatgttggcagatgggaaacgatccatgcagaagcttgaggatgacaattcaagattgcgaagagcgctagaacaaagcatgacaactgtgaataggatgtcactagattcagataactccgttgacaggcgcattgtgataaaactgctagtcacctacttccaacgaaatcacagcaaagaggttctggatctcatggtgcgcatgcttggcttctccgaggaagacaagcaaaggattggctttgcacaaagtaatgctggtaggggtgtcgttcgtggtgttttgggtctcccgggacgcctagttggaggaatcgttggtggaggtccatctggcaaatctactcaatcgtcccaggatagccagtccttcgcggacctatgggtggacttcctgctcaaggagacggaagaaagggagaaacgggaagcctcagaagctgcaaggcaatcacagcaagagagccacaccaccaccggtccaagtacatcgtcgagtatccaacagccatcacagcacaacccctcaaacgttgcacctggcccatccacaatgccacacaccgcttgggtctcccagaatcggaatcctcaacagttccgctagcatcatcatgctcgtccgtgctggctccatccccaagaccacctctaagatgatactcgacgatgccaattttctttttatggagtagaaatcaagtgcacactgtacagtatcggatacctttttgttgtgctgggagtgatcccgcatgcggacgccaaggctatttgttccattcgttgacaatgcgatgatgatagtagtagattcaaaaattggcctccttcctggagcatgtaaagagatcgatatgtaaaatggattcctaccctcgacaacagatggaggtaaaatgggagttggttatacgtatgttttgaagtaagaattttgatctgcatccaaa

SEQ ID NO: 34017 - DNA, 2656 bp, Zea Mays
gtgggcaagagaaaagcaatgaaatgttaagaagactaactaaaccaaatacttcaagtagcttataggtaccatatttaacttaaagatgaaaagagatgaatcatcaggaggtgagccatctttcatagagcctactagcggtatggatgacccaactttgatggggtcgcttggtggtatcgacggtccatctttgatggagccttttggtcgtgttggtggtgggacttcatcacaaacgagtgacatacctgaaaatgggtcaagcaaccagtctgtggaagcacatgcaaacaatggtaaacgagaaagccccggtgatggtgccgctagaatcaatgaggtaaattcgagcaccgctgtcaaaaagaagaagaaacgcagtgaccgccagcagcaggatggcccacagccaaagaagttgctacacagggtcaccagccagcagttagaaatactcgaaggtttcttcagcatatgcgcacaccctgacgacagccaaaggaagcagctgagtgagtcgacgggtctttcggtacatcaagtgaagttttggttccagaataaaaggacccatgtaaagcatctgagtggaagagaagagaactacaggttgaaagtggagaatgaaatgctgaaggaggaaaacaataggcttattaggcaggcacagagcaatgctcctgctcctgcccctgctccctgtcccagatgcattaatgacgcggggcacctcctgctcgagaaagaagttgaacggctcaaggcgcttaaccagatgctgcagcaagagttgcagctacaaggcacggaaggtgaaacacctgtggctgtggacccagcttccggcgctttccatcctgatcctgagccctcgttggagaacgtcttcgcggcgcaacacgacgggcaaatgctcgccaagctagccgagaacgcggcacaggagcttctcgtcctggccgaccccgaaagccctctctggctgcctgtcccaggcggctcgttcgaaacgctgaacatgatcgcctacgcccagacatttcccgggcagatgagcgtagatgccatcgcgttgaagacggaggctacccgcgccagcggtgtggtcatgctggacccgaagagccttgtggagttcctcatggatgctgagagctatggcacgatgttccctggactcgtgtccggtgcagccaccgacaaggtgtacaactggcctaccagtcgcgaggagagctatgatggggctgtgcagatgatgactgttgagctggcgttcccctcgcccctggtggcggctcggaagtgcacgttcgtgcgctgctgcaagaagctggaacagggagcctttgctgtcgtcgacgtgtctttggacgacggcgccaggtgccgcaagatgccatcggggatgctgatacagcccataaggtacaacagctgcaaggtcagcgccatcgatcacgttcgagtagatgacactagcattcatgacatcttccatccatgcctgagcggtgtcctcttcggggccaggcgctgggtgacgagcatggcgcgacagtgcgcgcggatcagagatgtgttccatgtcaccaactgtaccctcaacgtcacttcaagggggaggaagactatcatgaagctggcagacaatctgctggccgactacaccagcagcgtcgccgccttccctgacgacgcctggaccgtccagtgcggtgtgggcacggaacaggacatcaagatcatgtacaagaggcaaagcgaaggcagcagcagcagcagcaacaccgcggtcgtgtgcgcgtgcgcgtcgttcctgctgccgctgcgcatgaggaaagcgttcgacctgctcaagaacaatctgctgcgtgccaagtgggacgtactggtgaacggaggctccgtgaaggaggaggttcgtgtcgccaatggtgtcggaagcgacgacgctgtctccatcctgcatgtcaagcatggccacggggcaaacagggacaccatgatgatcctgcagaacagcagctacgacgcgtccgggtcgttcatggtctactcctctctcgacaagcagctggtggagacaattacgaacccgggtgacagccaggcgatgagcagcatcaacctcttccccgccggcttctccctcgtccccctcaccaacccggacccggcgccgcaagagggctccggcagcatcgcacagcctggggcgaccgtgatgactgccgggttccagattctgatgaagatggcccgtgggaccggcctttgccctcgctcggtgtcgtccgcggtcaagatcatgtcagacaacatcaccaacatcaaagacgctctgttgaaaagccaccctgttttctacaagagcattcagtctgtcgactgaatagcggcaagggagaaagggaggtcgtccaatgcttgtggaggctgctgtttaaatcaaggatactgaaacggaaccccatcagctttggtcgccgcctgcgtttctcccggcaatatatacccgttccgtctactgtgtggaactgctcttggctgccaagagcctgtaatgatgttagtggaaccgaagttgtgctatgtggacccgtcacctgataatgtatgccatgttaaatccttaatttgcttgttg

SEQ ID NO: 34018 - DNA, 2732 bp, Zea Mays
tttcttgcgcaattgctcgcccttgctgacgaggagcagcacctcatactgaagcagcacccaggaggggcggaggcggcaacaccaacaccaacaccacaggccgccgccgcgcctcgagctggctatggcgcacgcgcggggcggcgggggccacggccacggccacgaggaggaagcggaggcggccgtctgcctggacggcgactccgaggcgggcgaagcgcgcagcgcggggcgcgcgccgccgtggcgggaccagctgacggcgcgcgggatggtggcgagcctcgccgtcggcgccatgtacagcgtcatcgtcatgaagctgggcctcaccacagggctcgtccccacgctcaacgtctccgccgcgctcatcgccttcgtcatcctccgcgggtggacgcaggcgctcgcccgcttcggcgtcgctacgcgcccgttcacccgccaggagaacaccgtcgtccagacatgcgccgtcgcctgctacagcatcgccgtcggaggtgggtttggctccttcttgcttgctctgaacaagaggacctacgagatggctggggaggacacggaaggcaaccttccgggaagctacaaggagcctggcattggctggatgaccggcttcctcttcgccgtaagcttcgtcgggattgttgcgctaatacctctaaggaagatcatgataattgactacaaattaacttacccaagtggtactgcaacagctgttcttataaatggattccacacaactcatggagatgcaacggcaaagcagcaagtgaatgggttcacaaaatactttgcaatcagcttcttttggagcttcttccagtggttttactcaggtggagacaactgtgggttttcacagtttcccacttttggacttagagcttggaaacaaacatttttcttcgatttcagtctaacatatgttggcgctgggatgatttgctctcacctcgttaatctatctctccttcttggtgcacttctctcatggggaataatgtggccactggtcagtgatttgaaaggggattggtatcctgcagatatgccagaaagcagcatgagaagcctgcaaggttacaaggccttcatctgcatagcgctcctcttgggcgatggtctttacaattttgttaaggttgttgcattcactgttaagagtctacttggcagatcaagactgaagaatgcaaagaaagaggaagacattccagtgcttgatgaaattcagcgcaatgagatttttacaagagacagtatccccacatggctagcctactctggatatcttgcactatcagctgttgctgtgtttgccattcccttgatgttccatgagatgaaatggtcgcgctctttattcttgcggcctgggctgggaaggactctggtgttgtagctggcctagtgggttgtggtttggtgaaatcactggtgtcaatatccgctgatctgatgcatgacttcaagactggacatcttacattaacatcacctagatcaatgattattgctcaggctattggcactgccatgggctgtgtcattggaccactgacatttttactgttctacaaggcttttgacattggaaaccctgatgggtactggaaggcaccatatgctctaatctaccgcaatatggcaattcttggtgtccagggcttctctgctctgcccctgcattgtttgcagctgtgctacggattctttggatttgcagtggcagccaatctgatgagggacctcttgccaccaaagtacggcaaatgggttccattaccaatggcaatgggggttcccttcctagttggtgcgagctttgccatcgacatgtgtgtggggagcttgatggtcttcatctggcacatcattgacagaagtaaagcatctttaatggtgccagcagttgcatctgggttgatatgtggcgatgggctttggatcttccctgaatccttgcttgccttggccaagatcagtccaccattgtgcatggcattcaggtcttcacactagagtaacaaaatgctcgacatctgagaacagttccatgtccaatcggagaagctgttggcatgccaagtttgttattaattagctgggatatgatacatgcaggtaggtaaagatgcagtgcctatctggatgttacctacatataatgacgtaatgtggtacccctgtaaaatttatcatatgcaagatgatacatcacattagagcaatggtaagtttgagaatttcaccccagtggtaatggatggatgcaagagctagcagtagccaaaattttgcaccataggttgtacccccacccctatagtttaatatggaaccacaagctacagtatacaaaccatcttccaaagacagctgaccctattgtcaatcacagctggttttggtaaaagaaaaatgcagtcaaatcttgcatgaatggttagcaaatcatgtatatatttatgtatgtctttgccataacttggattcacaagatgcaatgtagtaagaggcatcttggtcaggcatctgatacaattgtaaaatcatctgctgcgtccttttatcataaacaaaatcatcaggtgatgtatgcctatgaatagttagcaaaaggtacatatatggttatgtatattaaacacgttctgtgaagaagaaatgtaaccattcaacaagaacaatccaatgatacatttgtcagc

SEQ ID NO: 34019 - DNA, 546 bp, Zea Mays
cccacactttggtcctgcttgctttccgaccctggcggcacttcatctctctctactccctctctcggtggcgctctctacatggcttcgatgaggcacccacggcgtcggctcacaatggatgcgaagagggtcacagggctgtatttatacaccgacgatcgaatcgtaacaacccggtaggggatccagctgcccgacgattgtggtggggtttgttgcagcgcaacctaacgaacggagaagagagctccgacctgtaggccccacacgacatcgactccaagagagaatacctgcgtgcgagatggctttgtgacgcgcgggtcccagctggtagcgtgagcaggatgcgggcgcgtagcacgattgcccgcttacgtgcggggcccacctggcagcggcctggagacgcggcgcgtgatgcctgatttggtctggctaggcggtggtagctgggccgaggagggagcctcagcccaggacgcgggcacccccgaatcccctgcgtccagcacctcatccaaccatcccggtaatggttat

SEQ ID NO: 34020 - DNA, 7067 bp, Zea Mays
aagaaaacacaaacaccttagaatcggcgattcagtcccccttgagtccccgactccccactcctgtctcgactctttacctaagcttctgctcggccccatccccgtgcgtctcctcccggctttcgtctcgctctgagctcgcctctaccatggcgactagggtttagtagcgccgcagcctccatcactgccatcctcaactccgtaccggatccggaagaggcgtcggttcgtcctcaacgtcgccaacctccgctccccgtcgtcctcaccccctctatctcgtcaaggcttgatatttaacgggctctgggcagagtttaacaagtttcagcaatggggtttgataatgaatgtatcttgaatattcaatcccttcctggtgaatatttctgccctgtttgccggacacttgtgtatcccaatgaggccctacaaactcaatgcacacatctctactgcaaatcctgcttggcatatgtagtggcaaccacacaagcttgtccttatgatggataccttgtaacagaagctgattcgaagcctcttatggaatcaaataaaactcttgctgagactattggcaaagttgcggtctattgcctgtataataagagtggctgccaatggcatggagagctatccgcctgtaccacacatggtactacttgtgcatatgggaactctcctgttgtttgcaatcgttgtgggacacaaattgtgcatcgtcaagtacaagaacatgctcaactctgccatggcttacaatctcaaacccaacaagctgatggtagtcaggtgcagctagcggcggcaacaactcagccagtcacccaagacccatcacttgcttcagctggatctgctgcacctgcagttacaaccctaccaaagccatctttaactacagccacagctgtaacaagttctgcaacagcaacaggaggggcagctggtgcaaccacagcagcagtgccttcttcagccgcatctatttctgcttcccaaactccaacagctgagcaatggtaccagcagcagcagcagctccaatactcacaatattatcagcagcagcatcctggatccaacccttacatgcagcaatatcaacagtataaccaataccagcaggcgtatcagcattacatgcaaccttcaatgcaagtaccatcccaaaatgtggtgcaaggatctgcacaacctgcttcttatgttcagcctcaagtgcaatcctcccaactgatgatgcaagctcaaagtcaaccccaggtccatccattgacaagtcaaccgcagcttcagcagcatccagttcaacctcatccccaaagtcaccctcatctttcccatgttcaactacctgcagatcagtcacagcttcatcaatcaattcagtcagcccaagttccacagttccaaccaagtcatgttcctctccaaccatctggtctccaagtacaacctgcagcacatccatctgctcttactcaagttggtaaccagcaagttgctactcaagcaacggctcatcaggtgcagccacatgtacgagttcaacctccgcagcagcaacatattgttgcacagcaacaacatccacatctgcaagctttacctccacatcaaaatattcaacctcagatgcagttaaactctcaagttcagctgcagcctccacatgcccagcagcaagcttacccacaaccacaggcctatcctcaacaaacacatcatatgcacccccagaatgcttcatatacacagcagcaaacacaaggtgctcttttgcaacctgtacctgtgtcccatcaacaagcacatgtttctcatcatcctgcaccaatgcgtcctccgttgccaagtcaacagccagctttgcagccttttcagggaattcaacgtacaacacaacatggaaaacatattggatttcatgctcagtggccaccaatgggttccaacatttcttcccaggcaccaccacagggattccctgcaaactcatctgtttcttcacaatcagttcaaccataccagcaaggaatgtcttcatcacaacaggtgcattcccaacctggtcagccttatacacagcatcatgttactggcaatactggacatgttcaaacttcagctggcagatctatgactcatcttgcaccaacacagcagtttcagcaccaacaatcagcagtgcttagaactgagtcacctgctgctgcgcaccctattgggcagggttctttagatcttgaaaaacatacttcaaaatcagggaagtcagaaaatgcaattaatgctgctgtcagtgaaaataaaattagcggtgctgactcagctgccatgagacctacaaagcctcaatcagggaggcaaagaccataaggcttcagatgttactaatcgtgagaaagaacaatcatttcagcaggcatcactgcaaaatgcaggggcactgggctcttatgtgcccccaggtgtggtaccacaacatccatctggaccagataaaatgcttcctcagcatattatgaatcctggtcataagcatggttcctctgaaaatatccgtcctccgttgcaacaaccatatggtttgtttcattctggaaagatatcaaggccatttggagagaaccagattcagatgcctatgtcacagcctgggggtatcagacctggtgatggtatgatccgacctcctgtggttggcccattacctggacatcatggtgcagtgttgtctccttttgatcttgaacatttgggccagccacattctctcggaatgttgaacagcaatgactttggtggtgaggggttcaatacttcaaggggtgctgcatatcccggaagacatgataatatcgaagacgatcggaaacattttccagcaccagcccttctggatggtcaaggcttgcaaagggaccctagacattttgagagagctttagttagacctgatggtttccttgattcagtacctggaaggcctccttttccaaaccatagaagtgtaggtttgcatgagggttttccaagaaaacaaaacacaactgccagtcaccctgacgtcctgtcacatggagcagaatttgatcatcacagggctattggaatgcctaatttcagaaatccaggcccatttgctcaagggacaagtggtggtcctggtgcgccccctaaaaaccagcttggctctggtaaccttcctggaaacatacaacatgcttttgcaggcccagacatccctccagctccttttaaccttggtgacatgcatccaggtgaccctcatcttgttgctgactattctcagcatggatttcctaaaactgcagcacactttggtttgggtggattctcgagaaatgggaattctggttggtgccgaatatgcatgtttaactgtgggaccgcagagaatctggatctgcatgtacaaacaagggaacatcagcaatgtgcaatggacattatcctgaaaatgaagcaagatgttgcaaagaggaaaaaactgaattatggaggccccaagtcggtcaacaacaaaaaggtttctgggaagggccattttcgtgggaataggcgctagtgttacctgattcagcttgatgtgaatttgaaggttgctactggtgcttttggacgtttcataggcaattgagagttgagatctcttcagacatcatgttcacgcggttcagagtatttgaagtggaacttgtaatgttcccaaacttttgttgccatgttgatctgcagagttcacatggctatgtttactttacgtatttttgctgaagttctgggattgcttaacatgctagtacccttcttctgtatgcgatgatttatgactactgtttgtttcaactaggctcatgctttgtctaatgcgacctaataatagaccacactgaaacttttacaaagagacatgtaattgtgtcatcagacatccagaacatggtaattttttgttggaatcttttggtaaggggctgatgggaacatgtaaaaggtactttcagtgcctgaaaattatgctagtttttcatagtttaattcaaaaaaaaaaatctaagggtgtggtgtctaaatagagttcctttacaccactaagcccaatttgcttaatgatatattttaaaattattgaatgctgattccatgatatgttcccattcaaaacaagggaggacaaaagtgctgcattctggaataaacacatgggctagagttgttgacatatcattgcatgacaacaacaaagccatccaaatcaacaaaaataatctcattaaagtggtgcctattttgtgcctgagggatccattagtgttaaagggaggtttggaagcctggaaggaaacacaaaagtatgaagaggtttgaattgggacatgtactttgaatgttagcatgagatgggagggaattgatggtaaaccttgtttggaaccaaagtatgtaggttgtgctcaaatatagaagaaaaagaaagatatcttgattttcatatgaatactagtacgtgcatcatgtatgcagagctttttgatactgatactggagttttattattcacttctagttagttagttagttattcgaggtagtgatggttttattatcatgggtttgatgttcagaataggacatcattgaaccctacaagcactaaatgttgtgggtaaaatacctaagtttctaattcactgctgctgggcagatggcttgttcagttatgtttgatatgatttttcgcatgtgatatattttgctgatggtggtgtttctctagatgtctgttttaaatcatctgtatttgctgtttgtttgctaagcagaaactggaaagtgtaggataatttccagcagagggctcctgtcatacttgcttgtttccctaacgatggtaaggatgacatgctttgatatgctggtaaggaaagatatgtattgagcttttactacaatacacttcaaacttttggactgaagtttttcatatatggattattgctaaagtgctgaaggccgaagccaatctgtgacctgtcaattacttggacactaatgacctgtttggttcgctgcctaacttaccacagtttgccacacataaggttaggcaagtttgatcaacttaggcgcgtgtttggtttgtagtcacagttgtggcaagatttgtctcttgctgcgttggtcccactcatcaatgacttataaaagtgtagcatgattctcttaggcattgccaaaatgcggcaaagaatttgagcgcctaacctttggcatgtgtggcagaaaatatatggcaatttatgacaccttagccgtacaaccaaacagacgctaaaggtcccagtttgtataattgtgaggccatcatgaactgctatgcttttgttcgtaggaaacaacataagatatatttatgtgtaaattaatagattgttcatatctatgttcattcggggtaaggagtgacattacaatgtcttggttgaactcaatttatgtgatcgccaagtggttcaagtgtgccccaatgttatgtttgttcactttccagtgcttagtttgccggatgctgttgcccacagaagatgcccccccaaacaaacaaaattggttgggcatcacttgtaatatatttctcccaaatgcaggttgtttggggttagacttgttacatacattcttcacctgctcatggattttgtccaaactactcatagggttatcgttcacatgtgtaacttattcagcacactactgtgatttttttatagaactaggtaggatggttatttagcaagatgatggtatgattcaaaacaacttggtgctttctgctactacccttgacttgtagcccgctattagtttggatataaccaatcaattaaaaggcaccctttggatgtaagcacaattcggttggctgcttccaattgatttggctacagatcaaatcctcttcaaaattgcatggtgtattttgcgttgctcaaagacaagaaatcattcaagatgcttacactgcccctatttattttctctgactggaacggggttggctaccatgacgacttagcaattggaatgccaaactctaggttcatcaatggttttgtaattttgaggtcaccagtgatttgttatacagaattgtgggtgaaaatgaaaacatctctggcaagttccagtcagtttctgaccagtttttgacacagactggtctgatgttgattgtcacatttttgtagcacatactcttaaggatcgggccaaaaagtctgttttcttgaatggttccttcctatttaggtttgaattgtagaatcactggtgctggtgcccctttgtcactcgtgtcaaatagtaaaaggaaatgtgccgttatcgatcggaattgtagaatcacattactgtacgattatcgatcgaattactgttacaatagtaacttgcagtgcagtatattcaatttggtagtaattagcaacttggtgacattgttgttcgtgcttggcataatgtagacgatctatgtttcttctgtctcttttcttttgtgtttctttgggattcttgtagatggtggatgtgcctgggtgccgactactgtttgaacgaactgatcgtgccttgctcattttctaccggcatcggatgtttttgaccgactccagggcacctcatatctaccgttgctgaggtttaaattgtaaaattcccgtcctgtagttctttaattacaactaatgcaccaggcgaacgaaaattcttgtaatgtattcacaaatatttctagagaagtttgcagtgtaaatataacaatgttcgtttcaatggagtgcacctactaattaatgtaccttttaaagtctatttaatataggagtgttagtgtaagaaaccgattttccattcagtggtgtatgactaattaacctacctcccggtgtatgtaaattattgtaatatatttttaagggcactgatgaagttccttgtgtttaaacatttctatatgaaaaattcta

SEQ ID NO: 34021 - DNA, 869 bp, Zea Mays
cccgccccctgtattcccccctgccttctttgcgaagatttttgtgtgtaaagatttgcgagcaccattcactttttcatcagtgtgaaattaaaacacttcaagcatgagctctcaccgtgtgaagtggaatgaggacaatttgtatgaaattgagtcaaacaaaccggtgaggcagaagataacagagccaaagacaccatatcacccaagatagatgatgatggatcattgtcgccaacacgtcctttcgacaaatgtcttgatgagactgtccaggctgaagctatcttaacagccttaaatggtgtggcttcttcaagcattagcatttcaaaggatgatggttggggatcgtcagatgatgatacagatgccatagatcaagatgctgaccctgaagctgacacgacaaggttgagtttcaaggagcatcgccgtgcccactacgatgagtaccgcaaggttaaggagctgatgaggactggatcccttactgctgaggaggccgatgaggataacagagctgccaccagctccgaagacaaaggtgtggggaaaggagggccgaatgataacatgaagccctcgcctcaaacatgaggagttcatatgaaggttctgattcctctgttatttattgtatcattgtatgcaatacagttgttactcttgttttgttttgagatgctggtgtgccaaaatggatttgatgaccgataattttattggtgttggctacctggtcgaatggtcgtcgctccattttgttggtgacttaacaatttcaattgagaaaatatgtttcaaaccgagcaaactgcttgatgctgaaatcagttattcgccaagagtgaatcttcctatca

SEQ ID NO: 34022 - DNA, 1447 bp, Zea Mays
gtccaacgcagccaggatgcgacaatgcgaggcaggctgcttcatgcgtgaaaccaatcgtttcttcggcccggcacatgcaagcagccatgggcgagaaagaataggaccgccgccgccgctttgtccctccgttcacaaccttgtcgcacgagtctcttattcgtgacgaggatgacatcaacatgtgcggcaagggtaccgtctctgcggtgggcgccacaacgtggctgggtgggttcgtgggtttcagtacgcccagcgaaatgcaggacatcgggaggacatgccgttgtgtgcgctgctgttagcttcagaccatgcattgacattcacaagggaaaagttaaacagattgttggctctactcttcgggatttagcaaatgatagcatggaacttgtgacaaactttgaatcagacaaatctcctgcagaatttgctaaattttataaagcagatgaacttctaggaggacatgttataatgcttggcgcaaatccttcaagccaggctgctgcactggaggcactacgtgcatatcctggtggtttgcaagttggaggtgggataaatttggagaatgcaatgtcttaccttaatgaaggggccagtcatgtgatagtgacctcttatgtgtttagtgatggcaagatgaacactgaaaggttaagaaaacttgtcgagctggttgggaaacagaggctcgtgctggacctcagttgtcgaaaaaaggatggccgatataccattgtaactgacaggtggcaaaagttcagtgatgtgtttgtggatgaaccaacattagaatatctcgctgcctttgcagatgagtttttggttcatggtgttgatgtggagggcaaaaggttaggaattgatgaggaacttgtggaactattggggcactattcaccaatcccagtcacttatgctgggggtgtgtcaacaatggacgacctagagaggataaagaaagcaggcaaaagtcgggtagatgtaacaattgggagtgctctagatatatttggaggagatttgccttacaaagatgttgtcctttggcacaggaagcaaagtatggttggtcaagtgtgaagaaacacaagttaggctatctccaacagatcctctatctcatctcctatttcaaactattttgcgtcccctattttacactacactggagacagtcttcagtgatgtaattcaaatctgaggagcatgacttgtttgggtttggacaccagggttggcgctaactcaaaaggtggtcaatttgtgagtaatgtactgttcttgacagtttctgacctcgatttgtctattgtaactgaataggctgaattgatgctgatagatacattttgcctgctacaacactgacattctgatttttaagttcctcgtttgagaaaataataatattgatgcaaattttggctct

SEQ ID NO: 34023 - DNA, 879 bp, Zea Mays
cagtactgtatttttttttctaaaattctaagccgcaaaaatccggctccacaatcccgctgttcgcgagccactccctctcacgagtgacgacgaaaccctaggccatggcttggcgcggcgccgcctcccgctccattatcgccgccgtccgtgctcgcgccgcatccccgtcttccaccgccgcctcgcgcctccgctcgacggctccacttcccgccccctcgcgccggtccgtccccgccttcgctttcgcgaccgcgaggccgttggcggcgatgtcggggtccccggcggcggccgtggtgaagctcaccgggcactcggcgacgagcgtgcgggcgtgctgtgagctctcccagggtaccctcttctgccgcacttgtcaggatcgctagcaagcacttaatgcgcacttttgtccttaaatgcaaggattggattctttggaggttgcatcccttggaaactcatcgggcttgcgtccttttccatgcattttgcagagtacttagcgcctcgtgtgtcggcaaacggacagtatatctgctgtaacttacataaataatcatatgttagcctgctgctactcactgccccgcatcgattggaactaagttgatgtttggttcacataattgtataacgttaaatcatgtttgtttaagtctaaccttaatcggattccacactaaaaactgatattggcctattcaaatttattactgctgttatttatgttatattttgttttattttgcgaaccaaacggcactgtacaaattgttcctttgtacgagctcatgaaagaggaagatttttgtcctgcccgtatttgtattgtggttggttgatgttatctaatatattctaacaaat

SEQ ID NO: 34024 - DNA, 1830 bp, Zea Mays
attttggtgacctatttcagcaaatttcgtaaatatatttgggtactgaagaaagtgcagagaggggggcaaaatggccaccttctcctgctctaagcttatttccacatgtgagcagtgagtttcgactggatgatttccttgcgcaacagattgtggcctggagagtaaaatgctcttagactccatgtgtgctgagatttatcttttttttgttaaaacaagttttttttaataattttgccagagcactgcctttcagttaagcaataaaagagagtttatgtacaaggtcacacttaactgccaaacacagagtattcccatcccaacacctaggacctagcctctcacccctgtgctaaatcaagctttggcagagtgcacgcatcaagtttcatgttgcactttgttctttccttatcaaaacttctgttctaactaacattttttcttcgtttgcatgtgtggattcataaatagaccaaacatgatcacacttacaggattttcgtttctagtactatcagcgctgcttggctatatatgttcgcctcaccttgacactgctccccctagacttttgatgctgttgatggtaaacaagcaaggcgtactagctcatcgagtcctcttggagaactttttgatcatggatgtgatgcacttgcgtgtgctgtaaggattttctaagccctttcacctttttcttctccttcggcctttgagatgtttttctgatttgttgttagtttgaagcattggcccttggaagcaccttgatgtgtggaggatggacactttgtttctgggtagttgccgctgtcccgttctatcttgcaacctgggaacacttctttacaaatacgctcattctgcctacaataaatggaccaacggagggcctgatgctgatctatgtatcacatttgtttacattttttactggcgctgaatggtgggcacaggattttcggaaatcactaccctttttcggttggattccacttccatttctttctgaaattgaaattcctttatatgttcttgtgctgattcttatgatcgtatgtgctgttatacctactgttagatccaatgtcagcaatgtccaagaggtagttgaggcacgaaaaggaagcatggcattagcattagccatgatccttccttttattgtactgttagctggagttgctatctggtgctatctttctccttcaagtataatgaggaaccagccacatttgctcgtgattggaactggctttaattttggatatttggtgggaagaatgatacttgctcatttgtgtgatgaacccaaaggtctaaaatctgggatgttcatgtctctggtgtttctttgttttccaattgcaaatgctctcattgcaaagatcaacgatgggagtcctttagttgatgagcttgttctgctgctgctttattgtgcatatacagtgggtctctacctgcacctcgctgtgtcggttgtgcatgaaatcaaggatgcccttggaatctattgcttcagggatttttggccaagcctgagcctgacggctgaacgcgtcggccggcccctgccttctgatagctcgatagcagtcgacggcctcttctccgtctcgtggggcgtttgcgtcgaggaagaaacaacaatgcagcctttaagccttcaattctcaggcccagtttgctgctttgcatgcttgttcgtctctcaggctcttcacggtcacggcgcagcgacctggcatgttaaaaaaaatgggccgatatatatatcatgtgcaggttttctttaccacaaaacttttgcctagc

SEQ ID NO: 34025 - DNA, 771 bp, Zea Mays
atggcgtgtctctgctccatctccctcgcggcgccctttccaggcgtgctctctgctgcatctcgccatcgacgctggtcgagtcctcgtctccaacttcctcacgctcggctcccaggttttccacttcaccggctactgctcttcctggattgaaggtgagcctgtcaacctcacggaagataatccagtcactcatggaatcactgctgctagacacgatatcctacaatttggattggcttcaacacctgcaatgttcaatagtacacttacagaagatgagagtagtcatttacctgttgttggagtcataatgatgacatattattcagtcaaggggagattccaagagtggtggattgaggagaaagtgaagctcagttcaaagttcgtcaggtgttcgattgaaggcttcaatcagagactgtcgtcattcttgcaaatattaagtcaagttgattatgcagccccttactcctcgtcgtcgatccacgccgcgtccacgacatgcccgtcgatcccgacgatctatcttcctatgcgcgccacttgcgttgagatccgaagctcccctgtcatgctcgaccctggaggtctccaacttgtcgacatcccttacgtcgtcttaaaatcccaagagtttggataaaccaacaaatcccgtgtggtgcttgccgggtgctccgcaaaaaggtcttaacaagaatcattgacgtctgcgcgaatttatggtcaatatggtaatcatactctgattcgctattttgg

SEQ ID NO: 34026 - DNA, 2733 bp, Zea Mays
cagcaagtttgtagcagatagatcataccaactctcatccggtccggaaggcctctttttttttcccttctgaaacgcattttattgtttttgagtgttgtattacgtgctagaaggctaagtggaggcagttgcggggatctgacattcacgatcacttcgatgggtctgaagtgcctagctagttgctactgataactctgtagttttcaccattgcattgtaaatcctggcctgaccatgacttgaataaccaatgtctgtctcatgggtatttcattgctaatgattggtgacttaatttgcttgctcatccagtttagttttttttgggggttcgagggttgtttttatgccataaatgatattgtgctcttagctatagtttttgtatacctccagtacctaaatatttgaagcctgaaggcctgctaacatgcttccttgctagtttttgtgatcagatattcagatcactcagacactcactataaaatttctagaagcataaaccagtcgaaccagtgaaaggttatttggatatttatatttttgcacagtaccatcctgatgtcaataaggagccgggagcgaccgaaaagtttaaagagataagtgcagcatatgaggtgctgtcagatgaaaagaagaggacgttgtatgaccaatatggtgaagctggggttaagagtgcggttggaggctcgggtggagcttacacaaccaacccatttgatttgtttgagacattctttggaggcagcatgggtggtttttctggcatggaccagagcacgtttaggacaagcaggcaaaatactgttttacagggtgaagacatcagatatgatgtggttttggggttcacagaggcgatatttggaacagagaaatatattatactatctcatttggaaacatgtgatacatgtggtggttctggatcaaaagctggctccaagatgagaatatgttcgacatgtggtgggcgagggcaagtaatgcgaactgagcaaacaccatttggtctgttctcccaggtttctatttgccccacttgcgcaggagagggcgaagtcatctcagagtattgtaggaaatgttctggagaggggcgtatccgtgtcaggaaggagatcaaagtaaaaatccctccaggagtgagcaaaggcagtactcttcgtgtacgtggggaaggtgatgcaggatcaaaaggtgggcctcctggagatctctttgtttgcctcgatatagaggagccatcagatatcaagagggatggtataaacttgtattcaactgtgtcaataagctatcttgaagctattttgggcaccattaagaaggtcagaacagttgatggaaccaatgaccttcgaatacctccaggtacccaacctggtgatgtaattgccttagcgaagcaaggggttccatcattgaataagccgactatacgtggtgatcatctgttcactgttaaagttgcaatacccaagcgcataagtgggcgcgaaagggaattactggaggaacttgcatctttgagtaatggtggctttgttcgaacagatgccaagccaaaacctgcccagccaaaacgtgtacatctagagaaagaagttggtgctagccaagaagatacagacaaatctaaagcagcgggtgattggttgaagaaacttacacattttgctgggtcaattgctaatggtgctgcaaagtggctgaaagaaaacctgtaggctgtaaatatttactgcaggatagaagatttcttcagttaccatggtgctgtagtccaatctccaattcttagattcattggggtccccaagagctcttacatttttgttttgttttgttggagagtttcaagattttcaggctgtgagtaacaaccgagggagtgagaattgtctactaatactgtcggcatattggtcccttgtcattcttgcaaagcaattattttttatgtagttggagttattttcagtttggcaagtgcatgcagcagtctgaaagagtgaaagttcgccctgaaagttatgggatgctgctgctggtcccaaaccttgagacttagacaacactgtaaatatgtctctgttcctgattctgtacttgaggttttgggttaatcaaattcaagatcaacgggcgttctttttctgatttcttctggagctgcaaagcttgcatcgagcgatgccaaaaaaagatcattcagcagagttcaaacattttcatcttacaatgaagctatcattagaaacaagtttcagtaatctcgaattctaggtttcgtggagtcctcgcgtcgtatcactatcaatccaccgagctcgctttgagcaaagccaagactgcggctaccacgggcagggacaccatcagcagagctaccacaatgtttggcctcgtgatgtccgggagcaggatgcttccgtacttgataaccgcggcgccaccaagggacccaagcaccaatgtccacagatagccggagtcatcaccctattcatcaacacatcataacaaaggaaggaaacggactataaaattctttgcatccaaataaatgttgctatcgaactagtcgctcacaaggatgaaggatctacagccacaatggttgctgttgctgaatgttgacaagagaatgcagaggtaccttgaggatttgccccacgcccgcgtcggtcccggcctcgccggggtcgcgcccgg

SEQ ID NO: 34027 - DNA, 313 bp, Zea Mays
gtcctggtgccggcgttgttcaacgccgaaattccggtccaatgaaaattcggccacacctgattcctttgtgtgcacggtgaaccttgccgaggtgtgagtccagccaccctccttgcttcccggtggacgcgcgacagcggctcgcgaaatcatgcagctcggctggcggtaatggtggtttcgttggcaatcgcgcgggatcagggtgttctcgttcaggggcgagcggagggtgccgaaggcatatatatagccctggcagacgaccccgaacgcgagagctcccatgcccatagctggtccggttttc

SEQ ID NO: 34028 - DNA, 3870 bp, Zea Mays
atcgacgaggtagaccaatagaggtcagaggttcggattggtgggtggaggttggacatcagaggctgatggagcagaggttgggggcaacgtatcagtggtggtcatggagtcacagtaagagctgtgaatcggtggagcggaaggggcgggagtggctggatgaggcaggacttgcctctggattacagcttgtattggatatgttggtgactgtgggagaacctgagcttggttcaagccgcggacctgtgtcatggggcgtggcaggtttttgtggagtgactgttgctgagaagagaccaatgatgcaatctcgtgatgttgataaatatttgaacaaagctgacaacattaaccatgtgctcatgaactctggcgacatttctaaaattggtggtcactgcctgcatggtacacatggtttggggactcggctagattctgatgctcagagctcatcccctggagaaaatatgaacaacaaaatcagaaggcccatcgaaatatgtacctttgatgctcaaggtcggtgcaagaaaggaaagagttgcatctctcttcatgaaagggagggatttggttctgcaaagactggtctgctcgcaccagctggttctggaaatcatagaggttctgaaggaggttctcaagtacaacatatatctgacttgaaagtgcatcagttcaaggattcagagggtttgtcaaaagatgaaatgtgtcggaatcttatttatgcatttggcaaagataatcagatgtcggtacatcttgctggtaaacacagctctcccattcctggggtttcacaaaggatgcccgtcagcattggtcattcattggctcagaatccattagttcatgagaagaacaacaaacgtttcatgggacaccatattgatgtggctgctgaaaactatttggatgctggaggtacctatccaagattagatggaggtatttttcagtttgacatagacaaggaaagcagtgttagtgattcccatgtctcaagaacttacctttcagattatccatataaatcatttggcttgtctatttcatctgatcctctccagctcagtgagaagctgtcagcatatggtggagtgacaaatactattcctaacatacatcagaaagaacatcactcatgccatgcttcatacagctcacatagcttaacaggatccagaaatccttgctttgctacctctgaacatactttcggtagcccatctcttctagcaacttctcatctgggaatacagtcccatcatctgttcacatctgatattgagaaggctgatctccatagatgccttgatgttggaaagggctatggtacttctagttctggacccgcattgcttgtgagcagtaaacctgaaccttctatgacgccagttgggccccactctccaattaagaatgaggtctgggaaacatcagtgccttttgtaccttcttttagttttcctgatagcacaacagcttcagaaagtcaatatgatccatttgttgactatgttgaacctcctaaagttgggaatacaaataatctcaagccctccactatatcctgcaacattacaagtcagcatacagatcagtacgcagttactgataaatccttgaattgcaatgacaaattgaccaggaatataactgccaaaggatcaaatgaacctgcttactttattgctcctgatagaggatgcagctctagcctggatgatactatcaaggtgaaagcttgtgacagaaaaaaggatgcagttgattacaatgagaaaacaagggatttccgttttcatttggcagaacatataaaggagttggtcaaaccaatatggaaaaaaggtaatctgagtaaagatgctcataaactggtagtgagaaaatctgtcgagaaggttgtggactccattgagccaaatcaagtaccaactactgaagagttgattacgaagtacatagccacatgtggaccaaagatagaaaaacttgtgaaggcatatgttgataggcacagtacatgtcatccaaccatcaaatacagcagctctgagatgggagcttgagcttaatggtgatgacagcttgaaccttctgtcctaccaatctggttaaccttcatttgtaggcccaacaagttaatattggaaagctggagatggaagcgaggaggaattaaagaggacaataaacaaagcagaaaaccatacaggcaatgacaggttgtgcgaggggttgtgtacttgtgtgagaggctgccgcggacgtgtggaacttagcgggtgttgtcatagttcataaacaattcgtggagaaccaatctagcaagctagtagcctaaaagtggagatagccgatgaggtcttaagatgcaactgaagcaaaagaggctactacatcaaggagcagttcaaccactcatttgatggcatagtccatttgatgaggtcttagatgcaactgaacccactccaaggggtttgctcaggaacattgacttgaatttagatccaactgatgaagaagatgagattacagtgccaccccaagcccagtcgatccagcgactagttccgttgcagccactgcgggaccatctgttgcactttctgggtgcttgggaactgcctgacatgaacaatatggagatgggccctgtccagtttgctttgtaaaaaaaatacagattggagagaatgggtattatgacaatcaagactagctctgcccttatagctttcagagtggataagtaggatagcaggacagttgtaggttcatcttaactctttagagattctcatgtatcatgtgtatcatagccgccaaagctgcagatgcagcttataatgtgccagaggtttaaggttggctggctagttgactgtaacgttccgaagctagattcgctcaacacgtagtgctttggcatgtagtaccagttgtacttgtacactcctgtctccagttgctctccagtttaatgttaattatatgcttatgcttcattggatagttgaggaagatcttgctggatgcatgtatggcaaataaaaagcaagaaagagtttcagattacttatcacagctcattccatgacaggagtcaatattttcatatatgatagacctgcgaaaagattgcgagccttcagggataacgcgtcatcatactgggagatgatacctttatttcctgaaacatggttatccaagcacaaggaaaaagttccagcagtgattgcgactcgccagctcaaggtgactgcggaatccaagatgggatcgatgcttctacagctgcttgaagttgttccacaccgcccccaccttggccttgcacagcttctttccgctgccggcatccacctcgacagtaaaatgcatggtcctggcatcacgttctgcacatatattatacatgggatgcatcagtggtggctccaacgatatcaactaggtttatgcagagtgacatgtctttcggtcttgctgttgtgctccgtgaccgtgactgaagcacgcgagctcaatggcctcgaggtcgctctcacacccagtgggtgcgttttggacgtcgtccaccatcccacaggccgttctcgtctcggccatggctgctggagcctgtggagagggagaaaagctgtgcagagggagaaagaggaagctgcggcgagacgagacagacgacgacagacactcctgagtcctgcttgtagtagtagagcaccaacaacgggctattgcataccatcaatgggcaggtctcctaatctagaagtgaatttactttctgccaattcttccattatctgctattgcatagctttttcattacttcacttc

SEQ ID NO: 34029 - DNA, 3363 bp, Zea Mays
ctttcacatggcctgccgtgccgcgtctctcccacgccactctcgccggtcaccagatcgtcgctcgcttccgttattaacccgttttgtagctgattccggggctcctgctgcccgcggtccacccttcggtcagctaataacgcctccgcctcttcccttccctcccttcccccttgggcttgggccctgcccattaaactcgagcagggcactgtttctacaacgtttgccgttctcgaccgaccattgatggccacgaagagttaagccctgctctgggaagggcactgtttctttagcttccatgcgtagtaggcacgcggcgcacgcaggcaggcaggcgggcatggaaaagggaactgtagcgcccacgcgttaccgaccgagagagagagagtcgagcgagtcctccacgtccgcctccgccccccaaaccaaaggcatacaagccgtcgtgtgttaatggaaacggacaagtgtgaggaggaggagcaaagccagcagccttttttcccttgacgcctcgcctcgcctcgccttgctgccccctcctcccgttctcgaacaggtcaagccgcgcctcctctcgcctgcctgcgtccttgctcttcctcctcctccctttgcccgtcgtccgctccgcttcgttgtctcatccgctgccgttctagcaagcggggcagcgtcgcgcctcggcctgatgctccaccacgctccagtccacagcctccccggtccttctcgttcccgttgagagcggcggcttgcccggcccccgggtcctcttcacctcacctaaccttgtttctagtttcggtccgtcggttggtgcctcgtcggctgcctctcgctgcttggcccgtttcttcctggggtcgcgggcctggagtacacaagtatataatcttcccggccgtcgtcttctctttctcgacctgcctctcttcgcattggcccgttcccgttcctcgctccctgctgctccttccgagacagactgcctgggatcgaagcacacgataggagagacctcctctgtcgtctgtgcctgggtgagaggtcgggtggtggtggcagtgcttggatgcttcacgcgaggccttggatggtggatgctgcgtgctgctggtctctgcgctgcgcctgagagattagtttggccgcatcctccgtatcttctacttcttgaccagggatggagcttgtatacatggaaaggagaaacggatcgtacgacgatggcgcggttccagagttcagtggaaggggggctggaggggatcaggatcaggacccgcccgctgctgcatccgaggtccagtctgactcgcgtcagacaccggacgagaagaagagcaagggctgccaatcatgccgtgacccattctgttcatgcagcggcggcacgccccactcggaactgttccccccacatcccgccaagatgatgatcctggagttcctcatcgcgagcctcaggcacccgacaagaacccacaacgtcagtgatctcgacgacctgatcgccgacggggtcagccaagggagcgtggtaaacctcggcccttctgagaagaaggtgctggaatctctgcacgccatggtaaacgccaagacgaggccgaagagcccgtcgccgttcatggcgggatctaagctgaggaaaatccggtccaagtcccacgtcataacgcagtcggaaatactgaagctcatctctcctgagacgtgggaagcctcctccttccctggggcgtctccgatgatcggcggaggcacggctgaggacggcgtccatgggaacaagccgccgccgccgtgctgctcgtctgtgagctcaaaccagcatgttctgtcacggtgcccgtcgtccctcagcgcatgccttctacagtgcatatggaaggatggcctgcctcattttgagctgtcactggacgatcatcccattgcggtgtacgctgcaagtccagtcagggtgctggagaaggacagggccttcgactacgtctacatgatccattcgggagagcaaggaagaaaagactggatgggccactcgagcaacgtgtccagacttgtgggcaaggtgaaggtgtcaagttctcttgttcttaacccagacaagtcaggtcttttggaaaccgagtttgttctgtatggttctccggacgactatcttaggcagatgcgcagtccctacagcgtgccgaaagggaagggccttgtcaggagggtgacagagatcatgagagcaggcaatgtttccgctagcccgagacatccctggaagctgggcaaatcttcctctcatcagttcgacgacttggctggagtacttgaaggtgaaatgatcagtgctggaggatcagacctggtgagtctcaaggccgacgatctgccgtccaaccaagaattagcagcgattgtggtgagggaacagcggcgcagacgacggaaagagcctgtttcgggtggctggggcctcaagttccttgagaaagcaggactgaatcgcccacaaggcactgaagaaactgatgttcagaacagtgatggtgccacacattgtgtaactgttgttgtccccagaggctaccacggcggcgtggtatcaaagagtagtcgcccgtcaggcctcgtcgagagatggagatctggaggacgctgtgactgcggcggatgggatcttggctgccccatcagagtgctcaacggtgatggatgtggctccttgcctgaaggagagtcacgggacagaaggtcggtagagatatcgatcaaggtaactaacatcgagcttgtttgcagtaaacttttatggttttctttcatacatcgtaattgctgctaagccatttgtggtttttgtttatgagtaattcagggctggtctgatctttacaccagtactttgcagggtgcaaagaatgagacaatgttgaagctcgtgaatatcacggaggacttgtacatcctctacttcgactcgagtatttcaccattgcagtgcttctcaacagggatagcgattgtgcacagccgagcgccagagctttgccccaaactgtgaattgcgcacagccaggcacgcacccgagctttgccccccaaactgtgaattgcaaagcttggtgtagctgaattacaaagattcgtgaagcactatgtacatgtagatagtagaatgggaataattcttgttatttttaacttatataattttgagagagaaaagcaggcagctgttttcagactgcttttaaatcatcaatctgttggtttggccgattgagcgaaagctaagaaacatgaattacaaatcatgtttcgttaacaattacgattttttgaatccct

SEQ ID NO: 34030 - DNA, 1578 bp, Zea Mays
gtcgcccgtcgccgtctcccccctgtccggtccggctatctctctctccctccctgctcggctttgacctcagctcgcaatgaactctctactgcggccgccgctgccggggccgacgcctagactgagcgcgaggcgtcgggtctcgtcgccagcgccggtgcgggtcggctcggcggtgctggccggcggcgagcgcagatgccaacgggggctagcagtggcgacgtcggtggctccgtcgtggatggaggaggccggggtggcggtgctggaggagggcgggcggaggaacccgtcagtgtcggactcgtaccgcgcggcggggctgccgcagcccaacgccacggtgctggatgcgcaggcgcgggtgtgcacagggcccgcacagacgcgcccgctcggggaggagcaggccatgcgcgtcctcgacactatcctccgctccgcaattggagaactcaaagaggagccagtctctagtgcacagttaggtgcattcttcgcaggcatgacaataagagctaactcgtttccagaggccacccaatggagtgagggcgagcgacgcgccatgagcatattttggccacgccttgtgcaggtccttcctcctgaggtgaagtttatagcagaccctgaaggcacgatcttgggtgcgaatggtttagcagagcctcggtatgttggccaaggaactggagagatgagactcgtcggtgctctgagggaagtgcttgctggtggccatttaggttatgaggaggttcaatgcgtactaaaggatatcctaccaattggatcgagttcagattcgacagtggttagtcaagcactgctagcggcatttttgattggacagcggatgaatagagaaactgatcgtgagctcaaagcgtattgcctagcctttgatgatgaactaggtcctcctccggttgctgacgtcaagtcgttgacacactatggtgaaccatatgatggcaatacacgtttttttaagagtactctatttgttgcagcggttcgagcctgctatggtgaatcctgcctcctccacggtgttgaatggatgccacccaagggtggaataacagaaggacaaatgcttaaattcatgggtgcaaacatacacttatccccaacacaagccaagatattgttggaggatgaaactgctggttttgcatacttgaatcttcaggaagcttgtccaccattggatggagtcatgaacttttcttattaaaactgcaagaaacatatattcgattattggactcagggagcatattaagaaacggccaccgttggctacctctgagaaagttcaacaatttgtgaggttatgcctatggatacctttaaagattgaaaactttaccttgaaagaattttcagagcctcctgatctttgaacaactaataaggtaaagatttagtaaatcactgtcacactttcttaataaattgccaggtggtttactagctttagctttcacctttcaaagtatctcttcactaggatattttacgcaaaaaaaatctcgtgggacttttttaaggtttaaggactgt

SEQ ID NO: 34031 - DNA, 3862 bp, Zea Mays
gcaaggttctgcctggttccccgccatcaacgcccggatccccaccctccttcccaccgccgccgcaatcaacgcgctcctcccccacgtggatccctccaccctcctccccaccgccgccgctcgaccgcggtttcgtcgcactccttccttcgaaagcgctcctttccatcctcgattcctccttccttccatgtcgctccttccttcgacggccagcctcatccggtcattcctcctcgctgtgccccctcccccgtattcaaccacctcttcctcctgcggatccaccaccgccgtcctcgcccaacgtctccttgacgcatatgcccgcagcggctccctcgcgtccccaatgttgagtctggcctgtatggaaggagtgcgggcgtgggtggagtgtgtagagaaatccaagcgaaaccccgtgagagcgaggtgacggcagacggaggcgagtgggtgagctgcgggcgagagacgaggtagcgggctagcggatggcgtcgctggttgtagtggccgcagcgctgctggtggcggcgctggtggcattctgcggcacggacccgctctggacggggttcgagtcccacctcgtcgaccttcccggggttcgagtcccacctcgtcgacctccccgatcccgccgagatgtcgacgcacgcggacgaacgggagtggctccgcggagccgaggtgcaacccctccaaaccggcgttcaaggacggcgccgctcaccagttgtatctggttgtgaagaactaggggtgggagcgcctgtatggcgggcttatgccttctctcatcggcaccgctgcctcccaggagagggcttggcgatgggtctgttgggatgctccagtctctcactgtctactactacttgtaccaaatatctactggactctggatgggcatcgaattttatgctataaacaccgattcccaagcccttattaattcacaagcgcaatatcctctgcaaattggagagcagttgacccacgacttaggtaccggtggaaatccaaatttgggagagcaggctgctgaggaatcaagagaaaccatagccactgccctgagggattcagatcttgttttcataacagctgggatgggagggggtgctgctccaattgttgcccagatatcaaaggaagctggttatcttactgttggtgttgtcacctatccattcaatttcgagggccgtaagcgctctttacaggcaagtatctgagccccccttcactcctgaattagaattcaaactgtcatatctcgttttgcgactttcttttgctccatggaagcattagtttgtagtcataacaatgacatccaaccacatttattgttgatcatgtatacaatggtcggtcaaataaaggtagcatattgcgagggcggtcctcgtcgctcccatgtgcaggatctcccatgtgacagatggcttggcaagattatactagagacttgtatttctcagatccatatttggcttagaggcacatcggctgaatcgcatcgacgaccgatcataaagccgcacagctttggattccctagaaagctggagttctgaaatgtaccaaattgaccaccggttggaataggcccctctaggtcattgttagaaacgttgaatgtggaaaggaagtgcagattctcgaatgcaactggaattttacccgtgagatcattgctggataaatctagcatccagcaggtttgtgagattgcagatagatgtggggatcggtccggttaagctgttggagctgatatcaagtgaaaggaggccttttaactgaccaatctctgggagaatcagaactgtgaatatgttgctgcttagatttagaattttaggaaaagcaatcggtatccggtacggtttcttcaaagaaattgatgccaagaagaagcgtggtcaggttcttagagctcctcagtatctgaagcgtgtttgttatatttgaaaggctgttgtttgggcaaggcgaatcaggcaagagttgatgacgagcggctaaactaatccaagagttgatgacgaccggcttgttctttcacttgcaacgacttagagtcgggcgacctgcaagatcaaggtgcatggtcgtcgaaggatggcgacggcgtatcctcgttcaggcaaggcgaatcaggcaagcatctatttggaggttggttagttatcccatgtcatcagacatcacgcaggaatcaagtcatccatcaggaagcagccaactctgcctggactaacccagggcaaaggcaaacagcaaactttccaggataagtctctgacttcgttatactttcctgtgtgcaggaggtcttgaagatctggaactgcaggtgcagaatgctattgcagcagttgcagctccacccaaggaaagcaatagtgtcagcagcaacgatcctggtagctcgtcctctgtgatttttccgtctggtccagctgatcaagtccctgttcctgctacctctccagaaattgagccccgttttgcaaaccaaatccctgctgcttcttcggaggttaaggcaccatgcatggcaggtctgttgtttgtaagcgacaggaacgagaggaactttaggttgcctagcccttctgataattgtccatggaacttattcgaatctagccgtagcgcagtcagctttctacaggagtatatgctttccggaatcgtgccactgaagttattcagcatgagatctatggttcttagactgggcatattgctgaataactatagttggtagatggtctcgctacagtagacaggaaaggcaccatgcctggcactggcaggtctgcagcgaacaccgttgtatgtgtatgtatagtatgcacgtgtgcaattcatattagcttaacagcctgtgtaacaaaaacaattacccaacttcccaagatagttaatgcactatatatccaaaacctgatacatgcatcaatttgtcttaaaaagtacattcataaaaatataaatgtataaagagttcatttgtattttaacaaaagtctttggtcaaagccatattctggagaccgtgtcagtgtcctagaccacaaataacattggagggagtaaattatatctcatgtctatcaacgaagttttactttttaggttctattaatgtctaattcttgtaacccctcttttttggtatctcaattgttgcagttaggaaaccttccattacggccttatttctgcagaagtatgacaccaactttcatctattctctaccaccaaagagatggaaaagcaggttgcccccacccccatagctttctgttttgtccctataacaggtttacctatgttatatatagacaccgtagcaatgcacgtgtaatggtagattttctgattggttagtttggaagtgaagtaggtgccaatgttgtgcatgagcagaagaaatattattcccttcaatattagtagaggtagagatatttacttttatcagtatttgtgttgtgatagctatttttagcctaatgtttcaggtcaaagggccatacttcatagctttttgctcctcattgttttaagtgaaagggcgccaactattcaaaatttactctaggtagataattttcattgtcgagttttattttggtatatgtaactttttgtaattgggcctaagcgtattggagcactctaagttaacaggtgcttgaagctgatgatgaaattatacagcttggatgaataaacctttgttgtagtgacataaggagtttcgaaattacaaggaattttaaatttgaatatttttcagtgagatgttgaggttgataattttaatctttg

SEQ ID NO: 34032 - DNA, 1790 bp, Zea Mays
gtggcagaggacaaggtcataaaggtcacaccacggaacgtgcacacggccaagccagcatcggaggttttcttcagccacaatgcgacgtcttcagggaggtccgaggagatcattggcctggccgtcagtggcagctactcgtctctcttcctcaccatcagaaaccggggactcttcgccttctcgctccgaggcgagctccaatggagcgctgggcctgcgcttgatttcttcggttaccgtcttggctgcaagagaaacgtctccggctgctatttcgattcggctcctgttgttgatcagtgcgagggggtgctctatatatccaacactgaaggccagctctattccctgtacatcgataaccgtggggtcaggtggatccaagacttgagctcacatggcaaagtgatgacagttgcgccgggaaacagtgggtgcctatacatcgtctttccacggaagtctatcgtggtggggattaatgcttcgacaggaaacatttcttggacgcagaatactggcccaatcagtaatgagaaaaacttaccaactgtcgattccaacggttggatgtcaattggttcgctagatggggccctctactcgatttctcctgatggtgagatgagaaagtttcttggagaaacagcaaatggttcagtgatccatgtaggtccagttcttgactgctcaggactttccatgtatgtcgctaagaccatagcggaaggaaaatccatccagacaactggtgactatacctatgtatcggtgaagaagccatcattcattttgttcaccttgttggctcccgcaactggaactatttactggactggagagtatcctggggaactgtcaaatttgctgtccagtagtgatctggacgactttaccgtagatgagactgttgttctaactcttttatctgcatcaaagacagggatcagcaacaccacacagtgctgtacaagaaggcaaaagattgcttcgacttgcaggcaagccaaagccaagtttgtgcaggctgattcaggagaacctagctatgttctattgttgatcttcctacttgtggtaatcgtaatagaagctgtagccatttcgttatgttgcatattttgggcgaagaaaaggctccaaggcaatggattgcagaagttcctggagaagaggcactcacttcacagcaagagaagaatcttaggaaagaagatctcggagctcgagcagaaggcagctgaagatgtctcgtcgaatgaagctttggggaagctgggtgaaatggtgaaagccaaggaaagcgtggagagaaaactgtccggatcatacagccttggcagggacgagcccagcttgcagcagcaaggctccttgccactgtaccatggcaagtacagcagccattcgttccacagctcacagaaagagagcattacggttttcaacgtgctaagtgacacttctacttcgggtgatggtaccagtagctgttcttctgatgatagcgactacgagagttgcagtggtacgagctctggagaaatggaactggatgtgtggccttctaggtcagcagaagaagctgggcattccaacactgcaaatgttgaggaggaaagtccaacatgaactagaaaaacagcaccagcattgcaacacctcgtacccttgttgctggaaggacaacatattgcttgtagcagacattgggagttacatatagtttcaaatgttggtgcataatatggtggttatcgcaaagcagcagcatgcaaagcctg

SEQ ID NO: 34033 - DNA, 1360 bp, Zea Mays
gccggggacggacggttggtgcaactggaaagcgaggcgttttgttttctcccgtgctccccctcccggggaaggggcaacgagaaatcgaacccacacgcaacgcgacgcctccacccgctcgcctagtccagaatccagatccagcgcccgcatctctctctctcgcgcgcgcgcgcgagcgcgatgagctgccgcgacgggcgatcgtgctagcggtaacagcgagcggtgcgcgagggcggagtgggagtgtggatccgaggggcggcaaatctggcaggcgccgcggtggggctgcgggcgcgggggagggcggggggctgggcggacggcggggagggaggggaggactgcggtaggctcaggccctggcgcaggaggctgctcgcgtccatggcgctctcgtggtcctcggccctccgcctcgccgtcgccgccgtcctgctcgtcgccgtcgtcgtcgcgctcttcactctccccatcgagaaggaactacttgcatccagctcacggcattacctgccctggtagctttcatcttgactgagagaatttttctctgtatacaatgtgctatgggagcatgggtctatgggaaatataagaaactattcagagtcaggaggtataagaaacatattttgagtcctaatgttcctttgttacttgtccaattttttgtgcctatcttttacaatcagatattggtcctaatccttcacttttgctttttgtagagtttgatctgatccaagttgagtgccatgtttattttgaaggactttctggtttggatcaaggagaatttgggtccatggggtcctttggtgttggccctcgcttacatccctctgacagtcttagctgttccagcatcaattcttacacttggagggggctatctatttggcttgccagtggggtttgttgctgattccattggagcagcaattggtgcgactgctgcatttctgcttggcaggacgattgggaggtcttatgttctctccaaatgcaaagattaccctaagtttcaagcagtagctattgccatccaaagatctggcttcaagatcgtgttgctactaaggcttgtacctttacttccgttcaacatgttgaactacctgttatctgtcactcctgttggtgttggagaatacatgctggcttcttggttgggaatgatgccaatcactcttgctctggtgtacgttggaacaacactaaaagatctatcagatgtgacacatgggtggagtgagatctcgactactcgacggattctgataatatctggttttgtattatctgctttaggccttgaggagcagataaaactgatattcaacttgag

SEQ ID NO: 34034 - DNA, 1535 bp, Zea Mays
gtggtggtaaaaggacggggattggacagcgacgctgatcatttatgccgccgtctctcaagctagctggcagctagggtttacaccgatccggggtccggtcgccgccggccggcggaagcgggcaatcgagctccgcgacgtcgagatctgcttaattgctaggtggtcgccgcgccggcagccccggcacagagaaagtcaattgctctttgcaggggttgctgctcgttttaaaagagatccttggatgatacaccgacacgcagctagccagcagggacaccgcgagatggcgggcgccgtcgggctaacaagacgatgataaggggcggcaaccaccagcaggcggcggacgtcgaggaggagctagcccggaacagcaggcacgccgccgccgtggcgacgtcgcggcaatggtcggcgcagacggagtcgcgcatcgtgcgcgtctcccgcgtcttcggcggcaaggaccgccacagcaaggtgaagaccgtcaagggcctgcgcgaccggcgggtgcgcctctccgtgccgacggcgatccagctctacgacctgcaggaccgcctcggcctcaaccagcctagcaaggtcgtcgactggctgctcaacgccgcgcgccacgagatcgacaagctgccgccgctgcagttcccgccgcaggacctcatggttgggcacctgacgccccacaacatgccgctgatggtgcacgacgagaagttcggacacctcgccgcggccgcggcgctcgcgagcggcggcggcggcggcgccaaggtcagccagcagggcaacgtcgtcgacgtcgacgggaccggagcccaccacttggtggggaggttccccggcggctaccaccggttcatggagctgaacagcgcgttgggcatggtcagtggcgcaatggcgccgccgtataacaacaactacaccggagaggcatggaataacagcggcggcggcgtgcatgacagcggctcgccgcagatcgtcgccgcagccgctcaccactcgccgttcccatcgttgctctccttggctccacgtccgcatcagctggcgttctactcctcggaagctgatcagcagtttcaggtggagaaccttggctcgcaaagcctgtccttgagctcggcgagggcttaccatgatcaggctagctagcggactgcgtactggaacgactcttcgatcgagattaaggtagcaataatgctcactgatcccaaaattcccaagtacaatatactatctagctgtgcaagagtgtgcatgtcagagtttccaagtgccttttaaggatcggatcggaggcagttaagcttgtgatgatttcataattagtagtagacctgaaacagaataaaatgtgcggggcttgatcttgaagcgtacgtgtgtgtgccatacgaatttgttacttctttcaatacacaaaggagtaatattaatctgtatgctggcttgtagaataacaatatatggtttgctaatattacggttttagttataacattttatcttgg

SEQ ID NO: 34035 - DNA, 1182 bp, Zea Mays
ccaccggccacctcaccaactcccctacaagccgccgggccgaacgaccgaagcatccacttccaaagtgtactgtttgctgcccgcctggcgcctgcccccataactactctgccaccaatccggggaggaatcaacctagcggtaagcggacatggcggcggcgaagatagcgccgtcgatgctctcgtcggactttgccaacctcgcttcggaggctgagcgcatggtccgcctaggcgccgactggctacatatggacatcatggcacttcgttcctaacctgactattggggctccggtgatccagagcttgaggaaacataccaaagcatatttggactgccatcttatggtcacaaagccttcagattacgtagaaccatttggaaaggctggcgcttctggattcacattccatatagaagttgctagagacaactggcaagatctcatccaaagcattaaatcaaagggtatgcggcctggtgtatcattgaggccaggtggaagcagaaaatccggtagaattggttcttgtgatgacagtcgagcctggttttggtggtcagaaatttatgccagaaatgatggataaggtgcgcacactgagaaagaagtacccttcccttgacatagaggttgatggtggtctaggtccttcaaccatagacgtggccgcatctgctggggccaattgcatcgtcgctggaagctctatatttggcgctgcggacccaggagccatcatatctgtgctgaggaagagcgtcgagggctctcagaacaaaaactgattttggtgtttctgctgtaaagtactccctccgtttttttttattcgtcgcgttttagttcaaacatgaactagcggacgactgatattcgagaatggagggagtacttcgaccctgcacgtcagatgagctgatcctcacattgcaccggaactgttcggcgagaataaaatttgatgttagaccttgaacgtcttttgcaatatgcttttttgtctgccctgattatattctaccccttcatataacgcttgatgtgccgtcaagaaatggcgaaacattggcatgactgtaaacaagaaactaaatacgggtataaaaatcgtgtcatgtcatgtccatatacttgtggatatctcgtcattatgcattctctcgttgaac

SEQ ID NO: 34036 - DNA, 2037 bp, Zea Mays
tgtggacccctctcccactcccctccggccctcccctcccacctcacatcccttcttgcttctcgcctccccacccttcatccacccgccgctcctcaagccccaagctccggcgatatgtcacgcttcggtcgatccggtccgccgccgccgatccgcgacacatattcactcctcgtcctcaacatcaccttccgcacgactgctgatgacctcttcccgctcttcgacaagtacggcgagattgtcgacatctacatcccaagggaccgcaggactggcgactcgcgcggattcgcgttcgtgaggtacaagtacgaggacgaggcacagaaggcagttgataggctcgatgggagattggtagacgggagggagatcatggtgcagtttgccaagtacggtccaaatgctgaacggattaataaagggagaataatggagccagttccaaggcccaggggccgttccagaagccgcagtccaagacggaggtaccgtgatgattatcgagatgactaccaggatagagattatagaaggcgaagccgtagccagagtagagatagatacgcccgtgacaggtacagagatagggattaccgccatcgtagcctgagtcgcagtttgtctcctgcacgaagaagccctagtcatagccgcagccgcagttacactcctgatgattacaagaggcgtggcaaagacagcagcgcatcacctgcaagtaggagccctagtcgctcccctcctcgcaagacgccaccttctcctaagagatctcctgtcaggcacaatgatgaccggtctccacgctcacggagcccttcaacataagcacaattcacttgcaaagcatcttgaacagctcaggatgaatggacttgctctgatcctatgtgtgtgtggctatgcttgtgctcaatgttacatggagtgaagatatgctggctgatatgcggtcaacatgcacgtagcttactgttgaagttgatataatctgtgctgtttgcgttgttgatgatgatggctgatgagatgatggaactgcagctgactgcacaatttgctgctgtctgcacctattatgctgacaagtaagattccaatgatttagctgaattcagtgttcccatttttcgtgtcataaaatgcatgacaccacgaatcttgaatctacatgcttaggtgttaacacccttttaatattttggtttagaagtgtctgcactgatttatcatagatctgttttggggttgttggatcataagcctacatgtgcattattaattgttgcatgcactggttgtgctgtcaatgcatttctgccatttgccagacatgtcttgtaaagaaaagcataagctcagtcttacttttggaaactgttccattgtcttgagtagaggtgagtgttgtactgttgtttaagctgtatacacactcgtgtcataatgccgttgtagtgcaatccaagttcattgacatgatcacgagtcataaaagggtatcttttaccccaagtgttcattaatctcacctacttatgcttgcaagttaatgatttgcatgaaataaggaagttctctgcattaatgtatcgagagtaggaaaggtatgatggcatgtgagtatttggatttgttggtgctctttacccttcttcagcaatagaaggcgtggggagaagtttcagcgacagaaatgcctgactagttgattgatcttctggatctgaatgctgatgatttgcttcaaagacttagtctcatgtagtcatgtcatttgtggagtctgctgacccatcaggctctggattttgtaacacgaactttgatatgcttctgtgaaaaaaaatgggtaaccttacataagtgtttagacggtttagtggtgttctgctcttttctttacggtactgaaaaacattgactgttagttgggttgttaacctggttgaatgttatacacacttagttcagctgaattaaattgtttatttgattgttcgttgcgatatgagcgtattccctcct

SEQ ID NO: 34037 - DNA, 2837 bp, Zea Mays
gcgagtgtggcagtgccgcccccaccgaccaccgccacaggacctgccactgacggccgcagagtgcctaggatttattgggtgataggcagcatttgcagatccgccaccgcttcgtcatgccatgtgtctttggttccaaccgatgttgaatctgatgtttcgattggtgaaattcagttgcttgatttcgggagcccaatttacctgctttctccagtagccgcaagcctgcaaccacccattagcagatgaagaggcggaatgttcttcttgggatagcgacgatgagtaccagaaattcatccaaaatatgaaccctccaagggtcaccatcgacaacacctcatgtccaagtgctatagttattcatgtcctcactaacctcaagctcatagtcacgaaggcatacatatcctcagacggaggatggttcatggatgtgtccaccgacgaaggagaagccaaagcacaggagcatggtgctatgttcatggagaccagtgcaaaagctgggttcaacgtcaagcccctattccgcaagatcgctggatcccttctaggactagacgcactttcgtcaggaaagcaggaagacatggtcgacataaacctcagacctgccagcggttcgtcggcttcaggtgcagccgcgcagctggagcagaaatcaggcggttgctcctgttgagacttcgacagttttgtgttcagagaagctacaacagtactgcaacatcgagttaagtactttcagagagattgtgacgaagagtgttttcgcccaaacgtccagtagtgatatactgacatccatagcgagaagccaatttctgtgtacagatttgtttagcaagttatcatatgctaggatataactgtttgatacacaagggacaaaatctgtggaggtaagggcatctcacattttttttgatgaaacattagcaggagctctgccatatcatataagaagagcaagctagagtgtcacagtctttattacatgaatgatcaaatacttagagtccatagggaaaaagtgaaaactgttgactatatggctaagagacaatcatgatccatgaaaaattctaatggactcatatacacagagggggctagcgtgcttgagagaataatattagccgccaccgcatctctctatagaggtgtacgtgctcaagtcgccaccgttgtttctgtcgtggacatggaaattatatggcggattgctggacatgtagtattggcttatctggtggacgatagactgcctagaccacatgaattaccaaatacttttgagtctttgacatgcaaaaaagggtgaaaactccattagaaaactttagaagctgaaacaaatattcccttcagtattgagttatattagggtatttcatatccccttcaatattcagttttattagagtacttcattctaataaatcacatccaatttcattctgccaatcatattttctttttatgcaattttattctattgatcctattttctttgttttgtttttggcaatgaggtgtttcagcatcgacattcaatttcacagcaggaacttctccattccattccaatccaacatcgacaggcattccatttcacacagctaatcggtggagggaaaaatattcatcaggaaaccagctaatcgtggaaggaaaaaatattcatcaaagtggatgtcactggatgttttagtggatgtcaactttgtcatctactcgtgtttgataccaggatgcagtgcaaccatttccacatatgtattggctagcattgaactgaggctttgtacagtagtaataagaaatgagaaatgtcgaattcttttagggccctgatttggcatcaattgaaaagacattgactgtatctatctacagggttccacatgcacattcagcgagtcaatcctgggatcgtgtggcttccatactgggctgttcacctcaccacatttgatggatgttagagagcgatttcagctagatgggtgctatgaaatttatgatcgcactgacctagctcctcctttctgagggcatcggggttaatatttctgaagagaaaattttgaagtactcctggtggtgctagaacaagttgaagcctatttcaggttcctcgcgctgctcgcattcaagatattttctgctgagcaggtagatgttgctattctcgaggttggcctaggagggaagttcgatgcaactaatgtggttgttagttctcgtgaatgtcctgttgtctcgaaatacaaagcttctgttcgcacctaatcgcctaaaatggaaatgtttgactcattgtttaattcggggggaagctgaaggtggtctgatccgttctaggaagagaaaggctgaccaagtcatcatctccagggacgatgttagcgaaagtcaatttaatcaggtgttgatcattgggttgcaacaaatcatcggtggagactgagtcaccgcggccagaaaaccacggtctcaatttgaggagtttttccatctatgtttgttagaaggcataatgcctatttatctcttgtattcgaacatttggcaattaagaaatagaagattacttccccaatatcccttattcctaatctcacctttcacggcttgtggtgaacaatcacttgctattaccgactgacatgtccactcctcatatgtgcgatattggggttgatatatatgttgttcgtttccatgtaattattgtatactaacatttatcgaataatttttacaccgtcgcaacgcacgggcacacacctagtagtagttgatgatgcctttgcaggtttgca

SEQ ID NO: 34038 - DNA, 2097 bp, Zea Mays
cttgcttatgcttcttccgctccccactattattctcatcacgttcttcccttcttccttcctggttcctactagtcccaccacacacatcttcccagtcctatcatggtggcgtagagatatagaacgtagagatcgaggaggcaggagagcaggagaagaacctcatctcagaggtggggaagccacatgggaaaggtgaaacagaaggtggcaacggcggcggaggacatcgtccttgaagacgaagatgatgcggaaagatcttcggagaactctgtaccgcctgtgattctggacctcaaccagagtttcggcgagggtagcgaggaaggggaagccggagaggatggcagctacgacgaggaggatggtgactgcgacggcggtagcatgagtagagtcgccggaggaagcagttcaagcaacagcagcagcaccaaccaccatacttctatgagcaacaagaattatgacacgaataatagcagcagttgtaagggtgagggcagcggggagacggcgcagaccgtgaggcagtacaacagatccaagcttccccggctccggtggactccggacctgcatatggcgttcgtccacgccgtggagaggctgggcggccaagagagagcaacgccaaagctggtgcttcagacgatgaacgtgagggggctcagcattgctcatgtaaaaagtcacttgcagatgtacagaagcaagaagctggaccacgagtctgctggagctggacacgatagagcagccatctactccgttttcaagcccatggatttgcacatgatgatgaggagaggagaccatcgcttccacgacatgtttctccatcgagctgccgctgccggctcggtcatctcctccccgctgctccacaacggggatttattcgggtcacgggacgccgtctcgccggaggccagcaggctctacgcgctcctccaacgccggcagcagccttcctccacgcaaactgatcaagtgtggactttcagccggcatgcagcggcggcggcggcggcggcgagggctggggccatcgatgacgaccatggcccaacgaaagggctcatccatgatatgatcttgagaaaggacggcaggctgacgtcccatttgttcggcctgtgggatgccatcgcttgcaacaggacgtcgtcgaacgccgctggtgctgccagccacggcgcaagggtcgtcacaagcacggattggaacggcacctgcagctcatctcggcccctgtctgtgacaatgtcggcagctgcctccacaggtcttgcgatgggcagtcaccacctcatgtccaggggaagaggcggctccgctaacgacgtgacatcgttagatcatgccgtggtgacaaatgaagccctaggctcccgactccagacgctcctagagcggaacaatgcggccaaattaaccggcgaggagatgtgcggggggacaagaaccaagatgctgaagacggcaatggagggcaagaatggcggcatgcaggagccggacttgcagctaagcttcagccccaacgacgacatggaaggagatgccaacaagcagatcaagaagaggaagatcatagacggcattgggttcagccaacaggaggtggacagtgacaagtcgatgctacctctttcgctctcactgtcactccgtggcggcgacatcggcggcgaggatgcagggaggttcgaggcagcggcaggtagcggcggcaaaaaggccgctctggggcggagcactttggatctgaccatgtcgatcaaggcattggagtgagaagatgtttcacggccgctctggggggtgagtactttggatctgaccatgtcgatcgatccatcaaaggcattggagtgagatctttcaagtactcgtcccaaggccttccaaaacttgcacactgcaccatgagattaattaagtcataagactgtttgtttaagttaaccatgcatgagcagaccaggccagaccacatatacttacaaataataactgtcttcgatgagatgcactagacatagctacgaactgtacgtttttctctatgtatatgcatatatatag

SEQ ID NO: 34039 - DNA, 2517 bp, Zea Mays
aaagtgcgcctctttgaccaccaaagttctagcagaaattactcaactgcccagcgcatctcacgacccggcctcgcagctccggcgacgatccctccaatggcctacgccgccgccgttactctccggcgcgtggtgcttgtgtccgctgcgctgcggctcgcactagtggtgttcggggagtggcaggatgcccaccttgaggtgcgctataccgatgtcgactacctcgtcttctccgacgccgctgcctctctggccacaggcggttccccgttcgcccgcgcaacctaccgctactctccaatcctggccttcctgcttgtcccgaactcactcctccatgctgcctggggcaagctcctcttctctgccgcagatttgctcgtagggttgttcataaacaccattctggaactaagaggaattcctgagaaaatgcggatgtggtctgtggtagcttggctgttcaatcccttcacattcaccattggtacaagaggaaactgtgaaccaatagtctgcgcagtcatactctggattctcatatgtttgatgaagggtgtaagctctgaatctcttatgctgtttgttcagttattgctacctttgttaagttgctatggtggaatgtgataggaccattaaacatgttccaacttgtgctctcatgtactaatgtatgcttttgtaactgtgtgtttgtttttaattttttttttatttcaacatggggtatgcatattattgttctatacacagtatataattttttcatatccgtgattttttatgcaatgtctcagatatcttctgtttggttttgatagccaatattttatactacattgttagatcaacctcaccatatatgtagctgaattacaagccctcagtttgtcctgtgctaatagatctcttcacactcatgcatttgccaagttcagttttgctcatacaatgaaatacagtacacacttatgtactcatattcagtgaaatttgtagttagtgatttcttttggccttgaagtgtataaagtactagttatgccacttgttcaaacagatagtttatcagggcttgaccgctgaattttggaatatccatcttcttatatgcattgagtgtagttgtttctcattgaagggcagacccaatgccagaggctgcaaaacaagtcgggtctggggaagggataagctgatgcaagcctttccccgcaaatgcggagaagccgcttcgaacccgcaacctggtgactcagtgagacagttctcgacgttgcactaggcctgtccttcttgtttctccctgaagacgttactaattcatgttcggctttttttgctgtgttcattaaggtctttttttgaatggatgaaatccctggcccatccatgtggatggccccagtttaggccgtgccaaactcatccaaaggtagagtgttgcaggcagctttctggtatgggtttattgtgcacttcagaatatacccaatcatatatgcaattccttttgtaatagttcttggcaagggctatgctggtcctgttggtaggcctactcttacgatgtggaggtccaaacaacagttgcaagatgataaagtcagtcaaatagaagaaccaacatcatttctggccactgtatggggttttctttcaaacttcataagcagaaatgggatcctgtttggattactctctggatccatgttctttgcctggaccggtgttttcttctatctgtatgggtgggacttcctaaatgaagcattactttatcaccttactcgtaccgacccaaggcacaatttctcgatatatttctaccacatatatctacaccatcagcaagggttctcaagtattcagaggctcgcttcgtttcttcctcaactgatcgtgcaactggcactcattctacgcttctctagggatcttccattctgcatgtttctccagacggttgcatttgttgcttttaacaaggtgatgacagcacagtacttcgtgtggttcttctgcttgttgcccctcattctcccttggagcagcatgaaacttaagtggaagggtctggcctgcgcggtagtgtggatggggtcccaactgcattggctcatgtgggcttacctgctggaattcgagggccgaaacgtttttgtgcagctctgggttgcaggcctcatgtttctggctgcgaacacctttgttatgctcatggtgatgaagcaccacaagtacactctgctcttctcaacgccgctgaagtctggcaacaaggttgctaccaagaaggaagaatagcagcgtttgggctctttccattttgccgactgatgtatgattaggacatggatcatgtttgtttctctttttttttgtgtttctgtcagatcacatgtgacttgaatcattgtagtttttcccgtacataatgtggtgacattgcatgagaatattttttggttaccagaatttgcaattggttcagattttattacctga

SEQ ID NO: 34040 - DNA, 784 bp, Zea Mays
ccacccctatctttttttcagccgccactttctttttctgccttcttcttcctccagcgagcagcaagcgcagggagctcagctcgtcccctcggccaccatggtgccctcctccgtggcgctcgctccctgcagggagcagtttcccttggccgacgccccagccatggcgcctttcttccccgcgcagcgcctcggctctccatcccccaagctcgagcgttcatggaacagctggtcactggcgcccctgtttttccctgcgacttccatggtcgcgagtttcccctggtcgccatctctccacgcctccctgttcatcttcctcccagccgactttcctcccctgctgctgctcgccccttcctccttttccctggtgcggcagcaaggagcccctgctcggactgcagccgtggcgtccaagtctctgcgcagcggtgccgatccaaaacagcagccccgatggctccgcgcgctgccggcttgctgttttgtgttgcgcggtgagcagcacgccatcgacgctcgacaggtgtttgctgtttttgcgcagccccatccgtgacgccgtcgaaacccgtgctagtggtcgacgtcgtgccttgcccgttcgacgaaataccgagccatgtggacagccatgcgtctagtcacgacccgttcaggttgattgaattatattttataatacatacactttggttgatgtcggacaatgcatgtatataggtggatgtgtgtaatatgtttcggcaatacacgttagtaggatcgcatttgc

SEQ ID NO: 34041 - DNA, 3523 bp, Zea Mays
atggtgacctactggctacttttgttggtactgctttggatgggtagaaaaaagttattaactcctcctgaaactccactttttcgatctttggatgacgaagaaaaccaatccatcactcaggtttctaggggcagagctcagagcaagcctatacaaatttcaagatcatccatgataataatcaaagagctagtagaagcagtgcaagctcaagtaggcttagcccatcgccatgctctatgggaaggacaagatcatctagttcagcttctcgctctagtccaccacttgctgaaacacaaacaccatcacgaagattgtcaacccctccgattgctaagacattaacacctcctcgaaggtctccaagtcctgtctcaagaaggatgagtactggttcaagtggcccaactttgaatggaacaagaggagcttcaccagtgaaatctaatcacaggtcttcttcaccaaagctgcatggatggcaatcaaatgttcctggtttctctttcgatgcgcctttgaaccttcgcacatctctaactgatcgtccagtatgccggtcaaggggtggatcgccttcatcttttagtggactagaaaagggttcaagaggtagaagactgtcaatgtctcccactccacctagaagagccagttcatctcacagcattgaacgggaccgaatgagctcttatagcaaagcttctgcaacatcatctggtgaggatgatctggagtctatgcagtctgtaccaattagctactccagtagcccagttgtgaaaaagagcttggttgtgatgaaaaccagaaccattgcatcatcaaagaatctgtccaaaaaattgacacctagttctgtcccaaagcggtcatttgactctgcactttggttaatggatcatcgcaaagctccacaagataggtttcggccacttctatcaggtgcccctgccaacacatttggtgctgggaatggaaatgatgtgcacaaacctatgttctcacacaattcttctttgacaactagcagcactgcaagctcttaccatggtgccacttttggctcttatatgcatggcagccaagaacaacatgattttgctggtgaatgggaagcagatgatatttctcagggtcatgaggatatatttatgtttgataaattggatgagctaaatgaagacattcattacaagagcatggaatctacggataattcactggtaatagtaaaacatctagtaagtggcagacaggacttggaaggaagcagaagacctaatcagtccttatgccattctactgatatttctcatgttagctttaaggctacttgctctagatgtgggaagtttttcgatgcgatggatgttgatgaagagggtgtctattgtgatgcatgtgctacaaaggatgggaatatcctcaccagtcctattgtacaaactataggagaagaaaaccaacaatatggtaaaactgcaaatttgaaaccttgcatcgcatctgattctcctgtacccacagattgtgaaatctatagcaaagaagtatctcttgatcatcaactagtgaacaatgaatcttacgctgattgcctggaccaggcccctccaattcactcaatggggcacacacctcaggaaatgctactggggcaggaggaaaacattgacgctgagcatagaaataaacatgttggggattcgttaggaaatacaaacgataattcctttcatcgatctagtgtggatgaatgtgaacaaacagaaccaacatctgtagggcaggacctttttatcatagaccaaatgaataaccataatcgtggactatcccaatgtaatgaaaatgtctctgaatctgtgacctgtgacaattctcatcaactgggatcaactacatatcagaaccctaagcttgaaactaccgaggatactgggatatcagtattgttagtccctaagcccaacagtaataaatggccaaatatgctctgttcagaaccctattatgcaagagatggtgtcagtatgatgaagcgtagctttggactgggcagctcttcagctgcttcttccagtgatcttgggtcttcaagacagtcaatcatatgttttgagcgccttaggagtggtaagaagggtgactttgagaagtcccagataagcagtactattagttgtcaaagcattgcttctgtgtcagatatgtcaatttgtagctcttcagcttcactttgccctcagagtgatgcagtaggagattcctgtttcccaattgacactttggaaagcggcacttcaggaactctgatctcttctcaagaaaatgatgatgctttttgtaaggatactttgccaagtgctatggaatgtccgtcttcttcacagtttattgctgatgatgacagtcccggtgacatgaaaatccagagctacttaagtgaggtaggatatacaacagttgagaaccatagtgcttgcagaatgactgacatggattgtaccagtacaaatatgtattctttagatactgaaatgccaagtgataccctagaatcatcaggcccagtggaaagtagcatgcctgaaactgaagaggatgcttacactatcagtcagtgtaataaaggtagtgctccagaacattcaagtgatgagaataactttgataatattcaaatgcagtctgaaatagttcagggttcagcggaggaaaacagattggatgattgttgcatgtctgctatctcggaggaggacgtattgatttctggacaagaagatgacataaggaatcttcccaatgatgaagaattatgtgcggaggtagaaggaccaaggaaacaaatccagagatgttttacattggaagaagctgctgatacaattctcttctgtagttccattgtccacgaccttgcatacaaggctgcgactattgcgttggaaaacaagaaggaaccaaagtttgtggactctattcgtccaactgttgcaattgttagaggatcttttgctaaggaagagagtttaccaaagctgcctcacagacgaaccccaaaccgtaaggtcaaaaggaaaagattggaaggcgaaacaactacaacggaaactacagagaaagacgttgtcgcgaatgactccccccctgtatgttctgcatcgggtattacaaggaattccgataatatgaagccgccaaagctggagtccaagtgcaactgtataattatgtaactcggtcacatccaagattgaaattcctacatgcttggttaaccccgtcatcagcagcgatggagttcagcacaatggatcttccgctagattattttgcaaaggtgcatttgctgtgttttaggtgacagaatgcactgccagctgctattcttttgtaaagtcttttcttctcttttctgcttgtaatgaggtccttgcggtttgtccaaagttgtgctgatagcctatttacttgcaacgcacgtggctgcttgtgaaagtgatggtcg

SEQ ID NO: 34042 - DNA, 1486 bp, Zea Mays
gcggaaaccaaataccccgaacgtccacagcgagcgagaggccgcaaactcccgagaccgtacgaaccagacgattcaccaatcaccatggcggcgccggcgcggcgcaggcgcaggggtttcggccaggccaggccttgatgctgtggaaatgcctgtacgggaacaacgtttgggctcatttttacgacgagctggctggggcaggacaactgtctgtgtttcaaatgaagttggttgggccatgaaatgtcagttttgcttcactagaagggcatgggtcaaccatttcacaatatcgacaatgtaataaaagcctcagcaataatggttcatgagcaaggccattttagccctcgcaaggttactgtctccacaagtggttttgtccctcagttaggaacccaattgcttgctgccgccagtcttaatgcaaggacagatgaggttagaaactggataatgactataaacagaaaggagaaccttaacttgcttcttggcactttaagaggtgaacttaacctcagaaaaaaaaacaaatagtgctatctgaatatgccatgctttctggagtgaacggcagtggatgatgccaaaagtcttttgtagagctactccaagggatcccatgcaagcaagataaacctcatctctttgagttccctcgacggttcccaatccaagcccacatcagacgataaaatgattgagttcggcaaacttttaattcaaggtgggctcactgtctttgttcggtcagcagaggggatgatcagatcagatggctgcctgcgggcagctcagagagcctggagactaccagctgcctctgcaccgtgcacctgagaaaattttgaggtcgtcttgtgatgctagacagtgcattacagtaaactggtcctgaggcctgagaaaattttgaggtcgttttgtgatgctagacagtgcattacagtaaactttagcgtcgtcgagaccgaagtgggctgaaaagcgctgcatcgtgcagccgcgtgacagtgggcgtctttcgcatggttggttcgtcgctgcggtctgagtcgccaaagctgaattctgttgtcatcggggagtgattcgaaaagtttggaacgaacctatcggtggtcaggaatgaggtaagaatctgaaggactacaaggttggcttgcctgagcgagataccttaaccattaaggtgtgcatggcacttggcacctagtcaccagaccagatcaccctaaatggtggaaagaaaaaagcgaaagatctagcgcaagccccacccggatcaaagtttctctctctctcttttccccccaaaagcaagtccatcacgctgcacattatgggcgtctttagcactgatctgaacacgtaagcacgatatacggttgcgccttgcttgtagcgtttggttgaagagccaagtagaacggaaccgttctgtcccagttttgttgttgtttggttacaaagtaac

SEQ ID NO: 34043 - DNA, 1403 bp, Zea Mays
accgttcagactctcaaactccctcgattgtaataacagagaaaaaaaccatccgccggaggccggagggcagattctccaccatcgcctccactccaccctcactacgcgaatccgcggcgaacccccctctcggattccttctctcctccccgccccgatcgcgtcgtccagagaccgccaggctccggcgcccccgcccgcccgggctcgccgggggtcgggatgccctgctgctcgccgtcgctgctcggagtcgggccgcgggtgcgctcctttctccgcgactacgacgccctccagtccctcgccctcgcactcatctacctccaggactattaatcctgatgagaagtatggtgaactttttgttttctcactcagactagcattgtggatgcaaataattgggttttcagttaggtttttgtcttcattcttatggattcaaatgtatagattaggggcttcttccagcacgccaacatattttgaaaccaaccatgaagcaagaattagtttcttaagccctagatctgattcagttagacggagtcctacggcagatgatatattgggaggttcgatctatgatccttcttactactcgtcactgttcgaggatgtccgaaacaatgcatgcaatcatcagggtgataaacaaagtggtagtaatgacagtggttcaacatctgcaggccagacaccacgacttaaatcttttgctaatgatgtggaaggtggactaaaaagaccgttgaactcctagggataaaacaacgggctcatcttgggaacctaaatcctgtagccaccgttctctttgaagcatagaggtttgcacaccgcagcagtttatttctcagaccagcgggaagggggtgtccaacgaaaggagcttggcaaatactgtaacggcgactgcctgtgttgccgagcatccacagcagcatcggtgccattttggagcaccgttcgtactcagcgagcttgagccggatgtttctgcaaatagctgtccaatgttggtgttgcatatcgacctatgccatgcgatatgtttactgcccatcatgtcccatttttcagacctctcttcctgtttcttttaactaccaaggaaaatgaagcaagtagttcgttagttctttagtcacttagttattttctagctgtaggctggcagttgcttctcttctagcattttggtcattgttcatagcatttgtgttgacaaggaacagatctctagatcagtgaaaggaaacaaatgtaagtttcattctgttctagaaagagctgtgatccctattggatgcatgagttttgttagaaatgttgcagggttttcacacgaaattgttctggacccacaagttatacaagtcaaattagtctatata

SEQ ID NO: 34044 - DNA, 263 bp, Zea Mays
cgcctccatttcgtcgaaaccgtgtctctcgtgtttcataatggcaattgtctctcccacgagaaggcccgtgcgggtgcgctttgctcctctccccgcgtgctctccctctctctcgcgcgcgcggcgacgactcggctagtcggctaccgccgccgccccctacgccagcttcccagctcttcgtcaggcccttctccgtcaacgagcacccagacgcccaaaattggcctgcggttagttgtattctgctgcaaatatgt

SEQ ID NO: 34045 - DNA, 3591 bp, Zea Mays
  misc_feature (1)..(1): n is a, c, g, or t
nagcgttccagcggtatgacatgatcccacagaacgctttgagagtagcagaggaaggaggaacgaggaagggtttatagtttggattatatgattggatgatcggatggttagtagtttggattggaagattggatcacatcgcgtagtccacctctcctctccagtttccacgagaaaaaaaaacatattaaatctttgcttaattttgaattgttcgctgtaaattagaacttatatgtgcatatacatgtagtcatgtatcaaatccgccgttcagtcattcagtgctctgttcaagtgtaagtgttcagtaccaatttttaatcatgttcagtattactacatcgtggttcatgatgttcacttggaaaatgttgacctttttttttgttctttgataggtggatcctctttcccaccaagtcaaggtttgtgaattcgggagtgctagaatcttgatcttccacaagagaatgtctccagaagcaatggataggcttctagaaaaagataaagtgccaaacccatgctatagagtatagactgagtttcaacattggaaggctcaactaaatataccagttccggatacacactacaggacaaaggtgcacagcacccgatagcgcgctgccttttttagtgtagaactagaaaaccaacgcacaacacaaaccagagagttctccatggacgtcggtggcggcgccaccggcacacgctgccgagaccccaccgctgacccctcgtcccagttcttcgttgacgctggccatccatacgcagtcgctgcagccactgcgctcacctcccaccgcaccaagtccaagtggtcccacctctcttcggtccccgtcccctcccccttcctggcctccgccgccgccggcgtgctcctcctcctccgccaccgaccgcacaccgcgctccgcttccatgccttcgccatccgccgcctccttccctcccgctcccctccccctctcgtcttctctgccgccgcagcccacgtcgcggcggcctcccgccttcggggccctgccctctccatccttgcctctgcctcccgccactgctcaccggcccagatcttcaatgccctcgctgccacctaccgctgctttgcctccgccccattcatcttcgacctcctcctcctcgcctaccttcgctcccgccgcgacgtcctcgctgcggcctccgtcgcccgccgcatcctcgctgccggcgcacggccgctcccctccactgcggcagctcttcttcgttcactcccttccgccaccgcggccctcgacatgtatcatcaaatctacacgcatccaagtccacggagcaatcacctcctcctgccgactgttcacaccttcaattccctcctccttgctttccaccgcgaaggcaagtgtgatgaattcaagattgtgctccaggaaatggacaaatattcctgcaagcacaacgtgtgcacctacagcatcaggatgtctgggtactgcaatggcgggcatgtggataaggcgcgaacactatgggatgagatgattcaggaagggatccagcctgatataactgcgtacaacacaatgattagtgggtattgccattctggggaggtaggggtggcagaggagatgtttaaaaatatgttgatgggtgggattgattcaagtgccacgacgttcgaatggttggtcagagggcattgtatggcacgggatgtcgaggcagcaatgcttgtgcgtgcagacatgaaaaggaaggggtttgggttggcgccagaggttgttgaggaattgctggatggattatgtcaaaatgggagggttgaggatggcttgagtgttttgcgagaggagatgaagagggaagaatttgtgccaacccggaggagttacgaggtgttgattatggggttttgtgatggagggaaggtggaggtggcaatcagactccaagcagagatggctggaaaaggattcactgctggcagcgaggtgtactatgcatttattagtgcttatgagaagtctgaaaattatgagatggtcgagaagttgaggaaggaaatgtcggcgatgggcacttagagcatgtctagcagctcaccaataattcatccctaataaaatggtattggtggtcaccaatagtgctttttttggaatattggggagactctatagtagattaccaataatctttcccaatacatgggacccacatgtcagaatagaggatgtgggaggaagaagatgacgacagttgttgtggtcccaacacctatagagggagatgcaactccccttttatttgaggggagatgggagatttgttttggtgaccaccaaaaaaagggagagctattggggagctgttggagcaatggaattgcctcatctcccccaatatgacagttttatggggatgagggatggtattggagagctactggatgctctatcggatctgatatttggcttggatattgcacagtgatgcatggatatcaacctcacctaattgcagttgagaactatggtaaatcacttatctttacatcactcctcttcctttgattaagttgcttagttttaaaaccagccatttgttctctcttgaatctgtttcttcttgtagtttgttatttgttctgcatggcatgttataaccatttatttcagaaaattttgatgtctagtattgaaacttgaaacttcaaataatccaaaattggtgctaacttgttctctaggtgagaggtgtgtaaagcttgtttgcttcaaaccgatggtaacaactggtatggaaacatcatgttagagcaggcattagttccatattccactcagtcacattcatctaaatgtaagcgtctattgtagttatgtagttggcatgaatatttatacctgtaaattatgattcatagatgatgaacaatcacttaaacaatataagtctggtgccaaatgctatttcagatgatacctaaatgttacagcacatagttttgatacatgcagggtatccttagaaaagcaagtaaattatgtaatagttgaaagataattctcaatatcatatgtcagatgttctttctggttcacttctctatctggttcacaattcattccagagtggtgcaacaaattctgaattggttgaaggagttctctcctagcactatcctggagacggatgttggagaaatatgactgctggatctgcaataggataatgtcttttagtcgatcccttttgtgcttgtttggtgaacttgtgtccccaatctgttgaactctgtaaacatttgctttccataaaagcagagatattctccttaaaaactcagtccagaatggtgatatatgaatgatccctgagagtttataaggtacaaccgtacaagtccaggtgctagagacttctcaatttgctggaaaatgctgtagtattttgtgttgacttgctgtttgatatatgctcagtacctcactgtaaaatgtggttctcttgtttgcctcttaacaaaatcctgagaaatgacatgagaacaaattgagaattagtagatcagtacttaac

SEQ ID NO: 34046 - DNA, 3522 bp, Zea Mays
gtaactccaaaacctccctgccttctctccttccatcaccgcaactccaaagcctcttatcgtcttcttccatcgccgaacgacgactgggcccgctgtcgctgccgccgccgccctacttcgccaccttcgccggcgacgggcaccaccagtgtggactgtaatgtttgatgatgatgatgatggagtggacccacaaattgaggatgtcaacagatactactttgaggatggtgaagagaaaccagtttgtttcagtatcttgcctttccagtttgcttggaagataaggcttgacagtgagcatcccaacatctatgtgctttctattgagcacaagtggataaagctgttgaaaccacgaaaatgctatggagacattgttcgatcaacattgattacggtgcaaatgctccacttttttgggagaggggagcaaagaagttcgaatcacctttgggatcaccttgatgaagtttttggtaaatacaatcctaaacccgtggaggatgacttgatgaagcaccataccctaatcaagttgtttgtagagaaagatcaaaccttgatgaagtcaaagattcttcaaaggctcattgagaatggctttaagagaactaaaaaggccttaggtatggaagcacaatccattgttagtgacgggtggcgtgctagaaaaaatgatgataacaattatggtaacaaagatgacagtggtgatgattgtgatggtgatggtagcagtgatgatggtgatggcagcagtgatgatgatgttaccgatcaaatatgtgcgctatgtgatgatggaggacatttgcttagctgtgacggtccatgcaagaggtctttccaccccacaaagaaagatggcagagaatctaaatgtgaaagtcttcattacacttcagcagaagtaaagagaattggtacttatctatgtgcaaactgcaaaaataagcaacaccaatgttttagatgtggagagcttgaaccatcccatgggccaaatgctaaggtctttcaatgcaatcaagcatcttgtggatatttttaccaccctaagtgcattgcacaattattggatcctaatgccactgatggtgagttggaaagaaggattatgtcgggaatgtcatttccgtgccccatacattggtgtttcaaatgtggccacatggagaacaaagctcaaagagcacttcagcttgcagtgtgtagacgctgtccaagagcatatcacagggaatgccttccaagggacttatcctttggaacaaaggacaaggatggtaaccaacgcgcttggaagctttccgacacaattttcatttactgcctagatcatgaaatagacaaggatactggcacaactagtaggaaccatataaaatttccagctacacctgaatacaccaaaacaaaagggcttggtaacagcaaaggaaggatgactggcaaaaggagaaagaacaaaaggagaaagaacactgaccaatcaacaaaacctacagatttgccaaacaggttgtgtggagcagaaagtgagcaagctgacaatgtaggtgcaaaaagcacattgccccagattgttgtagagcctcactgtgcagcaaagcacttgaagggtgatccacaaattgccaaacagggtgttgctgctcgtcaaaatggtgcagaaactatgaaagggcatgaaaatcaatttggcatttcattttgtgttgcaagtactgaaacagagaagagggtaacatgtttggcacaaaggggaacatgtttagggacacaatatgatgggccatcaaccaagggcatgtatgattgttctgttcaggacacccctatggacgacgatgttgagttggataatgtggcctgcataatcgcggtggataaatatgtcaatgggagggggaaaacacaagaggactacactagaaaagaagctgctcagcgcaaagactcgagtgaaaatcaagggcagaatgatgctctagagctagacaacctccggatggagatgcaagctgacgaacgtccgttagaaccaggaaacaagagggacaggaagtggcagaaaaatgtatatggactcggatcagcttcgggacagaaggaaaccttgtccaggagagaaaatccacggtcagatagagggatggtccacagtaacgacagcaaaacaatttattacaggaagggtgggacggaagtcgataatgttgatgaccaccctttagaaaagcaagaccaccaggatacatcaagtgacggatctaaaaagagaagccgaccagtggacaacgcatctggtggcaacagaccatacttggatgagaacaagaagcgtaatctcagagaagatggaagatatgctcattatgaagactggagaagtgaaaggaatacagcagcagacacgtctggatataaggcccaatcagaagagaagcctgtatggacaaacactcgaacaggatcaagggagcattcactggacaggcaaaggatagagtgcggtgacagctatcgtggaacctataacaatagacaaagacatgaatggctgcacccgcacgctagtggtaattcctcgagaattggttgggatgacaggaggcagtggagttcatctcggtcaccatttccttcggctgaatttggtggtgaccgttcctgttctcgtgcccatccgagaggttctaaatacagaaccggcgggaggcatgatcacccccagtacctgggactgggaacacctcaacatggtacaagtagaccgcaccacacaatgggctgggacagggacaccttccatgatcaccagcatggcagaagaccgccgcaccacacaatgggctgggacagggcccccttccgtgatcaccagcatggcgaatacgacgactccaggtatggtgaatatgatgcaactgacaatggtcctgacagcgcgcatcgaccctacacggctgctggcgtggctggacgttcagcaccgagttatcagcttgctggtggttatggagagggatcaagggcttggcggccagttacggacaagtacgccccatggcccttgccttgaccgcacaaactaatattagccaaggagccagagtgagctacaagaacaccgtttgctattgtcggaaatgctttcttcgaggactgtctcagtacggggaattgatgggtcggtgttgaaacccaaatgatatctgccttccagttgcttgctttgcctatcgtaatcactgcatgttatttcacataagcagctggattctcaagttatgtgggcggtgcatttgagttatactagatgacagcctgtgcatattgttactgaagtaaaatatcttttttattaggttccccttatctcgctgtgttgttggtcaatggttatggactatctagtttgtcaaccccattttttgaagaaatttttattttttaaagaaaaatcagttcattttaaaaaaatgagaatctctgagaaagttgataaacaag

SEQ ID NO: 34047 - DNA, 355 bp, Zea Mays
gtaacatcccggaatccacaaacaccccggaatgctactgaactacacttctgacatccatatataaaatttcgacaacatctcctttgcaaaatagcataaaggagggggcaacagtgtataaacatgtatcatgacaaaaaacatactaagtattattaaacggctagcaaaggaaagttaaacatacgacatgaactgaattaaccaatgcgcatgactagtaaaaaaacaaacatcctttgacatcaagtttctaattaaatcatggatgcgcttgggcagccttaatatgagagtgaaagtggacgtgctgctactcccctcattcccaacatatatcaagtacctgcat

SEQ ID NO: 34048 - DNA, 3643 bp, Zea Mays
gcatcgtcctcgtcgccgccacagagcccctcgtctcggccgcccttcgccgcctccgcggagcaggcatcgcaggagaccaaagatccggccagctctgatgtcaggagctagtggctcaaccgggcgcgcggccccgcggtacgccccggatgacctgacgttgctcaagccgtggcgcggcctcgtcgacggcaccaccggctacctgtactactggaacccggagacgaacgtcacgcagtacgagcggcctatgccccctgagaatcagctgcccccgcccccgcccccgttgcctcccccgcctccccggagccgcgaccggcgcgacaggtccagatcccgatcccgcacccctcccaggcgcgaccgccgcgaccgcgaccgtgacgacgagcatgcgtcctccaagacggcgtcttcccaccaccatccggctccgatagccgtcgccgactatccgtccaccgaggcataccgacgccgccatgagatcaccgtcacgggggataacgtgccggctccaataacttcatttgaggctggtggcttcccatcagaaattctgaaggaggtatggttccataggtgaacccacataactcatgatctaattctaaccctaacaaagttgcatgcgagggaccaaggtcttcaagtatggcgagggaaatggatcgtgcacatgtgctccagttgcctgcttgtttctctttatttgcttcattgtgctaaatcagcgctggctatgtgtaccgactgcttatctccatctgtggcagatgcgatatctgctccgagggggagctaatgtcgtatgctgcctcgcgcgcccttggccaatctataagtgagatgagctgagggcaggtcttgctgatggagctgccaaggtgggtgaacgctcgaggttgctcgcttcctccctggggggccgcccatggagcggaggagggccacccactcgtggcacccacggtggctgatttgtcgctctgcgtccaattcttggaaaaggctccttgcatggatgatgggcttcttctggggcttgacccatggaggtctggcccaggctgtcaacgcccatccatatataggatcgggtggcagctgctggaaggggccttgtggatcaacggtctatgcctgagtgagcctccatggactctgttagagctttttctacttcgccttgtgtgcgcaagtctacacattgcgggaacattttatttatacaacgtgctggatttgcaagcccaacacctatccaagcgcagtcatggccaattgctatgcaaaatcaagatgtagtagctattgcgaagactggatcaggcaaaactcttggttatctacttcctggatttatgcatatcaagcgcctgcagaacagcactaggaatggtccaacagtgctagttttggccccaacaagggaacttgcaacgcagattctggatgaagctatgaaatttggaagatcatctagaatttcttgcacgtgcctatacggtggtgctcctaaaggtcctcagttgagagatttagatagaggggttgatgttgttgttgcaacacctggaaggttaaatgacattttggagatgcgaagggtaagtcttaagcaagtgtcatatcttgttctggatgaggctgatcgcatgctggacatgggctttgagccacaaatacggaagatagtgaaagagatacctcaccgtcggcaaacccttatgtacaccgctacttggcccaaggaagtccggaggattgcagatgatcttcttgtccatcctttacagcatatagaagtcataacaccctcagaaaaacaacggcgcctggagcagatattacgatcccaggtttcaggttcaaagatattaatattttgtaccaccaagaggatgtgtgaccaacttgcaaggacactcaccaggcagtttggagcttcagccattcatggtgacaagtcccaaagtgaaagggagaaggtcctgaatcattttagatctgggcgctctcctattttagtggcaactgatgttgctgcgcgaggtttggacatcaaagatatcagggtagtgatcaactatgacttccccactggtgttgaagactatgttcacaggattggcaggacaggaagggctggtgccactggtgttgcatatacatttttctgtgatcaggactcaaaatatgctgctgacctaatcaaaattcttgaaggggcaaaccaacaggtgccccgtgatttagaggatatggcttctcgtggtggtgggcgaggtaagaagaggaaccgttgggcatcccgctctgaaaggggtggtccacgatctgaactggattcaaggtacagcggcagagatggattagcatcttccgggagatcagagagtggtcgtggcagtcatggaagggatgattatggtagccgtggcaggtatgactctggtgaaactgatgggcgatctcgtaggtctgctagaggtcgcagtagaagtcgtagcccaagccccaagaggtcacaccatcatgaagctaggcgtagccgaagcaggagcaggagccgaagctgtagaaactttcgtgctagccgcagcaagagtcacagccctgttgctagcagtaggcatgaaaaggctgctgttatttcaggatctactcaacctaacttggggtatgcagagcacaaaagccctccaagatctcactctggggatgaccatgtgaaccaccctgatcaaaaggatgaccacatgggagatgggaagatggaaagggttgatcttgatcgctcgcccagcccacaatatgataagtctgctccatatagtcctgcgtacaatggcaaagccagtgactcgatgagccctaatgttcagccaaaggcagatgccaaatatgtcaaaccttctgggaaacctgagcctgcatctccattgcgccacagcaaaggcagagatgatgatgaaggtatcatagacgacgatggagagattgctgagggtgagatgatgatgaaggtatcatagacgaggatggagagattgctgagcgtgatttgcgtgcaagtgcagctgtgtagagaatggtaataactgacggagaatggcctgcatcttctgtgacaacaagactgttatgcaaactgcagtcgttcccatctgcaagagtccagaatgtagaaatgcatttgtgccattaaatgtctcgtaggacctatgataatacatctgccatatatgaacaaaaactgttgatgtatgtcctgttgtttgttaaacttcaatgacttgtgttctggtgtcttactgctagttctgttaagtgatttatgataaaacatattgtcaggtctggaagtgataaatttatgatacttgtcaggtctggaagtagtttattatattggcagctccctggttggagattcctaggattgcaaaacctggcttgtttgagagcaagggcattggaggggattgatccccttactatcttatagcctgatttgttgtgttgttttttctcgaggtgtttggttgcctgcatctggtcggattctgctttccagatgtaaaagacagtctagagcctggcatcacggatagcgtacggtacgaatttg

SEQ ID NO: 34049 - DNA, 3686 bp, Zea Mays
gctcgttcatcggccccaggctacctcctcaatcctcatgtcctgcctgccaggcccaggctgaccgcaccgcaccgtctgcacgagaggagcctaccgagccacagcccacagccagcacccgcgggtgctcacgcgactgcacgagctagccttcggcaactgatcggtctcacacggcgccattggagagaggcgagggaggatagcatcagaggaagagtcagagacagacagagcagcggggatggtggtgcagaagcagaggagggtgccggccgaggtgttctggcctaaggtcgtgctcaagaagtggctcaacctcaagagcaaggacctggacttgggcgcctccttggccgccgattacgacgacgacgacgacggtagcgacgttgacggccaagagaactgcggctgtgacgacggcggcggcggcggcggcgctcgcaggccggacgatgacggcgacggcgcccagatcaccgacgatagcctggagagcgcgccgtacaagctgcggcggcggaactcggagacgctgcgcgcgcagtacatcaacaccaaagagctgagggtctgcgtcggcacctggaacgccggcggcaaggcgccgccgaacgacctcgacatcgccgagtggctcggcactggcggcgacgccgagcccgccgacatctacgtgctcgggttccaggaagtggtgccgctgaacgccagcaacgtgttcggcgcggaggacgggcggccggcgcgggcgtgggagtccgtgatccgcggcgcgctgcggcaggcgcagccgccggcgcccaggtacaggtgctacagccaccctccctcgccgtcgcggttcgagcccccgatcggtgccgccgaagagctcctccccggcggcacggacaccgagaccgacaccgacgaggacgtgcccttgggcgaccccgtcgcggcagccactccgaccccgagaaagctgagcaggctcaaccacttcagcgtcgtcgtgggcgagaacgagaacggctcatcggagctcaacggcgacgaactggacgacgggcctgaccagccgccgcagcagctaagccttcagcagcgggcgctgctgaggtccctgagccgggcggacagggtaggggtgctctggccggagcagccgctggacctactccccgcgtcgtcggcgtcggcgtcggcgtcagcgtcgttcagggcgtccaagtcgttcagccgggccgcctacaggtcgtcgttcagggggtcgtcccgcgtggcggccgacgtggtggatgacctgcccatgatcccggacctcgacctggacggcgcgctgcggaagaagggccggtcgccgttcgtgcgcatcgtgagcaagcagatggtggggatcttcctgacggtgtgggtgcggcggggcctccggaagtgcgtgcagagcctcaaggtctccaccgtcggcgtcggcgccatgggctacatcggcaacaagggggccgtgtcggtgagcatgtccgtgtaccagaccatgttctgcttcgtgtgcagccacctcgccgccggcgagaagcccggcgacgtccacaagcgcaacgccgacgtgcacgagatccaccgccgcacgcgcttcgccgccccgggcgacctgcagctgcccagaaacatccacgaccacgaccggatcttctggctgggcgatctgaactaccggctggacgcgtcgtacgagcgagcgcacgagctgatctcggcgggaagctggcgcgagctggccgagacggaccagctgaagcgggagctgaggaaggggcgggcgttcgacgggtggacggagggcgtcctggagttcgcgccgacgtacaagtacgagctcggctcgaggaggtacgtcggcgtcggggaccaccagggccagagccagagccagaggggcggcgggcggcggacgccggcgtggtgcgaccgggtgctgtcgtacggcaaggggctgaggctgctgggctaccggcggtcggagctggcgctgtcggaccaccgtccggtgacggccacgtacgcggcggaggtggaggtgttctccagccggaagctgcagagggcgctgacgctcacggacgccgaggtggagggcgggcaggccagccgcatgccccatcaagccctcggagacaccgccatctacccctcgcccacctacctcccgacctcaagcatagacatccatgccaccatcgccaaggccgctgagctccacgcggtgctcctccagggcggcagcgccgccgcatccattgttggggcctacgccagcgctaggcagagcctcgctctcatctgcctacagccggccgcgtcgcgggtgctaacgatcaccaggtcaggcctcctggccatggccatcgaggactaccccgtgtttgccctgctgctctcagatttgaaatgcacaagaaggaacaagcatcaggcgacgaccgtctcgactgcgggagaggggagtgcccctcgagtatccgcagggatccaacacttggacaccgacattcgcataactaggaacatcgaccggggggaaaagagccacaggccaagcggcgagatgaggcggtttggaaccgccatggcagcggcagccgccgacttccgatcccgccgcagccgcggccgccatgtccacctgtacccactccatctgtgcccactggttcgttcttggctccgaatttctttcccatccatctcccttgcgcttcctggtcccttgctgtacatgggtcgccgtgtatgtgatgcgcttgaactgctcgtgaatgatagccttttggcgtgggtatgccacaactctacattgcagctagagatggcagaggaatgccttcttcaagcaaaggacttaagtggcttgttgctactgtactcatctcttggagatgctgaaggaattgaaaagcttgcttctttggcaaaagaacacgaaaaaaacaatgttgctttcctctgcctttttatgcttggtaaagttgaagattgcatacaattgcttgtagacagtaactgtatacctgaagctgcattactggcacgttcatatcttcctagcaaagtaccagagatagtggcaatttggagagacgacctgagtaaaattaatccaaaagctgcagagtctctagcagatccttctgaatatccaaatctatttgaagactggcaggttgctctaactgtagaaaaaagtgttgcgtctcagaggggcaattatcttcctgctgaccagtatgatgctagggtccccctggacactgtgttcacagcttcagttatgaagatgtatctcaagtatgaatcaccagaagtgctggcaaatgaatgtcggcgccccttgtgtccagctcccctgttcgatgggcttcatgcccagtttcttctgctgcttccgttctacttgtcgaggcatcacctccaagatgaagctgccaccgttccatgtcgaggcgcacaccttgagtatcaggaacaccacgtgcatccagtaggacaggaatatagggaccgtcagggccattgttgccactgtgaacagcgcctggagcagtatgtacatgacctgccggttccggtcacccagcagtccgctcagcctccaccagatgttgtttgctttctgtgctttctttgagagctctctg

SEQ ID NO: 34050 - DNA, 4037 bp, Zea Mays
ttccactgtcctgttttcagtaaaaaaaaataataacagaaatggaagaaagttttttcggacggttttcgtccgttttcatctcttcggaacagtggatccctcccctcgttcaccccacacgtgtctggctccagagccgtggttacgaaacgctccactccgctccgctttcccagttccggccaccgagcatggcaccaccccttccctccgtctcccgtggttcgcgggcgctcgtccaagcatccaaccccagctccgtgcgtcgcggcgcgaccaccggacctataagtacggaacgctcatgtccgcctcttgctttcctacctctccgcccccgttgcctcccaccgccgagacgacgcggacttcgtaccctctcaccgacgtgtgcgccgctgtcttccccggcactcactgctgctggttcggctcccgaaccttcgtcgactccgcatttctgaacagggtgtcatatgtgacgagagagcacagatgtctctagaagttgagaagccaccagaaacgaccaagcagctcaagcgacaggattcactctatggtgatgcagaaaaggtctccggcttcaagcaccatggctctgagggaggctggccgcggttgctgcagcttgcatttcagagcattggcatcatctatggggacgtcgggacatcaccactctatgcgatatccagcaccttccctgatggcatcaaggaccaggatgacctacttggcgtcctctccctcatcctctacaccctaatcctgataccaatggtcaagtacgtcttcattgtgctttatgcagatgacaatggagatggtggcacgttcgccctctactcacttatatcgcggcactccaaggtaaggctgataccaaatcagcaggctgaggatgccatggtgtcaaattatggcatcgaagcgcccagtccggaactgagggtggcacagtggctgaagcagaagctcgagtctagcaaggcggcaaagattagcctctttatcattacaatccttggcacatcaatggtgatgggggatggaaccttgacaccatcaatttctgtgctctctgcagtgagtgggatcagggagaaggtgccaagcttaactgaaacgcaggtagtctggatctcagtgccgattttgttcgcgctcttctcggtccagcgctatggtacagacaaggtcgggtattcctttgctccgatcatcacactatggttttttcttattgctggcattggaatgtataacctcattgtgcacgagatcggtgttctccgagccttcaatccaatgtacatagtggattacttcagaaggaatgggaaggatggatgggtttcactgggtggcgttatcttgtgtgtcacaggcacagaaggaatgtatgcagacctaagccatttcaatatcaaggccattcagatcagctttagcactgtcttgctcccctccgtggcactgtgttacatcggacagacagcttacctgaggaaattcccagagagtgtcgcagacactttctttagatccatcccagagctaatgttctggccaaccttcattatcgccatcctttcggctatcatcgcaagccaagccatgctgtcaggcgcattcgccatcctctccaaggctttgtctcttggctgtttccccagtgtccaggtgattcatacatccaagagctacgagggccaggtttacattcctgaagtgaactttttgatgggattagcaagcatcatcgtcacgatcaccttcagaaccaccaccgaaatcggcaacgcttatgggatctgtgtggtaaccgtgttctcgatcaccacccacctgacgaccattgtgatgttactcgtgtggaggaagaatttcatcatcgtcttgcttttctacgtggtgttcagctccatagagctggtctacctctcatccatactgaccaagttcatccaaggcgggtacctgccgttctgcttctcgcttgtcctcatggccttgatgatcacatggcactacgtccacgtgatgaagtactggtacgagctggaccacgtcgtgccagccaacgaagtgacaacgctgcttgagaagcatgaggtgcggcggatccccggggtgggcctcctttactcggacctggtccaaggcatcacccccgtgtttccacgtctggtgcagaggataccctccgtgcacgcggtcttcctgttcatgtccatcaagcacctgccgatcccacacgtggcccctgtggagcggttcctcttccggcaggtcggcccgagggagcaccggatgttccggtgtgtggcgaggtatgggtactgtgacaagctagaggagtcggggctgttcaaagggttcctcatggagagcctaaagacgttcatccaagatgaggctgcgtttaagacgaactctacagctggagataccaaggagctgaccgatcccaaggtgtctggccatgatttggctcgttgggtcgaaaaggaaaagcaaatgattgacaaggagatggagcgaggggtggtctaccttatgggggaagccaatgtcattgcaggaccagaatcatctgccgcaaagaagatagtggtagactatgtctacgcattcttgaggaagaacttgacggagggggagaaggtgctctccattccgaaagaccaactactcaaagtagggataacatacgagatatagggattatgctgggcctcaagttacaatcctatgtatcaacttggcctgaagtcatataaagtttatgtatatcgagagattcaagattcaatgtaaattattcaattttattccttccacatggtatctatgaaatcgatctcagcaggggctatgtccttgttaagccaatagatcctattcagttgtcgcatttgctggggggcaactcccttattggtggtacatcatgagttcaagttttaatatttgagttacaatattagaagtctgtcacagcggtgcgcactgcacagtgaaacctgcagctttgatatttgtacacgtgctgtattgactggattcacgacggtttgcacgaatgctacaacagaaaattcccgatcccctgtctgaacgtttgcatcatcgtcatcgcgcatccactaaattcttctatcgtcgtcctcccttaatcagccgattgtgtttgatccacctagcccacgtgaatttcatcagcgagtagatcaagctatcgattgtgttttacctttagcatcgccccctacaatgggagcagatcaagctatccatcccatacatgtatgtgagctaacatcactgcaacagagaacagcagagaagggagaaaggaccagtgaacatttatatatccccattacatttatatatctgtttaatgctaaagatcaagtctgacaaatattctggaggcaaaggatataccgaaggtagtactggcatggagactgccaaataacgccaatgatcagacacgtgcatacaaatccaccatgggctactgcatgagacctagtacagtaccgaggtatggaaggtttaacatggttcctgttgatcagcaacagcaaggcattttgaggatacttagatgtgggactaaccaaatattttctaggcttagcaggctatggtaatatttagatttttttagataatgatggtaatatttagatgattgcccataactatgatggtaatgcaatagcattaagcttattcttgtgagcagcggaaatctcacccaacatatgcactatttaccattcgtcatttcatgactctaccaccttgtagaaaaatcatttgggatgaataagagcaaatagtttaatcgttacagtagccgaaatttgtgcttatgttgccaatagaagctgtgacactagcagcccagcaggtgttaggctatagaccttatcgtctaattagaattcagaagctgggtcgtgtaccactttcttccacatatttctgaaggcagcataccgactcccaatcgc

SEQ ID NO: 34051 - DNA, 1292 bp, Zea Mays
gtgcctcattggtctatcgacaacctgagattctgatttttctgttggaggaatgtcctcaaccacatctattcagccctcagcatcttcaggtggtgcatctacttcagctgatgagaatgcaaggcctcctgattcaggcactaattcttctggaccagcacgaagcatattgtctctacagttggaccagcggtcattacatttttctgttagtgcttgggttcttattgttgccttgattggcatctttccattggcaccacattcccttcagtataagggatatcggttgtcacttcttggcacaacatgtactacaggctatgctttgtttgctttgtacaggctaccccgagcagggaacatgcaggctgttcaggtgtggtgtcaccatgtaactgcatcaaaggattttataccattcatgtactgccttatgttttctacatccaaactgcacttgaagcttgttttggtacctgtaatttgttgggcacttgaacatgtcgctcgatttctacgtcgccattttactagctcatctttgtacaggacatacttggagcaaccttgtacatgggttgagacaaacacaaatgcagtccagtttctacgttcaaatgcagagattttgacgggctttcttttgatcctatccctgttctcgcgacagcgaaatcttatgcaaacattcatgtattggcagttgctgaagctcatgtaccattctcccttcactgccgcttatcatagagctatctggctaaaaattgggcggacaattaacccttatatccaccgttacaccccttttcttcatgacccgataaatgctggcatgagatggtggtttaggtaggttgaatgcagcactgtcagtcatgtaaagagatgcaagtatgtttatggtattattttactccaaagagaatctttgagaaaactgctgcttgggagtggtgtgattagtcccttgtgtggctttgagctgatgacaatttagtagttagcatgatcagtaactcttaactcttgtaggcttgtagctagagctagtcgagatcttagcctgtttggcatgaactgaagttaggtggggaggttattattgtgaccgaattgttttgatttttctgactattggctattgctgaccacatatcagtgttatcaaagggacgttactattctacgtgttatatggttcacccattgcacagtcttagtcgaagtgtacaaaaagcaacattatcctgttttactaaaatgaatctgttgacacctttttg

SEQ ID NO: 34052 - DNA, 1892 bp, Zea Mays
gagtgatgaaaaggcgaagaacatgaacatggatgaaaaggtcaagatgaccctagagaaagtcagacattcaacgacaaggtcatcaaagagaataccactggcattttagaaatatctggcagtggtcggatggctatcgaaaaaaaggtggatgggcttgtggctatgggtgacactgcttttaaaccgagcttggagcatgctgtgaagctcctggacgaccgagcggataagaagcgtgcaggcttcatcgttctcatttcggatggtctagacggccagtccaaatggggagatgagagtatcacccccacggatcctatccgaggcctcctccgaaagtacccagtccacaccttcggtttgggcaaggctcacgacccaaaggcgcttcactatatcgctgatatatcctatggaatctattcctccatcgtcaccgacaaccttgacaagatcatcgaggcattcgccgtctgcttagctgggttcaagaccgtagtagccgtcgacgcttgcgttgacatctggtcaaatagtttgctgataacaaggatcgaccctgggggttacatactccgggggagttccggaggcatcttggttggcacgctctatgctggggaggtgaaggacttcattgtctacttttcttatcgtaccgggagttggtcggggggttactatacaattttgaatgggattaatgccagggtcacgtacagggaagcgcctggcaggcagtcgaccactactgacacttgctcggtgtcgctcccaattcacgtggccaacagctcatctcctcctgcaaacccctgcccaccctaccccatggtcctgcagcagatggtccggttgaaggtgctagacttgcttataagcgtcctgaaagaattcctggtcctgaagggggaggctgctagtgccgtccacgggaaggaaggaggagatgacccggtcttgcaggccatcgcagcgagcttgctgcagaggaagtggaaagagttcaagcagtccgatgaatcctggaaagaagccccgaggaacttcgttaacctgggaggcatcgacgaggacatcagcgccatggtgggtatcctgaagcggggcttgggtgttggatgcatccactcatggctgtcgagcaatcagatgcagcgcgcgacagctacaggcggcttgccaggggctcacatggttgcaacaggccaattccgcacgccagcgatgaacgcaatggtgcaggaggcccataggcatttggccagggaagcatctgcccatgatgcggggacatcaattgtttgcaagcgcgccgtcgagcttctagatgggataaacaagcgattcgatctctggtgcaagctggaccaggaattgccgcgcacgaaccaaccgtcaccacaccaggaagaaggccatgagtcccgtgacctcaccgccgtcctacggggggacatcaaccgagcgaggcagcatgacatatacctggctgccgatcacgcgatcaagcaatggcgcagcttcctcacatccgtggagaagacgcatggccacgggcatatatgatgaggccactggcaaccaccacagcgtgagtggcgttcagtcgatgcagactcagacatacacaattaatataagtaaataaataaatttaatgagcgagaggccgtgacaccagtccctccgatcctgagaataattaatatttgtgcgtactatcctcatcgtcaatatattggtcctttgatttcccgtgtgttcacttactattgttctctaattactagtcctgatcagttccggacgactaagctgtaataatgtatcttttcttttcttttttattaataaaagaccatatgtatatatatgcgtcagtc

SEQ ID NO: 34053 - DNA, 2111 bp, Zea Mays
ctcactgcgcgttcgcattcgccaattccgccgcctcctcctcctcctcccctgtgtccgagatctcgcatccgctccatctatggaaggccaccacacgccgtgcccagccatcctcggattccgccaccccatcctcggattccaagcgtcgtccaccccacgtgcccctgcccgacgaccccgttcctcgcggcgcttggcttcagcgccgcgaccgccgcgccatccccacccagcacccatccgcaaacccactcccatgactgcccccgcctgaagaccccgttccccgcgacttcggtgccgcgaccatcgcgccatccccacccatccgcaaccccgctcccccgccgcgccatccccacccattcacaaccccatcccctgccgcccctcacgtgatcacccattcgcgacctgccccctcccctcccccgatgggacagggagcagcaaggtcaccaccggagacgacctcgatgggtggcggcgccgaggacggaggtggtgtcacagtctatgggaggaaggagatcatgatgggggagcagtgccagtcgatggacttctctggggtcatctactacgacgctgaaggccaccacgtcgcacaaccgccgccgcggcgctagcctgatgcccgcctccgtgacctcgccgccaatgcccacaccgcgctcgtcttcagtgggctggacagtgataccccgcgacggtggtgtagtgggagtgggacggcgaggaggttaagggcggcgacggcgaggtgcagagctcctacgggctccgccatcaacactatggatacactccaagaggccccttcaggaggatgaacagatttccagcaccctgttttcaacaccgaggaggatgaacattctacgaaatcaaaaggaccccttaagttctacaactcggagatccacacgacatcattctgtttgtcctcttttgcaaagagggtaattgagtcaaaggcagtgtaccgaggcacctcccattggaatggcgagtgctgatctgaatgggagatatttctattactgagattcagactccaatacaatataggtgggtgtaccaatttacttagaaggaacaaaagctatggaagaggcaaaaatcaagaatattgaaagctgactgtaccagaaggttctttttgcaacctcaatttgagatttaaggtcggattaccaccagaggcagtatacaatatcataatcgaggcgggcaacaagggcttgtggatgctggacatcctcaagaagttgctgatggcccccaacatcgccaccaaggtcgtgcgcaccctcgtggcaagcgggcttctcaaagaggtcagcgacgtgcgccaccgcagcaggaagatcttcatggccaccgacttccagtccttcgccgagatcaccgggggcacctggtaccacgacggtcgcctagacaccgacgccgtaagcaccgcgcgccgctgctgccaggcgcaggtcgagaggctcggcgccgcgaccgcgcagatgatccaccacgacattctcaaggaagaccccagggccgggtacactatcgacaaggtcaaggatatcatcaagaccatggtgctcgaagaggtcaagagcaccggcacgcgggattttagcgccgttatggccggcacaatgtgctatcggctggtgactggggctccgcagggagggatgatggagggaatccattgtgggatttgccccaggactcatgagtgctcgccggaggggatcatctcacccagcacctgcgtttactacaagaagtggttgcagatggacttctaggcggtgacgatgagccctcttctgtccatcgcgatggggtgttggattgtgatactcatattaataatcatctctatagttatttctacttagtccttttagcttggtataatcattcatatgtatttattccaccaagtttagatgtctttactgagtaccatatcaacttcctaaatatttaggtaatcggcaaacctttcagctcttctatctactgaagtcatgtattgagcatgtgaacccaaagtgtttctgttcgactacagccaaagggccaacaaagatgcg

SEQ ID NO: 34054 - DNA, 1165 bp, Zea Mays
aacctgggcatattcctctctctttcctcatcctcatccgagtggctctctccgtgtgctgtggcggcgcctggctctgctcggacggactccaccgaaggcgctcggctcccctcgggctccacctgcgacggccggccctctgcctgcaccgacggtgcccggccccctcggcatccaccagcggtgctcggctccaaggtatacagcagcagcgccctgtgtcgagatctcccttgtatcccttccctctagcgttttcctgatttgagtgacaagattctaagaagctgttgttttatgtgttacccaagatttaaataagctagtgttagaagctggtgttttatgctatcaaatgaactagtgttagaagctgctaaggaggagagctgcggggagggaggagagctgctgacggctgagagggagatagatatttgtgctggagctagcggagcctactataaaggatgcttttggaaaatgtgtgcaacaaggagcatcccgagttattatcagtccatatttcctttcccctggacgacactggaagcaagacattcctgctttagcagcagtggcatcaaaggagcactcaaatataccctatattgtcactgcccctcttgggctgcatgagcttatggtggatatcatgaatgatcgcatcaagtactgcctgcgacatgttgcgggtgatgtcgatgagtgtacagtgtgtgccggaactggaaagtgccgcatgtactcctgatggagcatacctgggaattgtttctggagaatacgagatctgacgagtgtatatctaggtccgctgtgtaccgtgaaaccaaaagcttgtacagttcattctgaacagatcgtcagaattagacaagtgccaaattagttatgctgtgcatgcttgcgaacatcaataacgattcattagctaatcttgagtttatttacgtcacgaacaaactcagtcaagtgctctgatatttccattcacatgttatctatattcctgctaccttgtagttgaattagacttattgccttaacatggatcaaatgagaatataatgtacccttgtttgatttgccagttctttttgtcatatatctgttagggacttgttctcaaatgctatgaattaaaaacaagacaacacaa

SEQ ID NO: 34055 - DNA, 2801 bp, Zea Mays
ggcgtccacacacctgacgttctgcctcccacagtcccacccgacatcctcgcccagaacgcgtcgctaatctcgcgatcgcgcctcggccgttccgcgcctgcctgccgccgcccgcgattgtagctcaccccgacaccgtgccccctctcccctggcgtgatgcccgcctcccacccccttctccgcaccgcacggatctagcgcgggaactgctcagccacggctccgcacaccctcccttcccatgatacggagctgtcctatcctgctcgcgaggcaacgaaagggtacgtgatcctctgtctacatggaaggtgaggcagatcggggggagagtggctcgtggcagtcgcctcgatggcgtccttcgcgccgtccggcgaggtgtcgtccaagcacggcgtcgtcggctacgggatcgtgggtgggcccaacggcaacgccgtcgcgcccgctgccaagtccaccgtcgtcgagaccaccatcgagagggttatcttcgatttttggttcctggcgctcctccccgccgctcgggaaccactccaccgctgagaccgtcgtaacgatcggctccgttgtggcccgcctgtgaccccgtatccgcttgcgctcagctagggttcagatctaaaaatggctgatgacggtgcgaggaggggaatgcccgctgaaggctgaagctgcccccacgggctacagtaggtgccatcgctcgccacaccgaacaccccactgccctccagaccgtgctccagggccctacggcgataggaggccactgaggatggatcagtgcggtactgctgccttccggaggacgccgagcgccggagagggggctcttctattggacttggagcaagcccacggcaacaacgccggaagcaaaatggcctcttctctagaaggacatgagttcgatccaccgtaaggaggcgtgcccgccaggctccatcttcggatctgatcgcccaccaagtgggttgagttcggatgacgagagtttgcctgcaactgatctaaaggttagagcgagcggcatgtgatgcggataaatgaagtcagcaaggaatacttcttaaaaactgtaagtaatattgttggtgataaattgcttaagcaagctgcttcacaatatcaaatgcaggcacaacgaagccctcagacaaacccaagcaactattctttatcaggtcaagtttctggtcagcagactgctcccagtggttctgtgacaggagatgaacagaagggatatccatgggcgcacaccatccctatgagacaagctattgccagcactcgaccacctcaatttcggccttcctcgtctggccaaatgcggagtaatacggcatcacgtgcagcgaccacaaacatcttcaccagtgtttggggcaaatagtattcatgcacgtccatttctgcggccagttggaggtccagctgcaccatttagaccacaaatggcagattccaatccaagagcacacttgattcagggagctgtgaccacaatatctaggagtgtgccaaaacgatccatagtgtctggaaatgcgccagtcaatcaagccttgggatcttcaaaagtcagtgctggcatggaaagccagtcacaacaattgagtgcgcctaagcctttagctgcaacaagcttaagtcagactcaatctcatggcattcaagaagagcctaaaattcaggaatatatgaggtcttggagttgagggatggaggatctgattattttggcaaggattacgaactgaacttaaatcaaatacttcagtattggtctctagagaggaagctctgccaaccattattaataactgagaagggagacggtgttggaggaggcacatcagggcatggagctacatgagcactgccgccatatagttgacaacgatgaccaacactgtagattccattctctgtgtgtacaccaagcgatgcgcttttcacggttactgcgaccgtgatgggcatctaggtgctcaaaccatcagttgggctgaggaacactgagcagcaacaacaatatcgtaaggagagtgcatatgttggacaaatggtatgccatatcttcagttctcttatgatgcttcagcgctgcatcttcagttttctcggctaaaaagagatcatagtcaatagtatacctatgtgtgaaatactgtcaaacttggtatatggacctcagaaagtataggaaagcgctatgctatttgcatgtttgctgggagaaagaaaagatagatgaagttttgtgaacaaccctaacttatgtggtcctggcaccacaaaaccttgtcctgatgctcctcccttttctccacctcctccatacaaccctacaaccccgatgcaatcaccaggtgatttattcagattgtccagtgaaatccttgagttcaataggacctttccttccttactctttcatctaaatgacatcctaattgggaaaatgtatacttccaaaacaagcataatgctgtcaaggctggagagcggtaaggaagaactgcacgttttcctgaaaattaagttgaaaataatttgtaatcaggagctagagcgttacatggtactatgattctgtgctgctattagtctgtggcttagcggtatgtgtgttgtactgctgttaatttgctatactggaatactggaatacaataggaagctactatctgtacctcgtgggattcaggaatgcagaacaagtcaataactaccttgtccttttggttttccctaccctacattagtacgagagtgattaa

SEQ ID NO: 34056 - DNA, 3671 bp, Zea Mays
aaagcggtcagtgggtggaggcagccaagagtcaccctgtcgccgttgccgtcgccgaggcaggcagagtctccctgtcgccgttgccgtcgccggcctcctcctcctctgccacttcctcccaactcccagccgcaggggccgacggcgacgggagggaagaggcggcagaggtactccgaggggcgcggagagaggctgtgccaggccacgccgtccagtgcctccgggtccgtcgccgcagcttccggccgcgtcggagaggtagcccccggagctcttcgcggaggctcgggaatggtgcactgggttagcgacagtgatggcagtgataacttcgaatgggacagtgatggtaacggggagcagacagtgagcttcaacgctgctggtgctggttcatcagctctggcagcgacgaacactgatgctcctggcccatcgacacgggttgctaatggcaatgggaaggctgggcgatctgcctctttggttcagaagtatgtggacatgggtttctcagaagagattgttctgaaggccatgaaggacaatggggataatggagcagattcattagttgagctccttcttacttaccaggaactaggcaatgacctcaaagtggataatgactttgcttctagttgtgcccccaaaactgctgacgatagtgatgatgatgacacactggaaatctgggatgatgaggatgctggagggagaagcaccagggttgctaactctgttgatgattctgatgacgaggatttcttacatgagatgtcacggaaggacgaaaaagttgattccttagttaaaatggggtttcctgaagacgaggctgcactggctattaccagatgcgggccggatgcatctatttctgttctggtggattcaatctatgcttcacagaccgcaggagatggttactgtggcaatctgtctgactatgaggataattcctatggagggagaagcacagggaacaagaaaaagagaaaaagatatggaggccaagcacagggaagtagaggcccattagatggtagctgtgatgaacccatgcctctcccacatccaatggttggatttaacttgccagaccagtggtcaagacgagtggacagatcgttgcctgcacaagctattggtccgccgtacttctactacgagaacgttgctcttgctccaaaaggtgtctggactaccatatcaagattcttgtatgatattcaaccagagtttgtggactcaaagtacttctgtgctgctgccaggaaaaggggttacatacacaacctgccacttgagaacaggtcacctctcctccccatacccccaaagacgatatcggaagcatttcctcggaccaagaggtggtggccttcatgggacccaagacgacagttcaattgcctccagacttgcgtgtctagtgcaaaattgttagagaggattcgcgtagccctcacaaacagttcagacccacctcctccaagagttcagaagtatgtgttggaggagtgtaggaaatggaacctggcatgggttggcttaaacaaggttgctcctctagagcctgacgagatggagtttctactcggctttccgaaggatcacacgagaggtatcagcaggacagagaggtatcgatctctaggaaattcatttcaggtcgatactgttgcttaccatctctcagttctgaaggatctgttcccacaaggcatgaatgtgctgtctttattctctggtattggaggagcagaggtggctctccacaggcttggcatacagatgaacacggttatttcagtggagaagtccgaggtcaaccggacgattctgaagagttggtgggatcagacgcagacgggtactctgattgagatcactgatgtgcagacactgtcatctgagaggatcgaggcgtatattagaagaattgggggcttcgatcttgtgattggtggaagtccctgtaacaacctcactgggagcaaccgtcaccacagagatggtttggagggcgagcattctgcattgttccatcattattttaggatcttacacgccgtcaagtccatcatggagcgtttgtagttcttagaatctttactgttgttttggttctagtagaatactttgtgaccgaacttgtaaatggtttgcaggttgactggtttagttctcttgccactctaatttaggctagttttttttttatttaatcttctttggtgatcttggtgcagttctgtggcactgttgggtattcaaatgcagattgatccgagaggctgccctgttgcattttctttttaaaatttgtatttgtcaatgagagatcaggtattctggttgccaaaaaaaaatctgaagttgtggagctgagaaaaggacggtgctaagctacaaccacccactgccacaccatgcgcacccccaacccaaaagatcctgcttttgctcacgcttatcaccactcccatctccatccaaaaccataaaaaaaaccagtgcgagctgaagcatccaggctctggaatcatcgtcgggatgtctgtgccagcatcagcccaggtgcctcacaccatacgatctgctgggagctgctgcttcaggtcgtcgcatcaactatctgcgcagaatctgggccgacatcgcaggtggcgggggaccggaaagaagaagatcctttccacccgtggcgtgcttgagtccagaaacggcgcacatcctggtggccttatgaagagaaggtcgtggagcacatcatcctgctcagagccaagcccaacatctcagacgctgaagagaaagacatgctggactacctatacacatcgcagtaccagatgcgagggatactcgcggtctcgctaggccgcatcgaggaccccaacagcgacaacttcacgcacgctgtgttcatgcgtttccagcagaagcaagacatcgcggagttccagagtaacgcgtactactccaaagttgtcgacgagcacgtaaagcccgtttcctatgtacgccccagcccccagccccagcatgtgaaaaatcttctctccagttcttggatatatatataaatatatatatacggcaccgtgatggtcactgtttgggttaaacttacagggctcggtttctgtagatttcgagtccgaggtggaagacgacattatacctctctttcgcaggggagagaagaaaaatgtggcaggattttaactacggcgtcgagtttatgctgctggtgtctttcttgaagactgcgtctagagaggcaacggaggacgcattagcgtctcttgacaagttgatcagccaatgcagcgcttctattgtgcaggcaacatgtggctgctgtttggatcgtccggataacgggtacagtcatgctgcagtaatccgtttcccatcatctgatgagttgaagctgttcagggagagcgaggagtacaaggatatgtgggcgtccaagttccgcccgatcgtggagagatccctgcacctgcacttcaccgttgaccccgtggggaaccagctgatgtagaccaaccgagtggtcatccctatacatgggaccaagagcatctgtactgtacagtgtaaaacagagagatggggtaatatagaggataccgatagggtcaacaaaa

SEQ ID NO: 34057 - DNA, 2064 bp, Zea Mays
gcggccgtagcaccgtgcccctctcgagttccgactcccgcagtccgcacctctcgcgctcgccttcgctttgtcgccacggcgagccccacgccgccgatcggggcgccgcaagcggcggcgcccgttccgatggacgcggatgtgggggcgggggcgacgaatcaaccgtggccggagcccgacgacgcgcacctctccccgcctccgcctccgcctccgcctcccgcctccgccccgactccagccgccgaggctgccgcgcccaccgcctccgcggccgtatcgccgccagcgccggcggaggcgaacggcaactccgacaggaagaggaggaggaaggcggacgacggggacgggtgcaaggcctgcagctgcaagaagtccaggtgcctcaagctttattgcgtgtgctatgcttccgggtcacattgtactgaattatgtggatgcgaaccttgtcataacaagccacctcaaggtgctccatggactgcaccagttttacctctgaaacctgtccaaacattggaggctggtcaagaaatagtggaacaactcataaggtcccctatggatcttattagaagaaaatgcacctgcaagaagtcaggctgccttaagaagtactgtgactgctaccagggaggggcaggatgctctatcaactgtaagtgcgatgattgtagaaacccatttgggagaaaaggtaatgcaattgaggagttggaaaatgggttctactgaataatttcaaagtgggagttctgtatcagatttctggtttggctctgtttggtacctaagtattgcacaagtttcttccttaactgacaactagataggttatttgcatgacctttgattttcattgcttgacactgttctgaacaattttatgtcctagcattcttaggaataactacatagtgttgtcggaaacaaaaaaggggatgtgataaaattgttggtagcctcctgatgaatagtttgttttgtatggtattttctggattccttgaagttaccctgatacgttatgttgtctccctgaatattttcattccgataaaaagtaacatgtatgttttttcccattatatttgtttaacggatgatggcttgcttggtatttgctcgctaatgggataagctacgatttgaagctgcaacttcaacccgttcctgaaactaagatattcctcgttcttattctgcagtcggcgttattttggatggtaaaagcagcggtcttcccgcgcccgtacatgtgcatgaaagaaacgggactgaagctgactcgagcggcgacgacgaggaagacgacgacttgtacatgaaccgacagctctccccgtctccggtgtcaagggagtcgtcgttccagcaggagactctggtcggcgtggaagtccagacgatgaacgggcacctgtacccgaagccgctgacccaggtgcgtcccgagccgtcctcctggcagctctccgccgccaggaggccggccgaggaaccgcgcggagaggtgtggcgcttctcggggaggcccggcgaggacggggcctccgacgccgtggaagcagcgcgtgccgtcgcggtcgctcccccgagggagagcaggagaccggggacccgcggtggggacaggctcaggttcagcatcccgcggtgcgtcgaggcgatgagcgccatggcggagctgtcgcccgtggagaagtcgcttgcgcccgacgtgttcttggacgagagcaaccgcgagatcttcctctcgctgagcgtagatgttaggcccatctggctgaggcgtaagatgaagagccttgtctagctctagttttttttaaatttttaattgtacccagtgctaatttatggtgcatgttatattttcgagtcctgcatatcgttagcagtaataagttggttacgatttcagctagaagaagaggagaaattgtctctgccccttgagtaaacgtgcgacaagacgatgtgtccagtgtccccctgaacagtggcagcaacgtggtgtggcaacaacgaaaacagacagctcaggcgacg

SEQ ID NO: 34058 - DNA, 370 bp, Zea Mays
cacaaactcctcccgataagttttaagcaaaagatcctatgtggaggaccaagtcctcccgcacttcagtcttgtttttcttcatttggtaccaccttggagcaaaagcaacaaaaatttgtcgcttcctcacctaaaaacaacaaacggataaaccctgagtatggaattactcagcaagtcttacccgactaaggaaaagactcacaagggtatgctggataaataggagtcaaggagaggctttagcaaaaatcaacttatacttttgcagaagtagcttattaaagtgagtccttactttcaatcttttaacgccatattaagtattaatagactctatttgcatctagtctaatttcaccatctc

SEQ ID NO: 34059 - DNA, 2713 bp, Zea Mays
gtgaacttgtgaagcataagctaaagcatacattctcatctttggcattgaaagaactgaaccatagaaaaattaaagacaggagcacttctccagattcaatgccaatgaaagaacttatagctgttgcacaagctagaaggttttctcgatcaacttcctttccagataacttcctaaatgccaagtatattcctgaaacatcaataaatataccttctaaggaaggcccacacaggcagttgtcaccctcaaatcggataatcaggtctacttctggaaatgataatgttaattctaggagtccgtttgataatattcagcagaagaaattagcagcacatggagccaatgcagcgcgaaggtctttcaaagatttcctcagtacattgacaagaaccaaagaaagtatatcgcgcgcgacacgtcttgctatggaatgtgctaaatttggcattgctggcaattgacattatcgttgaacatctggaaaaggaatcaaatttgtataagagggtggatctcttctttcttgtagattcaataacacaatgctcccgcaatcagaaaggcggagctggagatgtatatccctctctcattcaggcagttctacctcgaatactctatgctgctgcacctcctggaaactcagcttgggagaatcgaaagcaatgtctcaaggttttgaaactttggcttgaaaggaaaacactttcagaatatatcatccgtcaccatattagagaaattgagactatcaacgaggcatcatttggaagttctcgccgtccttcaagaacagagagagctctaaatgaccctttgcgtgacaatgaaggaatgcttgttgatgagtatgggagtaatgctggttttcagctacccaacttaatttgcacaaaagtacttgaagaagaggaagaaaactcttctgaaggcaggagcttgagctttgaagctgttacacctgaacaggatgccccatataatgatgacaatgaagaatctcaaatgcctgttgagaagcatcaccatattctggaagaggttgatggtgagcttgagatggaggatgtagctccaccatctgatattggggcaaccaccaagtgccaaccagagcaaagtgacaccaatcgtgcaccatctgaccaacgcccttcagatgctggccctccacttcctgtggaccggcctccatctcctccgccattgccatcatctcctccacctgtccccgttcctcagagtgcacagatgcagcctaaattacaaatggcatctgatcccatggcgccacatcctcaaagagctacatatagtgttcaaagtcaacaacagcattctattgcagagcacccaggtaacatgaattcttctgttgcaccattgccacccccaccgtttaacagttcaggatatggagggcaacaaaatcagataccacctcccccaccaatggcaccactcaatcctcctggtccccatggcagtttccctgctcccccagcaccttaccatgggaacaactatcatcggcctccaaccacatccatgcctaacgagggatatcatcagcaaccaccaccccctccaccgcctccaaatcaattcccttctgtgccaccagaacaccaacataggccacatcactggggtaataactgtccaccgtatcccgagagatatcggtacaatggacatgatcgaggtaatcacagacatgatagaaggcatcatggacatgacagacaacaccattatgatgatagaggataccactacgatgatagaggatatcactatgatgatagaggccattactttgatgatagaagacatcattttgacgatagaggacatcactttgatgagagagctattagggggccaatgcacaatgatgccgctgaccagggaagatattcttttcctccaggtcctcctcggattcctgaccattttgaagctccaccagccccaatgcactatgggcgaccatcagatcctccgccaaggccttgtgcaggctggtctaggccgcctaggatatctgataactattctccctcgagacattctgtggagcctccagtttcacatacagctggaggtcatggtggatggagacctagataacctttttcggtatcgaagcggtgctctgatgctttccttggtctgtgggggcttaacctgtgggagagtctgtctggtgtctctgcttcaggttgaaggcacccacggaggtggagcactccaggaaagtgggagctggtacctgcctccttgtacagatgtatctcatggattctacggcggtcgggctgcctgaactgctgtttgtaccctagtaggggtttagactgcgcgaccacacgcagagctgagttgtaggggtgtagggtgtcttctatcaaccgatcgtagtcttacattgtactgtttgttagtgcaacagtcctcgattccattgctgaattcctcctggcctcatcagacgacagccagctgctctgatgtcttgccgaaactgtttgagcacagcgtacatatatgcctaaaaaagagaaatataaatcattttgcccgttgcacctgcttatatataagagcatggtcgaactaaggggtgtttggtttctaggttcgctcaattttattttatttaatatggaaattttagttaacctagaaattagtctctaga

SEQ ID NO: 34060 - DNA, 1944 bp, Zea Mays
acaaatcgggtttgccgtgcggcacttgcgttttgggtcgggtacggacccgcaaaaagagctccgtcagttcctctacctcctctgtaggagcacacttgtttcggaaaggaacgcagattcacgccacgccgccgcctcaattatatggcgccggcgttctcggcacaggtccccgcgctccgacggggagcactgcgcgtgcggtgggtcacggctgcgctgttctcatcggggattctcgccggcaacaagccgattctggtgcgtgacttcgtgaggtcagcgttgtacgaccccaaccatggctacttctccaagcgggcgggaccggtgggcgttcttgacgccagcatccgcttcaaccagctcgaggggaggagtgcatatatacagcaccttgataagctgtataagaagcatgatatcgcttggtttactcccgtggagctctttaagccatggtatgcctacacaatagcagcatcgattctgcgtacagcaaatctttcagtcccattgaagatatacgagattggtggtggctctggaacatgcgcaaagtgcatacttgattacatgatgctgaatgcgccaccaaaagtctacaatgatatgaaatacattagagattagctcctctcttgctgagaagcaattggaaactgttggtgaagtgcaaagccatttgtcaaagttcacggtggagcaccgggatgcaattaacagacctggatggggccgcacggatcctcatccatgttgggtgcttatgcttgaggtacttgacaatctaccacatgaccttgtctattcaccagatcaggtctctccatggatggaagtgtggattgaaaaagtaaaaggcagttcacaagcttccgaagtctataagccattacaagacccattgatttctcgctgtgttgatattattggcatgaatgaagacaaagcttctgtcagtgaaaaactaacatttgctgcaaaaggagttctatcaaaagtattcccaaagcctcgtagagcttggttgcccaccggctgcttgaaactaatggatactctacatcaagctttaccgagcatgtcccttattgcttcagacttcagctatcttccagacgttagcatacctggtgacagggctccattggtttcatcaaagaaggatgggaagacatcagatcatcgcaactactttgatgctcagggtgacgcggacatcttcttcccaaccgacttccggctcctggagcagatcgaccataactgcgctggcttctcaaaggagcagaagaatcccggcgcattcaaacccgtgaagaagaggagaacgatcatacttgatactgcagccttcatggaggagtttggcatgccgctgaagacgaggaccaaagacgggtataatccgcttctcgacgatttcaagaacacaaagttctatctcagcgtccctacacacaacgttcctacccatagcaggaggaactagtcttctttccttttgctgatgtgtcacgagtcaggaaaagacgtctgacaggctagaatcggtctgtcattttgagtagtctgaatttgcaagttttcttaccttaaggtgctgaaaattttatagtttctcttttctgtagaacaaagtttttattatcatttttgacattgatgcatgggtaataaaaggtggaagaagactgactaacaaggagtcaaaccaaatgaatggtaaaagcaattacaggctgcattccacacgtataacgaaagaaaatgttcagtggatacaaaagggtatattctttgcgattaatcttttcgttgccaatacagctgccgccccatactccagggaattacattatcttctaacaaaaaaaagaatggttacatcgaatggctccaatatacagcttctcaccatgctatcagcaaaaccgg

SEQ ID NO: 34061 - DNA, 1728 bp, Zea Mays
cgcagccccatcttcatcttcctcgcagcgccggcgttccatcttccgctcctcccttattcgcgctcggcacgcaggcggcggcggcggcactcaggctcgggatctcagcgacggcgctcaggctcgggatctcagcgacggcgcccaggctcgggatctcagcgacggcgtcagcggcttcccttcagcctcgcgccctcgccttcgatcctccgcacaccggccggtgaccctgcgtgcgtgcccctctctctctccgcccgcttccggtggatcgtcaacggcgcccgatccctgcgccgcgcgcagtgtgagggccgcgggagcgcgttatttctctgagggcactcatgatttagcacaagtcatactgatctctaactctggtgacataagctgttgttagggtagcaaatcaagagataaaaatggcagattcaatggtagcgagcttctgggggcctgttacatcaacaactgagttgtgcgaggagaattatgcacactcatcatatatagcagaattctacaacacaatttctaatgtcccatgtgttcttttggcgcttattggattagtgaatgctttccgccaaggttttgagaagcgattcagtgtcctgcacatatccaatatgatacttgctattgggagtatgatttttcatgccaccttgcaacttgtattcagtagatgaactttcagaatattgatacacccattaagggacgaagtcgggaagaaccattagggtgtgggggcttagctatattaaattgctagcctacaacagagtgacgagactccaatggtctgggagatccttctttatatgtatgtcctttattcgccggactggcattacaggagcacaatgccaaccttccttttcctatatggtgctgcctttgctgtagttcatttctttgcccggttccaattcgtattcaagctgcattacattggcctctgcttcctctgcatcccccggatgtacaagtactacatacagaccaaagacgtggctgcgaagcggctcgcaaagctgtgggttctcacgttaacccttgggactctctgctggctagttgatcgcatcttctgcaagaagctttcgcattggtatgtcaacccgcaggggcacgcatggtggcatgtgcttatgggcctcaactcatactatgcaaacacattcctaatgttctgtcgggctcagcagcgcgggtgggaggcgcgaatcacctaccttcttggatttttgccttatgtcaaggtccagaaaccagagaagaagagggaatgatttgtctctgcttaacactgatgctactcagtccaccgccagtaagctaatgtctatcccccaccccatcccccacccaatgtgcgcagacaagttgtggcatttttgtatatgggcatccaaatgattacggactataaatgttctgatgtcacactggatttcggtaacttttgactggcacctgttttgtaccatacttaatcatcgaacggagattagttggagtggttggttggtgtcctagttttggccatctttcttttggtttctttgcaattgccttttggtggtaataggacagggttatttgtttattcgtttgtcgttgaatggagtccagttgtactagttatcatcactccgcatggggatacatccttccatatgatgaccgttaattcattgacttgtgttggtg

SEQ ID NO: 34062 - DNA, 657 bp, Zea Mays
atgaagcgaaacatatgctttggagtccaaaaatctaattttttctgggaaaagtgcgagcacattgtttgtttggagaaatccaattttctactcacggacgccgcccctgtgcctcgccatcgcctcagtgaggcagcaagacgtgaggtccaggatgatgaacaacaacagtggcggcggtgccggaggccctggagggggcatgggtacgggagtgggtggagggggggacgggcggcacgacgacgaggctgcgctcaccgagttcctctcatccctcatggactacacccccacgattcccgacgagctggtggagcactacctcggccgcagcgggttccactgccccgacctgcgcctaacgagactggttgctgtagccacccagaagttcctatcagacattgctagcgattctcttcagcactgcaaggccagggtagcagcacctatcaaagacaataagagcaaacagccgaaggatagacgtcttgtattaaccatggatgatctttctaaagctttgcgcgaggtttaatggtttacccatcgacaagaagaccattatatgcatggaaataagcacttccggaatctacaacctaggaatttcactgaaaacagtacaatccctgcagaattcagtaccat

SEQ ID NO: 34063 - DNA, 3320 bp, Zea Mays
gtcagccacgttctgatttcgaagaggggcaaaaaagtccaagcagatgatcttttctctgttgatgtatcgaatagctcttcaatggcattttgtctgtaaacagcgtgtgagaatggcgaactagcgaagaccttgtacataatggcatttgggcgaaacccaagtttcataatggcatgattccaaatttctcctctccgcgacgggcgcccatggccatggcagacgaaacccttgcgccctcgtcgtcgtcggcaaagccctaaactttagtccacctccatttcggaaccttagccgggcgttcctgcgccgctgccatgggctgcagtcgccatgtccgttttgtctcctccggcgtcaagctaccgtccgcgtccgcgccatccccgttcccggcgcccgctcccgcgctcctctctgcggcgctcccgttcgcgcacatcggccgcgccatcgacgccgccgcgcgccgcctgggcgcatgcctgccccgcgtcccggttgcacgggccgacacggctccgcccccgccgcggaggcacgggaaggacggcggaggggccgaggagcgggtgctgatcagcgaggttgcggtgcggggaaaggacggggagccactggagcggcccgagctggaggccgaggccgcggcggcgctgcgcgcgtgccgccccaatgccgcgctcaccgtgcgggaggtgcaggaggacgtgcaccgcatcgtcgagagcggactcttccgatcgtgtatgcccgtcgctgtcgacacccgtgatggcattcgcctcgtcttcgaggtggagccgaaccaagacttccatgggctggtatgcgagggtgccaacttgctaccgtccaagttcctggaagatgcattttgtgttcgccatggaaaaattattaacattaggcatctggatcaagtgatcaagtccgtcaatggatggtatcaggagcgtggcctaactgggttgaaacgaagatgaaacagaaacaattggtaccatggagcaggaaactaaggtgataaggacagaaagaagggaacaatgggaaagcagacatgcctagtgagcgcggatgttaacatacaaaataggaacgaaggtctcatatgctgagatactttctggagggattctgaggctggaggtttcagaagctgaggttaataacattagcattcgctttctagacaggaagactggtgaaccaacacttggaaaaacacagccggaaaccatccttcggcagcttaccaccaggaaagggcaggtcagagcgcattttcaggagtacctttctcaatctgtctatgttttatatacctcaggaggactattgatgatatgctaaaatgcaaatagcatctttcagtcatgttcttctagatgtcgcatgaaatgctaacccttccaacttcacatttttttggatttcatgttctgttttgcattattcaagcactgaaatttctatgcaaaggctaataccagaatcaccagcattgataacaatataggcgtatcagtttggttggcgacttccgacttggagcccacataaccaagtccctcttttcttttattatgattgtgtatattctgtcattttcacagtaatatttggactcagactgggtgctttggacttaacattatgaaaataagcactgcagcattctgaaccaaaataatattatcaaccatctaaaaactatcacgtcgcaatagtatataaattttaacgttttatccatgtcctgttgtcttatgctctaacattaatattgcctgttaaaacttcaaattagtcgtgtctatttaaaattaagcaggcttacaatagggcacaagtgaaaagggatgtagaaacaatacttactatgggaataatggaggatgttacgataattccacaaccagttggagattctagtaaagtggaccttgtcatgaatcttgttgaacgcccttcgggtggtttctctgctggtggcggaatttcaagtgggataacaaatggacccctttctggacttattggcagctttgcgtattcacatcggaatgtttttgggaggaacaagaaattaaatctctctttggaaagggggcaaatcgattcaatatttagattgaactttactgacccttggattgatggtgacaacaagagaacctccagaactgttatggttcagaactctaggactcctggaacacttgtccatggtggtgatcatcctgaccatgggcctataacaattggacgtgttactgctggcttggaatatagtcgaccattcagacccaagtggagtgggacacttggcttaatttttcagcatgctggcgctcgtgatgataaagggaatcccgccatcagggatttctataacagccaattaactgccagtggacatgattatgatgatacattgctagctaaatttgaaagtatctacacagattctggggaccatagctctgcaatgtttgttttcagcgttgagcaaggtctccctgttcttcctgagtggctaagcttcaacagagtgacaacacgtttgaggcagggctatgaaattggtcctgctaggcttcttctaagtgcctctggaggtcacgtggagggaaattttccacctcatgaagcatttgcaattggtgggacaaatagtgtaaggggatacgaagaaggtgctgttggctctgggcgttcttatgctgtaggtagtggtgaagtgtcatgccgcatgtttgggccactggaaggcgtggtctttggcgactatggtagcgatcttggttctggtcctaaagttcctggtgacccagccggagctcgtggaaagccaggtagtggctatggctacggtgttggcgtccgcgtggactcccctctgggacctctgcggcttgagtacgccttcaatgataggcaagcaaggagatttcactttggtgttggctacagaaattgacatgtatattgattacattcagattcagccttgttcttcttagcattttgggctggtagaagatagtgccatgccttccaatttttggcgtttatcaaagcaaattttgtttagatcagatttctttttttctgtaacatatagtttccttctccacttctgtcgagtgttctccagctagagaaattagatggccccctgtaacgccctgaatttggggtaagattttttcttcttttctctcaccaaattcgggtgttactctcttttctctttccccgtttgctccttctccccaatttcaaactagtatagcgacaggtgtccg

SEQ ID NO: 34064 - DNA, 3290 bp, Zea Mays
caacccgccccacgcgacgccgaccgcagatccttcatctctttcctccctcgtaggcgaacccgactcaaaccctagccccctctccttgccatccccgcccatggatcgcgatcgctcctcacggcgcactcgcaacgacgacgggcaccaccgatcccgcggccgggacgacgaccggcaccgccgccgtagtcgccacgacaccgaggatcaccagcacgacggtggagacgaggaccgtcgccaccgccgccaccgcgacaaggacggtggcagaggcggcgaggatgaccgccggcaccgtgaccatcacgataaggacgacagccgttgccaccgctaccgtgacggcggtgacgacgatcgccgccgcgggaaccgacgttccgtttccccgtccgagtccccgccaccctcggcgaagcgggaccgctcgtctagccgcccccgggagcttgtcgagcgccgcgactccaccgaccgcgagccgcggtcgccgtcgcggaagagaaaggggcacgagggcggtggcgacggggacgagcccggccgcgaagggggcaagcgggccagggcctccgtagacccgcctccacccaaggaggagaggcctaggcgggagcgccggaggtttgaggatgtcggtgcgaatgggaagaatggtgatgtgagtaagtcgagtaaggaaatctcatctcatgggcagaagggggagttatcaattaacggagattcacagaacggcaatgggcctaatgctggttctcagcaactgctcagtgccgttcctatgccatcttctgttcccattccttcaaagatggaagtgcaacatctgctgctggcaaaagtagtaacctatctcttgatgctttagccaaagcaaaaaaagctttgcaactgaagaaggaactgtcagaaaaactcaagaaattacctatgctgtagatgcacaactcttttctaaaggagaagcaaaacctactgatgtttctgttctgccaactagtaccatctctggaacgccggccgtaggtggtgctatcggtattccaggtcttacgaacattcccaatcttgaatctgtgaagcgagcccaagaacttgctgctaagatggggtttcgccaagatccacaatttggtcctcttatcaacttattccctggtacatccactgaagttactgtgccacaaaggcctgcaaaggctcctgttcttcgccttgatgcccaaggtagggaaattgatgagcagggaaacgttatcagcatgacaaagccaacaaatctgagtactctgaaggtcaatataaacaagcagaagaaagaggcttttcaaataatcaagccggacttggactctcttgcaaaatcaagtgttcattttgatgaacggatgggcataaaccaaaagaagctccttcgtcttaaaaggccaggatttcagttcgttgaagagggtaaactcactaggcaggctgaattgcagaaaattaagagtcaatttggtgaagcgcaagctaaagagctcaaagtaaagcaagcccagcttgctaaggcaaagacagaagtagacatgaatccaaaccttattgaggttgctcttggtgtgagagctccaaaacaaaagcagaaggaagagatccctgaaattgagccatgggatgcaaaaattttactttctgccacatatgaggatgtctctgtggagaaacttaatttggacaagatcaccatatatgttgaacatccagaaccatatgatccacctgctgagcctgcaccaccgccgccccagccactgaagttgactaagaaggagcagaagaagttgagaacacaaaggcgtcttgctaaggaaaaagataggcaagaaatgattaggcaaggcctcttggagccacctaagcccaaggtcaaaatgagcaatcttatgaaagtgctaggctctgaagctgtccaagatcccacacggatggagatggaaataagaactgcggctgcagagcgtgagcaggctcacgttgaccgtaacattgcccgcaagctcacaccatctgagcgccgtgagaagaaagaacggaagctttttgatgatccaactaacacagtggagactatagtttgtgtttacaagataagagacctgtcccatccacagacacgcttcaaagttgatgtgaatgcacaagagaataaactgacaggtgctgcggtcattactgatagtatcagtgttgtggttgttgaaggggggaaaaagtcaatcaaaaggtataataagctcatgctaaaccgtatagattgggctgctgctgttggtggtgatgaagacgcagaagcagaagcggaagctgacaagccagtgaatagctgtgaattggtctggcagggtagtgtggcaaagcccaccttccacaggttcactgtacataactgccggagtgaatctgcagctaagaagatattcgttgatgcttctgttcctcactactgggatcttgctgtcaattcctcggagggttctccctgagcaaagcacctgttcagaaccttggtagctactgctgatctttgctggctacatgctagttatgtgtggccagtgttatagcgcttgttatggtaagacccttaccacgagtatctacatcaatggcctcatcagttgaagtactgaactcagtaatgcctggtgttagggggtgtttatccctccattttatttcatttgtccctagattgccaaatacagccatatttgtcaatttaggaactaaaatggaataaaatgtagggactaaaaattagtccctataaaccgaacacccccttaatctgttgtgaacatgctatttcagagatgttattgttggattttcctgtggcctagaaactgttatgtgagcaactgttgaattttgcacgctcagcgtgcatttggaataaaccaattgcatcaaatgactgcgtgtatttagtattgttgcggtgtgaattgcgggcagtgcctgcacatcaattacaaattcatcaacttgtgtggatgtttataatggttcatcaattttaaaagtataattctggatcaataaacttttcaagctcccttggctcgaatttttttttcaagttgtttaacgtactcactcggtcctaaaagaccatctcaagttgtttaggcacacaattacaagttcatcaacttgtgtggatgtttataatggttcatcaactttaaaagtataattctggatcaataaacttttcaagctcccttggctcg

SEQ ID NO: 34065 - DNA, 1627 bp, Zea Mays
atgacggccaccgccagctgcttctccagccccgtcgcgtgggcgcggcctcgcgccggccccgcaggcgcgagtgcggccttgcgcgtgggccggtgtcccgcggccgcggtagcggcgcacgacgtggcgttccacccggacgtgtcccgcgcggcggattcgctgcaggcggagttccgcgccgtggaccgcgccatcgctctcaactcctcccgcgtggccgccgccttccgtcgcgcgcgcgtcgccccgcaccatttcggtgggtccacggggtacggccacgacgacggtggcggccgggaagcgttggactccgtcttcgccgacattgttggtgcggaggctgccattgtgcgcccgcagttcttctcaggtacccacgccattgcctgtgcgttgtttgcgcttctgaggcctgggcatgagctcctggcagtcgctgggcccccgtacgacaccttggaggaggtgattgggatcagggggtcggccaatgtagggtcactcaaggatttcggagtgacgtaccgagaagttccgatggtggccttgattgggatgctcttgcttgctccatcaggccggaaactgggtgtgccttcatacagagatcgtgtggatattcgtggcgcaagagcttaagtgtagcagatattcacaaagctataggtttgatcaagatgcaaaatccaaactgcatggtgatggttgataattgctatggtgaatttgttgagatatcggaacctgcaatggtgggagcagacttgattgctggaagtttgataaagaatccaggtggaactattgcgccttgtggtggttatgttgctgggaaggagcatttagtcgaagcagctgcagcccgtctatctgcacctggccttggggtggaatttgggtcaacacctggccatgttatgcgtgcgctgtttcaaggcctgtttcttggtccgcaaatggttggagaagcagtaaaaggaggtttgctcattgcggaagtcatgtcagccaagggatacaaagttgaaccacttccgagggttcctcgtcatgatattgtgcaggcagtggagcttggcagcagggaaagactcatagcattctgtgaagtagtgcaacaaacttgtccagtaggatctttcatcaaaccaactgctggggaaacgcctggctatgcttcagaggtcattttcgccgacgggacattcatagatggaagcacaagcgaactgtcatgtgatgggcccttgagagatccatatgccgtcttttgccagggaggaacacattggacgcagtgggcacttgtccttggtaatgttctgaaggtcatataaacgtgcggtgtgataatgttgtcacatttcttgtatgggcatgctcttttcctatcctaactctgtactcgtttactaggaatggtggatactcactccgtctcagtttataaggctttataaggcgtaactactttttattcttgtcccataatataaggcgtgctctctctaggcgtacgtacatcaatgcagtagtatagagaaaattaaatgtatttcttgatttttgaactagaggtggttacaccttatatattgagacgcagcgggtattgtgc

SEQ ID NO: 34066 - DNA, 190 bp, Zea Mays
aatctgctagcaatggaaagacaaccataacgacatgaactaaatcaacaagtgcgcacaactagttagaaacaacatcctttgacaagaagtttctaattaaatcctgactgcgcctaagcagcgttattatgagagtgaaggtggatgtgctgctacttcccacttcccttgatgagcaacaagcacc

SEQ ID NO: 34067 - DNA, 831 bp, Zea Mays
tcacccgtaaccattgggcacgagacctggatactgaaatcatagtggcaacagcaaggacccctgatgctacagcagtatctgctaatgttgtccttgatgagaggcagatgaatgctctttttcttgatctggtcagggtgagcgagtcttacgggctgaaatttcctcgggagtttgctcttctcatgaagcagctgctgtattttgatcgctacacaagactgctggctcccagcatgaacatgctgcgagacgagaggatcaacatctccaccaatcgacaaccaagaagaactgatagatttcagtgaagccacgtcgttagtcaccggccacgtactagaggagtcgtgatgggcgataatagcaagctcatgtgacccaatactgtatatagttttgccagaccagcatagaaatgaaccacacgctagaaattgtacactccgtcgtattctgggattgagcgttatatcgtactagtaggtaacatgtaaaggctgtatcccacgaccaaagtaaatttcagatgaactgcttttgtctcatcttttttctggtactagtagcgtgaatctggttaagatgcaactgcactacacttcagctgccatcagaaaaaagtgatcttgcagcagcttaacgaggtgctgaacaaaactggctagagagatggttgcattctctcgtggtcaccacgaacttgtagagttacgggattccactatatggcggcatttcagctttcattactcgttggagcttacacaacagggttcatagtggatattaacttggaaaatatcccgcagctcaggttcgtgtgcg

SEQ ID NO: 34068 - DNA, 1915 bp, Zea Mays
aagttttcccgtccacgcacacggcatacggcacacaaagcgagtagagacatctcaatgacactgggtcaccgatccctgatctccggggcctcgtcgtcaaccacagcagccggcagcgcgtgcacgcagcgagggtagcgccacacatgccactgacactgggctcaacaaagtgacggatccgcaacccagtgggacgtcacctccctgcacgggcccactctgttccagcttccgtgtgtacacagtacaccacagcacacgggcctactcaccctcgcctccgaggcttcgagtccgagagagcgcttgagaagaagctcaggcgaggcgaggcaagggatgccgtgattgacgacggaaacgaagccgagagggagaagcgaagctagccttgcatacacccggccccgtcccaatgcccaccgcttccggctcggatcccaaaccctaaccctactcggccgtccgcgggcccgccgccggcgacgcgatcgggtgccgacgctgatgcgctctgtgccgcgtgcgtgattctctcgcgcaagtaagcgttggaaaaggggctccctggctgcagcgacgcgtggccgaggtgcggatcggggaggggaggacggtcggagcgagatgccgggggacgtcgcgacctcgccggcgccggcgccgccgtccgtgtcctcgtcgtcgcagaaccaccaccatcacggccccacgaccgcccgcggcctcctctgccacgctgtcgccggcgcctccgctggcgtggtggcggcgaccttcgtgtgcccgctcgatgtcatcaagaccaggttccaggtacacggatggcccaagcttaccacaggcacaattggagattgctcaacgggaaggttttcggggcatgtaccgtggcctctccccaactgttctagcgctcttgcctaactgggcggtctactttactgtgtatgagcagcttaaaagcttactttcttccaatgatggaagtcatcaactttctttaggggcaaatgttgttgctgcatcatgtgctggtgctgcaacaactactgtaacaaatccactttgggttgttaagacaagatttcagactcaaggaataagagccgggccaatgccatataaaggtacacttgctgccttgcgaagaatagcacatgaagaaggcatccgaggactatacagtggtctggtccctgccttggctggtatcagtcatgttgctattcagtttccctgcatacgagaagataaaagcttatctggctgagcgagaagcattgagttttggtgatgttgctgttgcgtcgtctctggctaaagtagctgcatcaacattgacatatcctcatgaggttgttcggtcaaggctgcaagaccagcgagcgcactctgatgctagatacaagggtgtagtagactgcatcagaaaggtttatcataaagagggtgtggctggcttctacagtggatgcgccacaaatctattgcggacgacccctgccgcagtgataacattcactagcttcgagatgatccacaggttccttcttgatctattccctgctgaatctgaaccgcacatccaacctctcaagcattgatcatacaacatttgtaccctatccatgctgccattcgagtttaggaccccagcaaccatccagcaatgttgtttactgtgccagatggctgttgtaaaagagagaattgtttttttcccggatatgcaacagtaattcggaagttcaaacaatagtgttggctgagcattagcaacttgtatgtaatagatttgttagcatgcatttgcgggaggtatattgggtatgttttcttgatgatgatgaaaagaaaacaatcttaccacatatgaaagaatgattgctatatttttttcccacac

SEQ ID NO: 34069 - DNA, 1419 bp, Zea Mays
gtgacatgttgcaaaattctcatctttcttcccgccggattgacgaaatcgatcgctccgctcccaccggccaccaccagtccaccacacctcgatccccgcaccgcccagccggccgcccgcatccaccgcacaaaaccctaggcatggccccaccctaaaccccttgctccccacctcgtatggtcgtcgtccccttctccctccgcattgcgcgaaaccccatccgcctccgccttcttccggtctccgctgctcgcttcacccgtctcgccatgtcgaccacgccgccggcggcggctaccatatccgtcgagtatgccaagtccgggcgctcaatctgcaaggggtgcagcggggtcatcgcctccggggcgctccgcctcggcgcctctgcgcgcgacccccgtggcttcggcgccaccaagtggtaccacgtctcctgcttaccctcctcgtcgtacccgctcggccccatcgggagtatcaaggggttcgactccattaaggaccatgatcgtgcggaattgcgagaactagagaagaatcataaaagagacaatactgcagtcagccctccggaggaacaacgtccaaagaaagcaaggattcagatgttttcccctgcggagggggtgccagataatgtaacagtctctgttgagtatgcgaagtctggtcgctctacctgcaagggctgcagtgagaatattgccaaaggtgccctccgccttggtgcctcttttcctgatccccgtggctacgaaaatactaagtggtaccatgttgtgtgcttccctacatcatcatacccattatttccaatgtcaaatctgaaggggtttgattcaattgaggtatgtgccttttatttcgcaaagcttttgtgatttgttttccttatggatactttgtagatttgagttgcatgcaggatcatgaccgtgacaagttgcacaaattggtggagaatcacaagagcgatggaaaagcggctgatgtattgaatgagtcaaatctgaagagagaaatggctcacagcatggatgactcgaatgaaggtgctgaaaaggatctggaaggaataaagattcactgcatgggggagtttgaagaaggtgctgaaaagaacctggaagaagcaaagttacctgcagggaacaaaatgattggtccatcgatatccttttcactttctgatataaaaaaagaatacaagaatgctacccttcctgctcattggaaggtttttgatacagttatcttccgtgagaaggaagatggccttcatgcttcatctaagattgctgcatttgattttgatgggtgccttgccaataccagtatgaagagatcataacattgagaagaaaagaagggggtaagaacaataaacgagaataagcgacctcaacctat

SEQ ID NO: 34070 - DNA, 5342 bp, Zea Mays
caaatggtactgaaactgatccctcaaattttttaatagctcggaaaaagactctttgtttcgttgcagttgcacgggttggcgccggctcctccgatccagtctggccaccgggcaccggcgatgggctgctcgccggaggggggctctgcggcgtgtccggactgcctgagacgccttgtcctacgtgacctcgccggctccggcctctccttcgtctacggcctctccgactcaccgctccccttcgccgcctccgccgtcgttcagattgcatctgatggagacgagggaagtattgggaggcagcatatctccagttttgttttagtgggcttatgtggtggcaaagtgccttttaatagccaacaatgtgacaacagttccttggagaattgcattcataaagatccccaggcagagcaaaccttatacaatggtgataatgaatatactgagcagtcagattcctcatcttgtatagaatgcattgaaggttgcaaaagttcctctggtccttgtaagcaaccattggccataagcacgattaccaaattagctcctgcttgctatcttagcataggccacacttcagaggttagagagcttattacaggttatctgacctcatcaagtgaagagtatgtgattaattcgttaaatctgctatttgaaaacaaaattagtggatctgctggtttagatttcctcagcttcgttggattttcagcatttgatgacttgcattcttctggctgtgtgaggcatcccaacatcttaccagtgttaggtatactagaaacatccgattgttgctacatgttacaaccaaaggccccatacaccttggaaaacattatgcactacagtccagaggcattctgctcagattggcatattagatttcttgtctaccagataatatctgctgtggcataccttcatgatttaggagttcatcatggcaacctaaggccatcaaagatcttgatgtcagattccttatggccttacctgagcataagtgatacctgccctgtaaagcacagttggggtgttgccaatcataaatgttcacctaattcatgttgttttatggaggactgttcctcaaaagccatttatagtggtttcaaactgcaatcgtcgttagattggcattctcactttaagcaatggtggaaaggtgaactgagcaattatgagtaccttcttgtcttaaacaagttagctggtagaagatggggcgatccaggttttcacactgtgatgccttgggtaatagattttacagggatacctgatgaaagttctgataatggttggagggacctgaccaaaagtaaatggcggttggcaaaaggtgatgagcagttggattttacgtattcatcatctgaagttccacatcatgtttctgatgagtgtctctcagagctagctgtctgcagttacaaagcaaggaggttacctaagaccatcttgagatcagctgtgcgttccgtctatgagccgaatgaatacccgtctagtatgcaaaggctttatcaatggactccagatgaatgcattcctgaattttatagtgatcctcagattttcacctctcttcattctgaaatgagtgatttggcattaccttcctgggcaacatctgcagcagatttcatttatcttcacagggatgcattggagagcgaccgagtctcacaacaactgcatcactggattgacataacatttggctataaactttctggagaggcatctgttgaagcaaaaaatgtcatgttgccctctaatgatccatctaggccaaaatcgattggccggcatcagctttttacaaggcctcatcctaagcgccttgttagcacacctcatgcagtctaccacaataatttggactcttgtgctagatgctgtggcaaacgaagcggtgcaacaactgatgcagtgttaaatggctgtggatctccaaatatggtttcagaaattggccgtctggaggaatttgagaaagcaactctgtttgcagagcttgaataccagttgaatccagtctatgattatgctgatggtgatccttcaacttgtttctcttcaaacaaatatcccaagaaacaaaatgcagatcagatattgcagcatgacaatgcattgccagcagcacctaactttgatcttggttcctttctagaatgctttgagtctgatgataattctcatatgggttatcaagaactgctgctctggaataaaaagtctaattcacaaaacgaatgccatgcaaatgatgtattttctattgggtgcattctggcagaaatctatgtgcaaaaaccactttttgacaatgccttgctatctgcatacaaagaaattgggataatgcccggagcacttcaaggcctgccttctcatgtcacacttcttgttgagtcatgcatacagagggaatggaaaaggaggccatcagcaaagcaccttttggagtcatcatactttcctccatcagttcgatctgcatatatgtttcttgctccacttcaagttttgtctacatctagagagcgaatcaagtatgctgctaagcttgcaagtgaaggggcactcaaagctatgggagaatttgctgctgaaatgtgtgcaccttattgcctgtctcttctttcatcatctttgtcagatgttgataccgaatcagccttgtctctgcttaaagaatttctagggagtttgactatccaagcaactaaggaccttgttctgcacatcattcagaaaatcttacaggcaccagaatattcacatctgaaggttgccttccttcaagactcttttattcgggatttgtggaagaaattggggaaaaaaacttatattgaaaagatacatcctttggtgatctcaaacttatacagttcacctaacaagatcatcgcctctgctgcatctactgttctgatcgtctcaaggggacttcttggagaaaattttgttgtaaagcaaattcttccgttgcttttgaatgtcatattctcttgtatcgattcgtctaagatgagtaagcccgagccacagcatagttggaattctttcgcgctgattgatagcttatctgccttggaaggtcttgtgttggttcttcctgtcaaaactgttattaaggagcttcttcaggaccaagcctgtctttatgtaaaagttcttatgcagattcctttggatcttcgtgtgattcaagtggctgctacagcactcattgacctttgtcaacgaattggaccagaaaacacttctatatatgttttgccacaactcaaggagctttttgctgaactggccttttctcatgattcatctggtcttaaccatcctataaaaggatttaaaagttctgatgaaaataaaaacaagccaattaaagtggaatccagaattgaccttttgttgctgctatatcctttcttggcatcacttgttgggatagagaagctccgagagtcttgctcaacatggtttcttttggagcaagcacttcaaaggttgtacaattggaagtgggagccttctggtgattgttctaagaatgctgaaaatatgaaaggtcaaaggctccagcctggtaactatatgtcatcagagtttgttccaaccaaactgcttttcaatggggtaggttggtccatgccacaatcagaaaccactaaaaaaaatggtcggaacactgcagcttctaaccttgagaatgagacatctagtgacaatttgtctacttcaagttctggtaatcaaccatggttttggttccccacccctgatagtagttggggtgttccagaatttcttggtcgtggtggtggtttgagggatgaacttccctggaagattaaagcttctatcctttactcagcccgtgctcaccctggtgctctgcgttcattagcagtccatgatgatgagtgcacagtttttactggaggagttggtcctggttttaaaggaagtatccagaggtgggaattgccaaacatgaattgcacatctggttattatgggcatgaagaggttgtcaattccatctgtatcctgtcaattactggcagagtggcttcttgtgatggcactatccatatatggaatgggcagtctggaaagctcattgcagctcatgctgagtcgtctacaacttttccactccaaaccccatctattgagcaggcaaacatgcttaatcaggacgcactctcaggtggaatattgtcaaatgcatttcgtggtagtttgtatacgactatgcattatatggaatctgagggtatacttgttgctggtatgggaaatggttcaatcagatttattgacatatctcaagatcagaagctacatttatggaagagcgatacggctgaaatatctttctcatcacttgtgtcggctatttgctcgtgtggctcaaacaagctcaggaaaggaagcctaatggcttcatcctggatagcagcaggtttaagttctggatattgtcgattgcttgataagcgcagtgggaacatcattgcagtttggcgagcacatgatggacacattacaaagctggcagcaccagatgatcacttaattttgtcgagttcccttgacaagactcttcgagtgtgggacctcagaaggaatctggcaacacagtcaaacattttcagaagtcattcagacggcatttccaacttctctgtgtggggtcaggacgtggtatcaatttcaaggaacaaaattgcactaacttccctgtcgagaccagaaagtgaaattggacatcagcagcttgcacttcagaacttgtattcggctgacagaggggtgaaacataaaaacctatctgtcctttcaactattgctgtgcttcctttgtcaaggttgtttgtggttggaactgaagatggatttctcaaaatgtgccactaggtgcttcttccggtactggtgaccatctctcattgtgaagttttggtggtttgtctccttcgatgtgctgagttgatttttgtgtggagccttgttttgcggtgtgggtgtgtgcggggggggggggggggggggggggggggatgtacattaacacgtacgggaaatacattgtgtgcacttaatgtgtatgaaagcttcaaattttgcttggtcttactctcttgaaacagcacatcgttaggccttgttcggttacagtggattgagcaccctaaatgatttctagctggattgtttgtctaattcatataatatttgatgggctggaacaattcctagtgaaatcagacataaacgaacatgccctaaagtgg

SEQ ID NO: 34071 - DNA, 1494 bp, Zea Mays
caccattgttagtcttgtcttaattttaaaaaaaatatatgttcctttattttcatacaaccattgtttagtttccctgtgctttgaggtggttttttatttttttggggggtttggttttgggttttttagctcagctttttagtttctgctaccatattggcgtcttgtacttggttttttagacctttctattcttcttaatataatgatatgtagttctcatgcgtattcaagaatttttttcatataacctttttaactaataaatgaattatatgtggctagtgcaatccattaacatggctttggttcttgtcttagttctgtgtctgcacttcttgaaacaataaacaattagtgcacacaactatgatgctcgcgaattaatttcgataaaataatgcactgcaatgtctttttcattctattctcaaaatatttctggtcgcaatgactggttactctttttcagttttgcaaagaagctggagaagatggagcacacaattgtgagagccaagtctagtgaagtaggatgctccaatgttgaacggaaacttaggcagctacttgatataactgaaaatgaagcttatttccatacaaggcagagtgcatttctatatcatcttggagtgcagactatgccgaaaactcaccattgcttgaacatgagattgacagtagaatattttaagtctggatcaagtcatgtggatcagttaaatgaccagaagcttgaaagtcctgccttacatcactatgtaatattttccaggaatgtacttgcagcttccaccactatcaattcaacggttatgaactcccaggtctctctctctcggacacttatattaaatagaaacgaaacgctccggatgtcgcttgccgcgcgcgcggcgtgcagttgtgatctctgccaggagtagagtgtgggatggggatgcataacgagcagtgctgcagcaggcagggattgtaagttgtaaccttgagcagcttgtggttcatggtgcccccgttctccagatgccggctgccacgcgccccgaggccggcgagctcctggtgctcgacctctccttcaacgccttcgaaggcgccgtccctagcgcgctcgccaacctcaaccgcctaatcctagacgattaggattgggggttaacagtaaataaaggcaatgcagaatcaaaaggctaccaagtgtggaaaaggattctggctctcatcaagtgactcctccccctcacgatgactttgcggacatatgtctcaattctagtggtggagctacgaacaacaatccgatgtcctgatcgagagcgatgaagctaatgtttgaacttgtgaactaaaaatatgaactatggatgtgaacttatgtgaatttgtgaacttgtatttggacttatgtgaatttgtgaacttatgtatttggacttgttgtgtgaatttgtgatatgaacatatatccatgtgtttgaaatctgt

SEQ ID NO: 34072 - DNA, 3668 bp, Zea Mays
tgatttggtccttgcgtttttaatatatctaaacctgggggaataattgctcttttggatgagacatgcatgttgcgaaattcaacgcatgagacatttgctgagaagttatatcaaaagtttaaagacaaccctcacttcagtaaacccaaattttcacggtctggcttcactgttcatcactatgctggcaatgtcacttatcaaacagacctgtttttagataaaaacatagattatgctgtaaatgaacatcaagttttgttaaatgcctcaaaatgttcatttgtgtcaagtctttttccaccgtgtgaagaatcaacaaaatccacaaaatttacttcaatcggctcaagtttcaagcaacaattgcagagtctgctagaaactctgagtgcaacagaaccacactatatccggtgcataaaaccaaataatgttctcaagccagcaatatttgagaacagtaatgttctccagcagcttcgttgtgggggagttttggaggcaataaggataagctgtctgggataccctactaggaggacattttatgaatttgttaatcgatttggtattctacaacccaaagtccttggtcgaagccatgatgaagttactgctgcaaaaatgcttcttgacaaagccaatcttgcaggctatcagattggaaagacgaaagtatttcttcgtgctggtcaaatggcagagttagatgctctaaggacagaagttttgggactttctgctaaaaaaatacaaagcaaacttcggtcatttctggctcgcaaaaaatatatcgagctgcaacaatgtgctacacaaatccaggcaatatgcaggggaacaactgcaagaaggcgttatgaaaaccttcgtagggatgtagcttcattgaaaatgcagacctgctaccgtatgcactatgcaaggaaaaactatgtagaaatctgttctgcgtcaactaatatccagtctggtttacgtggtatgggtgctcgcatcaaactccgcttgaagcggcaaacaaaagctgcagtgattattcagagtcgatgccgctgttatttagtacgttcacgatatgttaggctggtgaaggccacaattacggctcagtgcggttggagaagaagagtggccagaaaggaacttcgaaacctcaaaatggctgcaaaagagactggtgctctacaggctgccaaaagcaaactggagaaggaagttgaggagcttacatggcggctacagctggagaaacgtattagggctgatttggaagaagctaagtcacaagaaaataagaagctccaattacaattgcaggaattgcaattgcaactcaaagacacaaaggacctattgaaaagggaacatgaagctgccaaagaagcatcagagaaggctgctgcagtaccagagattcttgctgatacagctcaagtcaatgagcttactgctgaaaatgagaagctcaagtcattggtggcctcttttgaggaaaaacttcagaatgcagaacagaagttcgaagaaacagagaaagctagggaagaattagtcaagaaagcaacagatgcagagtcaaagataaatgaactgaagaacacaatgcaaagccttcaagaaaagttgactagcacggaggcagaaaaccatgttctcaggcagcaatctatgaaagcaagacctgataatatgcctttgcttaacatgcatcggaaatcaaatttggctaatggaagcctacattctgacgaacagacgcctcacggcactcctatggagtttggaaggagatccatcattgagagacataatgagagtgttgatgcattgataaattgtgttgttgaaaatgttggattcagtgaagggaagccggttgctgcaataaccatatacaaatgccttcttcattggagaatttttgagacggacaaaacaaatgtttttgatcgattgattcagatttttggttctgcaatgcagaaacaagataacaatgctgatcttgcatactggttatcaaattcatcatctctactgattatactacaaaagagcctcaaacctcctggttcatctgtaacaactccaatgaaaagaccacagactcagacatcattccttggaaggatgggatttcgtgcttcaagtattactgttgatatggatcttgtccgccaagttgaggccaagtatcctgctctcctttttaagcagcaacttacagcttttgtggaaggcttatatggaatgatccgagacaatgtgaagaaagaaatatcttcagtaatttcactagtcattcaggcaccaagaaatgcaaaagctggtttgatcacagatcaaggtagctattggcagacaatagtcaaacatttgaatgacctcttagaaattttgcaagaaaattgtgtaccgacagtttttgctcggaagatctttacacagattttctcattcatcaatgctcaactcttaaatagtcttctcgtgcgtcgggagtgctgttcctttagcaatggggaatatgtgaaacaagggttggacgaacttgagacttggtgcacagtggccaagccagagtacgcaggatcagcatgggatgaacttaagcacatatgccaggctgttggtttcctggtcattttcaaaaagttcaggatctcgtatgatgaaatcatcagtgatttgtgcccagtattgagtgtccagcaaatttacaaaatctgcactcagtactgggatgataaatataataccgagagtgtatctgaagaggtccttgatgagatgaaaaaagtggtgaacgagggatctggccaaggcacttcatcagacaatacatttttgctaaatgaggagataagcttgcctctatctctggaggagattgccaactctatggatgccaaggaatttcagaatgtgagtccaccgcaggaactccttgacaacgctgcattccagttcttgagaagctgaggatgagaaagacagggaggcaggcatagatagaagatacagatagatagaaatgcccggtgtcccccttagctaggtgctgtaaattcagatagttcggtcggtccatgtagccttttgaaatgaaattcttggccattctcgcttcacgtatgggccttgtaaatttagatagtgtgcgctgagcggaggagccagttcaccgacgtcgccaagccgtcgcggatccacccgtcgttgaccccatggacgctaaccccacgcccccatgggggaggaggaggaggccacatcgtacaagcagcagccggagaagatgtgtggcggccagaggaagaaggctgagtcagtgatcgcaacggagaagttatgtggagttctggcgttgtgtggcattgggctggggaattaaggagctcaacctgttggttagcgggttaggataggggatgtccatgtcaggtaaccgtttgaaaatttcctccttttcttctggtttatgctggtggtttgatttcgttggacctacatataggtggtgattttaattagttgatgttgttggatacatgtttactgtacttttgaagctttatcagtgggatttgcattgatgccctggtaaattgcagctgctcttaacgggaatgctgagagattttcgattgacaattccc

SEQ ID NO: 34073 - DNA, 6227 bp, Zea Mays
catgcttcatttgttgagcttctgcggcaagttgctggtttgcgccgccgtttgttttcattatttgcacatccagctgaaagtgtgcgagagactatttctgttataatgcgtacaattgctgaggaagatgcaatagcagcagagtccatgcgtgacgctgccttgaaggatggtgctcttctgaggcatttactaaatgctttcttctttcctgctggagaacggcgtgatgttagtcggcaacttgttgctctttgggctgattcctatcaacctgcacttgatttgctatcaagaatacttcctcctggacttgttgcttatctgcatacacgttcagatgaagattcacggagccagtatgatgaagcaccgttgagcagaaggcagagacgaatacttcagcagaggagggttcatggtactaaaactatggcagtacaagaacaagggataccccccaatggtgttgaggatggggaacccttcaggcacatcagtgccggcacttacggaggagcagatgttcatcagaggcatgttggcctgtactcttccacccactctccttcgccaggtataaacattgatccttctcacactgtttcagttccacatggttctgtacctgaggccctttctgaaaataatcaacaaatcgaggcaccacagctggattcacatgtttattcagtggactccaatgccaatggcaatcttgtgagctcattgcattcagatttttcagtccctgcacaggttgtggtggaaaacactcctgtgggatctggcaggctcctgtgcaattggtatggattttggagggcattcagtctagatcacaacagagcagatttgatatggaatgaacgcactagaggggaattgagggcagcattgcaagctgaagttcataacttggatgtcgagaaagaaagaacagatgacattgtccttggaagttcagtcactgaggatgctgctggtagtgacaacttacctcgaatttcatggaattatgctgaattttcagtgagttacccaagcttgttcaaagaagtctgtgtggggcaatactatttgcggctcctgcttgaaagcggaagcaactatcgagcacaggattttccattacgtgatcctgttgccttttttagagctctgtaccatcgatttttgtgtgacgcagatattggtcttactgtggatggtgcagtacctgatgagttgggatcatctgatgattggtgtgacatggggagattagatggctttggtggtggtggaggatcttctgtgagagaactttgttctagggcaatggctatagtttatgagcaacattataaagttattgggccttttgatggcactgcacatattactgtcctcttagaccgaacagatgatagggtgttgaggcatcgtttgctactacttttaaaggccttgatgaatgacctttcaaatgttgaagcatgtgttttggttggaggctgtgttttggctgttgatttgcttactgttgcacatgaaacatccgaacggacagctattcctttgcaatctaacctcatcgcggcaactgcatttatggaaccttcaaaagagtggatgtacattgataaagatggcacacaagttgggccacttgaaaaggatgcaataagaaggctgtggtcaaagaagtcaattgattggacaataaaatgttgggcttctggtatgtctgactggaaaaggttacgggatatacgggaactgcgatgggcactttctgtaagagtacctgttttgactcctacccagattggggacactgcattatctatattacacagtatggcatctgcacgctctgatcttgatgatgcaggtgaaatagtaactccaactcctagggtgaaacatatattgtcaagtccaagatgccttcctcatgtggcccaggctatgcttactggggaacccagcatcgttgaagcagctgcctcattgcttaaggctattgttacaagaaatcctaaagctatgattcgattatatagtactggtgccttttactttgcattggcgtatcctggttcaaatctcctatcaattgcacagttgttttcggccacacatactcatcaagcttttcatggtggtgaagaggcagcactatcttcatctttgcctttggcaaagcgtagtgtactgggtggactactcccagaatctttgctgtatgtcttggagcgcagtggcccttctgcttttgcgggtgcaatggtgtctgattctgacacaccagaaattatatggacccacaagatgcgagcagaaaaccttattcgtcaggtcctgcagcatctcggtgactttcctcagaaattagcacagcattgccattcgttgtatgattatgctcctatgccacccgtgacttatccgaatctgaaagatgagatgtggtgccatcgttactacctccgtaacctatgtgatgaaattaggtttcctaactggcccattgtagaacacgtggagtttttgcagtcattgttggtaatgtggcgtgaagagttaactcgtcgtccaatggatttatctgaagaagaagcctgtaagatactggagatttcacttgatgatctcgtgcttgttgagaacggtagcagcaagcggccatctgacttaagttcggctaattccggaaacaaaactgaaaacattgatgaagagaagcttaagcgccaataccgaaagctagcaataaaatatcatccagacaagaaccctgaaggaagggagaagtttgttgctgtgcaaaaggcctatgagcgattgcaggctagtatgcagggattgcagggaccacaagtctggaggctgctactcttgctgaaggcacaatgcatcttgtacaagagatatggggatgtcttggaaccattcaaatatgctggttatcctatgttgctaaatgcagttactgtagataaggatgacagcaattttctttcatctgatagggcccctcttcttatagctgcttcagagctgatttggctgacatgtgcatcatcttcattaaatggagaagaacttataagggatggtggtatccccttgttggcaacacttctttctcgctgtatgtgcattgttcagcccacaacaccggcaaatgaaccagctgcaagaatagtcaccaacataatgcatactttctctgtcctcagtcagtttgagtcaggaagagttgaggttcttaagtttggtggccttgttgaggacattgtgcattgtacagaacttgaatttgttccttcagctgtggatgctgcactgctgacagctgcaaatgtttcggtgtcatctgagttgcaaaatgctttgctcagggctggatttttatggtatgtgctacccctgctgcttcagtatgattcgacagcagaagagaatgagatatgtgaggcacatggtgttggggcaagggtgcagattgctaaaaatctgcatgctgttcatgcaactcaggctttgtctaagctttctggtctcagcagcgatgatatactgtacccagataacaaacctgcatacaatgcgctaaaggctcttcttactccaaagcttgctgacatgctgagaaaccacccacctaaagagttattatcaaatctgaattcaaatttggaatcaccagagatcatatggaattcgtccaccagaggggagcttctcaaatttgtagaccagcagcgtgctagtcaaggccctgatggttcatatgatttgacagaatcacagtctttcacctatgaagctttatccaaagaattgatcgttggtaatgtatacttgagagtttacaacaatcaaccggattttgaaataagtgaccaggaggaattttgcattgccctgctcaagtttatagcagagttagtacaacagtggaattccgttaacttggaggagacgattcatcaacatggttcagttattgaagcatctatttctgaaaatgatcaagtcagtgattcaactattgaaggaaaaatggacaattcatcaggaaaacaaagtacagatggagattctgaagttattataaacctccaatgtgggctaacatcacttcagatactccactgcaatcctccttgcagggatggagctcttgctgtactatattctttagccagcacaccagagcttgcctgggctgctgccaagcatggtggtgttgtttacattcttgaacttatgttgccacttcaagaggaaatctctatgcagcaaagagctgctgctgcatctttattgggcaaacttgttggacaaccaatgcatggccccagggtggcaatcacccttgccaggttcctgcctgatggtttggtttctgccattaaagatggacctggtgaagctgttgtttcttctcttgaacagacaacggaaactcctgaactagtatggacacccgcaatggcagcttctctttctgcacagttagcaacaatggcatcagacctctaccaagagcagatgaaaggacgtgttgttgattgggatgtacctgaacaagcatctgggcaacatgtaatgaaggacgaaccacaggttggtggaatttatgttagactttttcttaaggaccccaaatttccactgagaaaccctaaaagattccttgaagggctcctagatcaatatgtctcctctgttgctgctacgcattatgaagcaattgctacagacccagagcttcctttactactgtctgcggcattggtttccttactacgagttcatccagcacttgctgaccatgttggctacctcggttatgttccaaagcttgttgcggctatggcttatgagggaagaagggagactatggcatctgggcaggctaccagtgcatcgaaggcagaacctagcgaacatgacaactcagctcactccgaggccactgtacagactccacaagaacgtgttcgccttagttgtttgcgtgttctgcatcagcttgcgtctagtacaacttgtgcagaagctatggcagcaacaagtgcaggaactcctcaggttgtaccactgcttatgaaagcaattggatggcaaggtggaagtatactggcattggagacattaaagcgtgtagttggtgctggtaatcgggctcgtgatgctcttgttgcacaggggcttaaggttggtcttgttgaagtactccttggtattcttgattggcgtgttggtggaagacaggggctctgtaatcaaatgaagtggaatgaatcagaggcttcaattggacgtgttttggctgtggaggtgcttcatgcttttgcaaccgaaggtgcacattgtgctagagttcgtgaagtcctgaattcctctgatgtatggagtgcttacaaagaccagaagcacgaccttttccttccatccaatgcacaatcttctgctgctggaattgctgggctcattgagagctcatcatcaagactcacttacgccctcaccgcaccgccaccacaaccttcattggtccgtctgccatcttcttctccctctccaccatcagctcctgcaaaccctagtggacggcattcttatcagcgtttgtagtgcaaaacggaacatgttaatctcaacccggagtgtgaaccatgaaggcaccatggtaacggtttctagagtgaggccaccttgagtgggcttgttactgccaccaaatacagattgtgcggttgtgcctccattccccaccaatgagcagctgtcagtggctgcatttcagtacatagcattgtacagttttccattacaacggggtcagggtcggggtcggttttgcgtttgttcatgtaaagcatatgatcttttttgtaacataatagatgtcaatagaataatggagctggaaattgtagtatcgattcattgctgggtcctgggtggatgcactcccttgttaggataacacgactttcttggacaagagaaatggatgttttttgttttgtttgatcagcgtcctgtagcgtcagggtatatttggttccctgtctaactcgacttttttgttagtcacaaactaaacaatgacacagttagtcacaaaccaaataactccttaaccttttatagtcatacgtcgcaaacttctggcaatggtgtgctattttatttgtaataaaataacaaagcaaaattca

SEQ ID NO: 34074 - DNA, 1589 bp, Zea Mays
cataaagggggtttcgttttcagaagtgtcgggaaacttctttccccactcctgtagcgccgccgccgcgtgcccgtgaacctcccgccttcgttctcccctcccgcttgccccggtagtgattttcttccttggttcacggcggatcccatgccgatcgacgggatggtgtccgtggtcgcgaccgtgagtgggtaccacggcgacgagcggcacaggctcgtgaacctcatcgcggagaccggcgccagctacgtaggatccatgagccggtccatcacccacctggtgtgctggaggctcgaggggaaaaagtacgacatcgcgaggaggctggggacgctcgtcgtgagccattggtggtttacggagtgccttagggaggggaggcgcctcccagtggactcttacttgatggtaagtggtgaagaagcagggccagtcccagagttgcctactcgttcccgtacacaaggcaaaaaaagtgccatcatggaggaccgagttttccaagagttacctgatgatttctgggacactcctctagccagaaccagctataaaaattctgttggtgatggagattctaagaaaaatcgttcatcagatgttaagaaaagaaagcgtatgaagcatgtcaatacatcaacggacagaaatgtcttaaactcgcaggacaatgtgtcaagtgtcatgacattttcttcatttgtcaagtcatacaacgtccaagagcacatcaaagcagaaggaaaacttgtcacacttgcttcacaatgaagttcctatcaggatgggagaaaggaatgatcttactgaaaactttgaaaatgatagtttgtctgacagcttcagtgaacctcaaatttcagatactctgtgtgtagaagctcaaagaaaatttaccaaaacaagtgcaccatcatcatcacttcgacaaagtaccatggattctttatatgaatttggtgaaactagtaggcatgaaccagcaggaaaaaaagaacaagacaatgttgaattaaggaagacttcaagaagcttccttccatttgatatgtcaggacaggaaccacctttctgtactcaggagcaagtagataaatgtagctttggcactctagctgatgatgaaatgggatatgataacaaacccatggaaaagtcatctaatttagaaaggcaaacagaattatcatgcgtcatatgctggacagatttttcttctacaaggggcatcttaccatgtggacatcgattctgttattcatgcattcaaggatggtcggattgtctggcttctaggggtaaagtctcaacatgtcccctttgcaaagccagtttcacatggatcagtaaggtggacgaggcaggcaccttagatcagaaagtatactcgcagaccattccttgtgaagcttctaccgatgtttttgtgctgggcagtgaaggctacgatttctctggaccaacgtctgggcaaggagcatgctaccagtgccacttccgtgagcctgaggagcttcttctaagctgccacgtctgcagatcactgtgggtgttggagattttgcttgttggcatttttt

SEQ ID NO: 34075 - DNA, 1933 bp, Zea Mays
ggcggtaggctgcgggctgtgcaatcgaaagttctgatagataaaaatgacacataccgaacgataaaccctaatgcaacatcttatcttatgtcttcgtttgaccggctcgccttattcatgggctccgcaagatttcagtggtgagctggtttcctagcagtggccagacactatgcctgggccgtcttgcgaaacgaaaccaacacttggttctgggcccaaagcctaaggccctaatccagttcttgttccttccaatttttccagcgccgggcgggcgggaagacgaaaacccaacgtcgccgcctgcgaaaggggaaaacccatccgatttcgattcgatttgccggcggtgcccgcggcggagaggatggcgagctccttctccttcccgctgatgaatccggcggacattgcggaggcgctgcacagctactgcatcgcgcccagccccggcctccgcgccgagcacatcgtcaccccgcagcccggcctcgtcgccgagcgacgacgagcccgacgagcagctagagtttcaggcgctgcaggcgatcgacaacccggagcaccacatgcgcgccatagcgctctcgcgcctctaccggagggccaacgccttcctccactccatcctcttccgggacctcacgctccgcgaccttctccgcgccgacggccgccgtgtcgtctacatcctcagcgccataatcaacttcctccactacaggcaagataagctcagctttcttgagcccatcgtccaagagtacagcccccttcaggaacggcacacggagctcagggctaagatcgccgagcttcggaacgcaaaagaagaccatctacttaaggagcagatggaggcgcccgtggtccagcaactcgagaaggaggtcaatgccctcaaacagaggcttcgtgaatacaacaaagagcagctgtcgctgcgcgttgcaacaaaagccatagacgaaaagaaacaggagttactcggcaagatgaaccaagctgatttcgagttggtgaaagttatgcaagaaaaggaaaggctatcagccaaaattgttcattcccctgaaaagctcctgaggacccttgaggagaagaaagcagtccgtgatgagctaaggaactcagagaaggtggcaatgcaaaaagttcaagagaaaaccaatactcttgagacgtatactaaggtttctgagaaattagtgaagcatctctctaaaatttctgctgtacatgaaaaaggcactgttgctaaagcttctgagaaggatgttaaagcacacaaagagaagattggtgatcaaaatttggagataaaggcacttcgcaataaagctgctgagtggcaattgaaagtactcgagaacgagggcattctgaacgcaaaggagaaagaaagggatcaaagagttgcagagaacaatctgaagatgaacgcgttgaaatctgaagtcgaatcggagcacaagtgccttgaggagaaagaaataaaaataaaggaaaagcttgaaaaggttgctgaattatgctctcaagctgattcggttgctgaagctggaaataagaaaatacaggaaatctgtgggaagtataatcaagtttgcgaggctgcaaacatgtacatggatggcatcgatcgttcctttgaagagatcgatgaagctgcagtgagtttgaaagctataggccagagtggtgcttgatgcgtgaagtgaccatcgacgggcaatggatcgtggacagcatagtaaattgtgctagtgttaagctctgtatatatacctccaccgcgtctgtatatgccttcttcccactattttaatttaattagcactaattgccagtgaaaatggatatgtctaccgatcttgattaattctatttcaattcaaagcaacctacgccctgtccaggcccacgg

SEQ ID NO: 34076 - DNA, 2943 bp, Zea Mays
tcgccggtccttgatctccatggctctagcgtttagccgcagcagcggccagcacgtgcacgccggcgaggatagcgcggtcccggcggttaccaccacacaggtcactgacactagctctcaatgaaattgcggacccgcaacacagtgggaggttacctcccagctcgggcccactccagtccagcggtccagccccgtgggtacaccatacacggtcccctcgcctccctccgagaaggaagaagctcaggcgaagcgaggcagagggatgtcgtgacgacgaaaccgaagccgagaacggaagcgagccttacatatacccggccccgtcccagtgccctcggcttccgccccagataccaaaccctaaccttagtcggccgttccgcaggcccgccggcggcgacgccttgtgtgccgcgtccgtgattctcttgcacagggaagcgtttggaaggggactccctgcctagtgcactggccgcagcgacgcgcggccgaggcgcggatcggggaggggaggacggctgtggcgagatggcgggtgacgtcgcgacctcgccagccccggcgccgctgtccgtgtcctcatcgtcgcagaaccaccaccaccacggccccacgaccgcccgcggtctcctctgccacgccggcgccggtgcctccgctggtgtggtggcggcgacgttcgtgtgcccactcgatgtcatcaagaccaggttccaggtccacggctggcccaagcttgccacaggtacaattggaggtgatgactccctccaacaattccttgtgaattttgcttcaatttgttgctttttgagttagaaacacgcacaaacctgtttggaacagcgagcttatcctggtgttattgagttgtgctgaggatgtaggaggggtgtatatgctgggaagtatggaatgtttgcatgggaagaggtggcgcattgtagtcaacctatgtgatttttgtgcttggttttgtctgtgatgtcatgtggacaatttgaaattcagagaggttagagaaaacctgcttagtatggggagacttcttaagttttcgcttgtggtgtctcttggtgacctggaccatccaagattcggggaattgtgagagaatctttttagtaactgaggatccacatttaggttttgtaacagttcaaatatttttcttggacggatgtcttatccttaaggtttactattgttgggttgtgtagttgtctaacggtcatttgtatccccctgcatgatttgaagtatcagtgctttcatgggaatgggacaaggggaggtatcacgagtgttgtgttgtcgttgtgaatttacaatgtcatgcaggttcgagagtggaaaaaacatgcaaactctcactagcagggtttgtacttattcgtctatgcacgtgaaaaagtcagagattagacatatattcgaagttccaaacaatgcacacaagattaagtgtctgtgggcatgatgtctattgtcattttccattatgaatgtcttttttgacatatatggagttagttctttggttatacgtgtaaaatagagtatacctaatatttcttaatctggtttttttgagatttgtattgagttttgcttgtattatgttatgtagaaccaatgcacaacatgcataccatgaatacaaaaaagtttaaaactgtcagaatgtcctcacgctggcagatcatcgcatacatgatacatatgccccatgtgttgcttgttagttatcaataccaaattcgtcgaagtttcaaacaatgcacacaaaactgtagtgtaattattgggagcttgcagcagattgctcaacaagaaggtttccggggaatgtatcgcggcctatccccaactattctggcactcttgcctaactgggcggtttactttactgtgtatgagcagcttaaaagttttctttcttccaacgatggaagccatcaactttctttaggggcaaatgttgttgctgcatcatgtgctggagctgcaacaactattgtaacaaatccactttgggttgtgaagacaagatttcagacccaaggaattagagccgggccaatcccgtataaaggtacacttgctgccttgagaagaatagcacatgaagaaggcatccgagggctatacagtggcctggtccctgccttggctggtatcagtcacgttgctattcagttccctgtgtacgagaagataaaagcttatctggctgagcgagataatactactgtagaagcattgagttttggtgatgtcgctgttgcttcgtctctggctaaagtagctgcgtcaacattgacatatcctcatgaggttgttcgatcaaggctgcaagaccagcgagcaaactctgatgccagatacaaaggtgtaatagactgcgtcagaaaggtttatcataaagagggtgtggctggcttctaccgtggatgtgccacaaatctgttgcggacgacccctgctgcagtgataactttcactagcttcgagatgatccataggtcccttcttgatctattccctgctgaacctgaacctcacatccaacctctaaagcattgaccatacaacatctgtaccctatccatgcggcagattaggaccccagtaaccatccagcaacagcaatgttgtttactgtgccagatggctcttgtaaaagagaattgtttttttcccagataatagctgccattcaaaagttgaaacaatagtgtaggcagagcattagcatctgtgtacgtaatagatttgttagcatgcatttggggtggaggtatatgagcgatgttgggtattttttttatgatgatgacgaaaagaaaaatgttacgacatatgaaggaatgattactatattctttttcacacctggtgtgctgtgatcgtgattcgtgaatccgtgat

SEQ ID NO: 34077 - DNA, 1343 bp, Zea Mays
cgttgttaattttttggcagaagcagatcggatgcttatgtaaaatcccagttagatcttggttgactaatatagaatatgtgcgcaaagaaaggttgtgcagttacatcaccaatctaggcaccgtctcctctacgtcaattggatattacccaggctttcaaggtagaaaagaagctttttgttccatcatggccttatcaactccagcgtctattttggttgacgagaaccaacagataaatagaggtaagagggccgatggaccaagggccaaagggctgaagccatccgagaatcctggcaatcaagggaggagagctcttaaggatttgtccaacttctctaaaggcactggtttgaaggacacttccaccctgaaagagaagtcccagcagaagcctcgtagtaatgtggccaacactattaaaggcaatgctttgaaggacaagcccatcctgaaagagaagtccacccaggaacagaggtcaaaagctcttaagaacccaatgaaaattttagttgatgaagagatcaaaatgtgccatgagtgggctaaggatggggtggagggatttcactcaacacaaaataattctcaaaagttggataaggatctgctagacaaacgtgtcaagaagaaagtggcggcagtaaactcagccttgtgtggttggccagatacagtatttgattctctaatgtatccatctatggaggttgctgagcttttttatgaacaaaacgtgctggaggtggaacctgagattctcccggacatcagttggcgtctctctagttcagtagatggtaaagcaaagattgatgaagaccgtcttaccgatgctgagcttgaccagtaccattctttggagaacaatccaattatttttgagctgagagacgagccagcgatcccgcagctgggagtgtattgaagaatctgtgccagcaggacagaaagctctgtttgcttgctgcttgctctggagtctggagttgtctagtctagaattctagtaggtcttgaacctggtgttttccccagctatgttctagtgggatgttggtgatgtaggatttcagtttgagtactggtaccagttccagctgaagcgacagccttatggctgctgatgggtgatggttgtggaacaacgggcgatataattctaatattttcagcaaactagtctgtggtctctatatttattctcgtgaatcctaaacagtgctaagttttttttggccctaatctatggtctctataaaatcgatattatttttactattttaatcacttttagcttttactatttagatcttctcctaagtcactaaac

SEQ ID NO: 34078 - DNA, 4857 bp, Zea Mays
gcgtcgcgagataaaaaaagatcgggagcagaagagaagagagcaggagcagccgggcctaaacagaacagaacagaaaggaaaggagagacgcgtgtcctcccagccactgccaccctcccccacctctgcctctctcgaccccacccgacccggcgcggaaccggagccgcccgcccgcccgcagccccgccgcgccccgaacggtgccgacgagctccagcagcgcccaatggcggcggccttcctcgccctggagccccgcgtgacatgatccctggcttggctcccgagcaggggaatatccgcgcgagcacccccacccccacaccccagccatagggccccccaattctcgccttccccaccgcaaatccttctcgactcccgtatctcccctctcctcctccgccgcctcgcgcgccgcaattggcgttgtgctcgcgtggacccagatcgccgccaggaagtgtctaattggtggtgcgcataggactggctggatttcaatcgtgataatactgatatacggagactcattgctgatccagtgagcctattcgcgccaacttgattacagcctttctcacacaagtatggcgccctctgctgccgtcccgggtggctctgaggttgaggggtcaccacgcatggccaagttcctctgcagctttggaggcagtatccttccccgaccactcgatggctgtcttaggtatgttggcggcgagacaaggattgtcatgttgccgcgtgacatatcatatgccgacctggctgcacggatgagagagctctataaggatgctgatatcatcaaataccagcaacctgatgaggatttagatgcgctggtctcggttgtgaacgacgacgatgtggtgaacatgatggaggagtatgacaaggtcattgcgacaggggaggcgttcactcggctcaggatcttcttattttctcagcatttggatgatgatgctgcatcagtggatgtgcattacaatgtagacgagcgggaaacagagagaaggtatgtagatgcgcttaacagccttggtgatgttaagtcaccttcctcccctgtgtctgtggagcagctttttggcattggaggcaatgattcaggaattcctgattttgctggcttgagacatttgaatgtccctcgtccaacacatagtcagaggtatggagagatggattctccttggagccctgcctatgtctcaccaggccagtacggggtacatgacccaagggattttccaatttcaccatcatctgcaaggtttcaagtaggagcggaggattttgatgagaggactcctgacgactttgtaaggcagtcaccaaaatatcgtcattatgaggcgcattcaccatcacatatggataatttagtctggcttccacctggtgctgtaattcagcaaaatgcaggctttcctggtaatttgagccggtccaacaatttcttggatgggagcaatggatgtgatcactgccgttcaccattccataaggttcaaggttcagtgaatgatcctatctatatgaaccctcgttggactcggccagtccaacaacattttgaccaaccaagcatgattaatgattatcccggtcaccatgctaattcttgtccagattactgccgccctggtgatcattatgtgggaggtcaagatgttagattggaaaatggtgtttatgttaaagagcaaaatggtggtcatcctcccatgttctataatgagtcacatcctcacgatagagtctggcatgtgcataccaagcaaagtcatcagcgatacgaggatccaaggctgcatcatcctgctaatggtagagtgatcgagccatacattatggatgccaacaaagtatatgaagttcattcagcatctcttgctcgttctagccatgagagtcctcactattatcacggtagcagtgaggtcataaatgacacgtatcacaaccaacaagttggaggcagtgggtcgtatgtgcagccagcagggtttgaagaatcccctagccaccattacaaccactcttcggcctatggtgcagattccttttaccaaatgcagcagaatttgccacccattcaatctctgagaaggagagcgaacagccctgttcacactgcctcaccatatgattccccacacctgccaatatcaaatgggaccattaacacaaacttcgtaagaaatacaggtgatgtcagtccgaggataccagggctacctggatatgatcgaatgccaaacacatggactcctcccaacggcagcataccatatagagttgttgggcatgatgttcatgctgcctccatggaaaacactagtgcctttggtcctaggtctaatccaactgctgctcagtatgttcagcatttcattgctcctgaatcaatccagcatcaacctggagctccattgagggaggttcatcctgaaagatcataccctgaacccatgccgtcgtcatatgttgatggcaaagtagctgtttctgcattgcctctcactgatcaattatccaggttggatacaaacacaataaagaaacctgaaggtccagatgatgttaactcaactcaaaatgtgaatgaaacaactcctttgcatgctgtggatgaaccaagtaccttaccccaccatgttgtagttgtacatgaagttgatactaagcaggggaagccaaccgaacatgaaagcaggcaaaagcaacatgaagctggggctacagcactgcaggaatgtggggatatttcagaggatagattgaatttccttcctgaattgattgcctctgttaaaaaggcagcactggaagatgctgctgagacacggatagcccaatcagatgctaatggtgctgtttcacctgttcctgatgatgatgatgataatgaaaagaagttggatgcagcagctgctggtactacagatgcaaatcaggaccctgatttgcaaggaagcattgatcggcagaagagctccaagattgagtctacaactgctgaagctgaagctttgtctaaaggactacagactataaaaaatgacgatttggaggaaattagagagctgggttcaggtacttatggggcagtttatcatggtaaatggagaggatgtgatgtcgctgttaaaagaataaaagcgagttgctttgtaggaagaccatctgagagagagcgtttggtatgtctaattttcttgtcagttccatctattttaggttttgtgcttgcagatgtttgcactgacattacagtactggttcctcaaagtccttcacattattttctgaatgatattttgagctatccagctgggctgaggagaaagtaaatttgaacatatttttctgttcaaaatgattctagttcagatttatctaattttgcagattgcggatttctggaaagaagctctgatcctaagctcactccatcatccaaatgtggtttcattttatggtgtagttcgtgatggtccagatggaagcttagcaactgttactgagtttatgatcaatggatctctaaaacagtttctgaggaaaaaagacaggacaattgatcgccggaagagagtaatattagccatggatgctgcatttggcatggagtatttgcatgggaagaatatagtccattttgacctgaaatgtgagaatctactggtgaacatgagggatccgcagcgaccaatttgcaagatcggtgatcttggactgtcaaaggttaaacagcatactttggtatctggtggtgttagaggaaccttaccatggatggcaccagagcttctgagtgggaaaagtaatatggtgtcagacaagattgatgtctattcgtttggaattgtcatgtgggagttgcttactggggaagagccatactctggcatgcgtgctgctgaaattattgggggcattgtaaacgattccctacgtcctcaaattccttcatggtgtgatcctgagtggaagggattgatggaaagctgttggtccagtgatccagctgagagaccgtccttcacggatatatctcaaaggttgaggaaaatggccgccgcaatgaatgtgaagtaaagcatcgcagttgatgaccctactccaagtgataatttaacaagtgctgacttcatgggagaaaatctatgtcatggagattccaaagcatgtttgatgttttcttttaatcctggagtaaaccggctaccatttgccttccgccgaaaacaagtatgctatatggcgcattgtcttgatgggagctgttgcactgtcatgtaaataagttttgacttgctggcccgtagtagatgtgcaaagtaataggcacgatcacacagttacttttttttttcccatataaattgtgttctaggataggtagaacgaacatgactggagcgatccttgttcagattgtaaagaaaaggacagacccagtgctgacggttcttatatgagtggggtctggttaaagaataaccaaaacaagtcttatacttttatcttgcagagaggttgcatcgaatctaggactttggctcggtagaaaggtttttcaccactgcgttaggcctatacttttttcagtttaaccactgtgctagacctgcccccttttttgagtttgtacttggtctaaaaataagagtatactgttttccatgtgtatatatcatcacttcctatttgaatgccccaaaaaacaagagtacactgtttgtcatgtatacaccatcacttccaaatacttgcaggcatataattttgcaggcatagtggagagtgatgggcagtgtgacgtatggctgtcgc

SEQ ID NO: 34079 - DNA, 3641 bp, Zea Mays
atccctggtggcagagcccgagcagcgaccgccgaggttgagacttgagagacctatgaaaccgcgaggcgccgcacaccaaccaacccccgggctgcccgtaaatgcggacacaggcgtgggggcgcggggcggtggcgcgcttgatgacgccattcaatcgccgcgcggcccacgcctcttctccccacctgctccgcgcctgctcatccgcctcttataccatcgctctcgctcgcctccgacgccacttcacctcttctgcttccttctccccagcatacagtgccagacaggatacccacacattcatggaggtggttcaagaagtccttaggcatggctcagcagatagtgtccgtgctgtcataagagctaacaaaaagagctacagccttgtccagctcattgcagcctcttttgatgtctacaacattttgtgcagcaaaaatgatatttcaatggttttaagcaccaaggagcatcacgaaatcatggagaacctttctatcaagtgttctgcttattgttctattcttccatctgtcactagtataccttcagaaatcaatcctcaagaaccttcaagcaatgaggcgatttcatcagtctctactttaataactgagaccaacagttcaaagaaaatcaaaggcgatgaccctgctcttatcctttacacaagtggcacaactggtaaacctaaaggagtagttcacacccatgagggcattctttctcaggttcagattctatctgaagcgtggggatatcgaagtgaagaccaatttctgcactgtctcccgctgcaccatgtgcatgggcttttcaatgctctatttgcgcccctttattcaggatcagtggttgagtttataccaaaattcagtgtaagcgggatatggcagagatggcgagaatcatatcccaacgatgcgagtaaaagtacagaggccattacagtatttactggagttccaaccatgtatacacgtctgctgcaagggtatgatagtatggatcctgatcaaaagtcggcctcttcttacgctgcaaagcatctgaggttaatgatgtgtggatcatcagctcttccttccccacttatgaagaggtgggaggaagtgacaggccatcgtcttttggaacgctatggtatgactgagtttgtcatggcactgtctaatccattgcatggtatccgaaaagaaggtacagttggtaaacctcttccacgcattgaggccaagatcattatggaggacggggctgaaactacaactggagttggcgagctctgcattagaagtccatctcttttcaaggagtattggaaaagaccagaggtcaccgcagaatctttcattgatggaggattcttcaagacaggtgatacagtaactgtagatgaggaaggatacttcataattttgggacgcacaaatgccgacattatgaaatttggcggttacaagctgtcagcattagaaattgaggcagtactgttagagcatgatgctgtactggaatgtgctgtccttggcttgcctgatgaagcctatggggaggttatatgtgcaataattgtgcctaaggaggatgcaaagaaaaaggctggacaggactcaaagccagcgctaaccttggaagcattaacaagttggtcgaaagataagcttgctccatacaagattccaacaagactatacttgtgggattctcttcctcggaatgccatgggaaaggttaacaagaaggagctgaagaaattgttaggagcttagccatgtgtatagatgtatttatctcttcatttccttcttaaagtttagcaagtcgggctcattatattgattagcgaataagtgctttcgttaccatggaccaataatcttcgaaacggcctgagttagactgcacacacatttatttatcagaaaagtttctagtcacactgcgcagtatcgatgttatgcattgacttgtaggaagactaataaacctcctctgctggtgaccctgacaagtctaaacaacagtaactaataggctagtaaagttaactagatgttttatactaccacatgcattgaacattcaacctccagaagttcattgtttcagccctacagggctcacaggagtcccagccatacaggactagggctgctccgtgttgtcctcctcttcccactccacgttcttcccctcctcgccatacaaccagcagcaccaagcgaagtacacgaagttcgccacgccgtagcccgtgagcagccagtagtaatagtcgtagcggccgacgttcaagttgtcgacgagccagcccgttcccaccccttgcccgctcgccacctgcaccaccttcacgatgagggcgccggccaggttgcccactccgaaggccatgtacagcagcgacatgctgaagctggccatgctcttgggcagctcggtgtacaagaactcgatctccccgatgacgccgaacgcctcggcgagccccacaagcgcgaactgcggcacgagccagaacgccgagatggtgaccccgcgctgcgccagccgcctccgctcgccctccaccgccgcggagacagccgtcgacgcggtggcgaggagcaggcccccaccgatgcgctgcttcatggtgagcccgtgcgggttgcccgtgtaccgctgcagtgccggcgcgacccacctgtcgtagcaggccgaccacagcgacatggtggccatgttgaagacggccaaggagccgctgggaacgcggaacccgcccgcgccgacgcgccggtccatagcatcggcctgcttaacggcgaagctctggttcatggcaagggcgaggaagatggtggaggaccagatcggcaggacgcggatcgccgacttgagctgctccacctggtccaccgtgcacagcctcgtcccgtcgtggccgtgccgctcggaggccgccgccgccgcgtccgagccgttgcagggcgcgtcgtccttggtggcacggagcaagcacgccttgttcaagaacctgaacgtacgtacgtacgcagctcaaaacgccaacgtgttcgtcacaccacgcatccttctgccagctagctagctgcatgttgggggggacgggacgtgacgtatatacctcagcttgtccgtggggacagcgagcttgcagtccttgaggtgatggtacacgccatcgacggtcttgtccggcaaccgcgccccgtggttcctgatcgccgcggcgacggcggtgcctatcccggcgaacatccgcctctcgcccttctccttgatgtataggctcgatcccagcaagaagctgaccgcggagagcagcatgaggcccatcgggacggcgaacccgacgctccacccgacgttgtcctgcaggtagacgatggccgtgacggcgaccgtgaaggccacgccgatggacgcgtagtaggcgttgaagtaggattgcaggatgctggcccggcgctgcctggggtgcctggagaactggtccgcgccgaacgccatggagcacggccggacgccgccggcgccgagggacaggaacgcgaagccggcgagcagccacgcgaggtgcctcgtccccggcggcgcgcactggtcgccgctgcacggag

SEQ ID NO: 34080 - DNA, 2926 bp, Zea Mays
ctttctctctctgcgcctgcgcctttctcttctccttctccttctccctcctctcaaccccaacaatctctgtctccccatctcctctcaacaaggcggcctcaacaaagtcccaccgcacctttctttaatggagcgagggtgagcctaacaaacactcgacacacaggaggaggtgctgcccgcttctcccctccctcagtctcactcgctccgctctcctccccgagaccaggaggccaagccaagaaccgcaaaccctcaggccgtggccatggcgcaaggagcaggacgggacccggaggagctcttcgaggagctgtggcgcgcctgcgcggggccgctcgtggagttgccccagaccaacgaaagggtcttctacttcctccagggtcacctagaacagctgcaagagccgacggacccggcgctgctggctgagcagatcaagatgttccaggtgcccaacaagatcctctgcaaggtcgtcaacgtcgagctcaaggccgagacagaaacggacgagatgtacgcccagatcactctgcagccggaaccagatcaagtggatctaccccaattacctgaaccgcccctgcaggagacgtcaaggcccgtggtgcactccttctgcaagatcctcacaccatccgacaccagtactcatggcggtttctccgttcttcggcgtcatgcaaacgaatgcctcccagcactggatatgtcgatgccgaccccgacccaagagctcatcacaaaggacctacatggatctgaatggaggttcaagcacatatacaggggccaaccccgtcggcaccttctgactactggatggagcacgtttgtcacatcaaagaagctgattgctggtgacgcgtttgtctacctgaggagcgagaccggacagcagcgtgtgggagtgaggcgcctcgtgcagaagcaaagcacaatgccagcatctgttatatcaagccaaagcatgcatcttggggtgcttgcaagtgcatcacacgctattaggactcattccattttcctagtgtattatagaccaaggttaagccaaagccaatacatcgtcaggctgaacaagtacctggaatctagtaaaattggattcgatgtgggcatgaggtttaagatgagttttgaaggggatgacgtccctataaagaattgtcgataaaggagatctttctccacaatggcaaggttctgaatggaagacattgaaggtcaaatgggacgaagccacaaacttaaatggccctgagagggtttcctcctgggaaattgaaccattcgatgcatccgcacctgccatcaccatgcccgtgcaaccatcaatgaaaaacaaaaggcctagggagacagctgaaggcctggatattcatgcactggaacctgctcaagaattctggctctctggaaggcctgaacagcatgagaagacaagcgtaagctccagcgaacccaaacatcaagtcgcttggacaagtgaacgcgcaggatacagtgccatgagcagttcaatctgtcagaattctgcagtaactgggagctggttcaagggcttcaattcctccggctcacacccttccctgccagagatctcccagaaactgtttcaggtcaccagcaacgacgcgagggttcctccttggcctgggctctccgcttatcatgctgacgagccctcttccaagctgtcctgcaacactgctctgtgcagctaccagaccgaggaggtggctccaagattttccaatgccgtcgaagaggaaaagaaggagcccggcatgttccgtctgtttggcgtcaatttgattaaccatgctaggagtagtgctaccgctgacaagacgagtgtgggagcaggggaaacatcggcgcgagctgctggttcttttgaagactctgctcagctatcaagagtgacgaaggatcatacgcacatggtgaacggaagcccccgagaaatccaaagccaccagagttgcagtggaaggagtcgtatcaaggtaacgagtttcaagttcttgtctttctacttgtcttgccgtgtaacctgtgtgtttgatctgtgctaggttcaaatgcatggaaatgacgtgtgcagagctgtggatttgggaaatctggatgggtacgagcagctgatgggtgaggttggagagatgtttgagatcaaagaccttggctccaaagagaaagaggaatggaaggttactttcattaacgacgagaatgagacaatggaagtcggagctgttccttggcaggagttttgccagatggtgaggaagatcgtgatccattccattggagacaggggccatatggaggcttgcccttgcctggggcaggatgggaagagggactattagaagaagggatttttttttttggctggggcagtcaggagatgggtgctgctgaaacatgatggcgtagcttgtcgatgacaaagaaggcaacagattggttgctggcgtcagttcttccttgagaaaaaaattcagtggaaggaagaagtgatgtaacataggatttgcagaaaagatttgataatgcgtcttttagaagtttggtttggtttaaagatgacaagttaatgtgtgtctagtgatctgcctaaagccttagcgacgggcaacaagcaataacaaggatggatgatgaccttaccttgggtatgttagctgtgtaaatattatgtatgtatgtatgggacattaaattggttggcatacttgactcctgatttatattgtacgtagtgtgttgcagtgctctggattcagttgtgatgtgctactattacaagtagtagaaggaatctggtttttagtccaagaatcaacatcaatatgtcaatcacaggcacactagtgtgtaattttagatctttttctgacatcca

SEQ ID NO: 34081 - DNA, 3234 bp, Zea Mays
cgcccccgcccccgctcgacgcgcccccgctcgcctccgcgcgacgcgccaccgcctgccccgctcgacgcgccaccgctcgcctccgcgcgacgcgccaccgctcgcctccgcgcgacgcgccaccgcctgccccgctcgacgcgccaccgctcgcctccgcgcgacgcgccaccgcctgccccgctcgacgcgccaccgctcgcctccgcgcgacgcgccaccgctcgtctccgcgcgacgcgccaccgctcgcctccgcgcgacgcgccaccgcctgccccgcccccacctgccccgcgccgtcgtggagagaagcgccgtcgtggtgatgacgggcgacggagagggagtcgagagctctgccgccggcgaacggcagggcgtgcccttcgctctaggcggcccgctgttcgtccccttcatggtgggccccatcaccaccataccagagttcatgtcctcagccctccacgagctccaggccttggaagacgaattaggagacaccagagacgaattcagcaatgagctttgtgtcgatgagctcaaggtgctctctgaggaggagctggtggagcgcgccctgcaggaggctatggaggactcggattctggcactcaaccacaaccagaggatcaaacacttgatggaggcatgtcagcgaatccaacacctacaattcaggcccccacattaagcccattggctgaaagagagagctctggattgcaagatatggcggacgtattaaatgaaccacaaagcagcaatggcaagcctagaggcaaagaggcaaacagcagatgcaggaagggggaaactggaaccttcacactagattctccggttgtaggagagagccatggatcagctattgacatgtcaattgtaccatttgaaccggaagagggaattaatggacaaacaacatgtaggaagggcaaaaagagaggcaggcattttgatagagaggttcgagcagagattttacagggaagctatcttactaaagcagataagtgggtacaaatcaaggccaagcaagacgaagacaaatttgcagcaaggctgcattctttcagtggcaattctgtgaagcccaaaggttcaaagtcatcatgtgagaaaattgaaatggcgagatctcttaatctaatcggtgcaccttggaagaacaaagctttaagatctgatgagcacagacctgtggtccgtccagaagtaattctctgtgttgaaatttatcagaagacatatgcctctgttaagtcccaggaacttcttttgctgggaagccaattccttactgatctgagggacaacatttattgtttgactgataaggtgatgaaggtggctgggcaacacgatcattctgggtattttcttattgaggacacgttctacaatgatacgagacatcgttctgccactgattacagtaagcctatactggattggcttgagaattccagtgatgaggtaacagagaagtgggatgccataacatctggtgttctgaagaagcgacaaaaggacttgctgcgcggtctgagtatttctaacgtgcctgaatttaaatctgaaaagatgcaaacgactcgtatctctgacctgcacttccggcccggtgctgggtacctctactgccaccaggggaactgcaagcacacgatcgtgataagggacatgaggttgattcacccagatgacacacagaaccaagcggagtaccctctccagacgttccagctgcagaggcgcttgcagaagtgctcggtgtgccagatctatcttgcgacgaagggcgttgggcgaggccacgcggggcagcagcgcggaggccacaggacaaggtcgagcgcgcaaacgagaggcagtggcgcaccgcggccttatccgcagcgtccaatccccgcgcgtcttcacgccgcgccacgccgtccgggccatgggccaccaatggcgacccccaccgccaccgcactcacctgctcctgccgcccttcgtcgccctcctcatcatccgccgccttccgccggctgaacatcttcgcccccgtctcgggcgcccattctcctcctcgacgccgcctccgtctcgcgccattgcacgtcgtcgacgactccaagaacccccccgaggagaggtctgagacggataagatggtggacggcatggacttcggggagctctgcagcgacttcgagtgcataagcagcccctacgtggagtcgacggcgaggcaggtcgcgcgggacatcctggagctccgcgaggacaaccgcgcattcaactgctacgccgtctccgtcaagtacaaggacccactcaggacatttgttgggcgtgagaagtacaggaggccgttgtggatcaccaaggcgttggaaaaccctgtagtgtccaggaaatgtcaatgcagtcgacgagcaacctgaccatcagatgggcgttgagagggaagcctaagaacccgttgttcgcgagcgtcggaggagacgtcatcgtccgcgtcgagtcacggttcgtcctgaaccagataagcgggcaggtgctggagcaggccgagtcctgggacctctccgcctcgtccctccctgcccaggcctacttctggctgtcccgaagggtctactccgccgtggagtccgggaaggacgcgatcgaagccgccaagagcgcggcgtcgtctgggctgacgaccaagggagaccagaatctcgaggcctatccggatccttctgctgatcctacaaagttctttcagaggccggatgatgggttcagccaagacgtgtaccagatcggccttctcctggccgtgatctacttcattgtacagtttctgaaggcgaccctgtgaccggctgcagcctgtcgaagaatgtagcctgtgtgcagtatacatgtatgtaactatgcctagcaacattataaaatacgggcatatatcatcctgccatctgacctgcgacagatttgtgacctttcaccactgctgtcggtgatattagtttggcacgcaagttgccaatttacaggtgttaaacttgacatcggccgccggtcgtgcttatctttgcgtagcaagctcgagcacttggcgtctgcatccgccgcgctttatgttgaactccaggtagatgggcaggcaggctcatgctttatgttgaactccccgaaaacgaccattcgcaaccgaacttccgggctgggctgcccttga

SEQ ID NO: 34082 - DNA, 268 bp, Zea Mays
tgcacctgtccttgtctcaaagacctcagactgctatgcatgtgcaccagataacttaacaggatccgtctgattgccccaaggacaccggataaaccacttacaaccagaaccgcgggattaagtaaacacaaatcacacacaccaacagtttgcagcagaaatcttattaccaaattttataagttacaaaaattttactttgtacatgatcggagtgattacaaaagtataagtttgaaatatatgctagctcaagtgaccatcc

SEQ ID NO: 34083 - DNA, 1993 bp, Zea Mays
aaggggaaaaataacgaaggaagcgaagcggcaacttccgccttctcttcgccagttactccacttccaatcgccgtctcataaatccgggctgccacttccgcctccatcgccgccagccgccgccttctcttcgccagttactccacttgcccgcaggccgcaccgcaccgccaccgctttcatcggacgatccactgagcaagccacgccaggcaggggctcgtacagggcgagagaaacccgcgcgctcgcccctgtcctgccgcgggatcgcagttgccgtccgcttcatccccggacccggaggtaggcaccaggcaggcggcggcaatgctaccgggctcgccggtgaagcgcctgctgcggcgggcggccaaggggcggcgggagaaggccgagctggcggggctggccgcggcggccgccgcgctgctgctgctctgcgccgcctcgctccgctgctcggccaccgcgcgcgggaggctctgggccggtggggtctccatcgcggcggcggggagtggcggcgaggaggagtgcgacctgttcgacggggactgggtctgggctggcggcggcggcgggtacccgctctacgactcccgggactgcccgttcctcgacgtcggcttccgatgcgccgagaacggccgccccgaggcgtcctacaccaagtggcgctggcagccgtcgcgctgccatcttcccagatttgatgccaaaagcatgctggagaagctacgaaacaaaagagtggtttttgttggtgattcaattggaaggaaccaatgggagtctctactttgtatgctctctagcgctgttcataacaagagctctatctacgaagttaatgggagtcccatcacaaagcacatgggtttcttgattttcaattttagagactacaattgcacggtggaatactacagatccccttttatagtccttcaaggccgtgcaccagcaggagcacctgagattgtccggtacagtattcgagtggatgcaatggattggatgtccgaccggggtaaatggaaggatgctgatgtactgatcttcaacactgggcactggtggaacaatgagaaaacaatcagggggggtgcctactttcaagtaggcgatgaggtcaaaatgggcatgagtgttgctgaggcttacagaagatcgatagagacattgtccgattggcttcgcaaagaagtcaacacgagcaagacccatgtcatctaccgcacatatgctcctgtgcatttcagagatggtgactggaagactggtgggagctgccacttggaaactcttccagacgcgatgccagtgaagtccctggacgaatgggccgacttgctccaacccgtggacgaatttctagggagcgatcttggatccgagctggctggtgtagacctgcttcgcgtgacgggaatgacggcccagagaaaagacggccacctctcggtctacctgagcccctcaggacccgtgccccgctacagacaggactgcagccactggtgtcttcctggagtccccgatgcctggaacgagcttctctacgccctcgtcatgaggaggcataagaagatggccggcactaggacaccggacgctgaagagggagatgtcttcagcagtggatcatcatcgtgacaaaacgagcttcgtagccatccatccatcctggctaggcgatgacagctgctgtttcacataggatgccggaatggcgagacacgtttttggaccatgggtgctgtttgcaagaagctgagctagacgtcagtggtagtatagctttgtgtgtggtgatggcaacttgtatggctaatggggaggtatttggaattggcagtgtaactagctagggtcgctacagcgaatgatgtacatatgtattcttttagcactcgttcgatgattcatattccatgtaggttttgatgggattaaaaagaaaattataaatttttttacctttgaa

SEQ ID NO: 34084 - DNA, 1275 bp, Zea Mays
aaaaactacaatggagcacaaatggtcatgtctcaaatgcagattgctggagtaaaaccagattctgagacattcagttatttgatagcgaatttactgtgaccaattacggcaagatttaattccaatgaccagaaatatatatgttgcactcattgttgcatacgcaagacttggtaattttgatatggccaagcaggttctactcgataaagaaataccatgtaagttcctcagtgacatcaagagcgcacttgtaggagcgctggcattaaatgggcaagtgtcggatgcacttcgcttgcatgatgagataatgcaatccggcggctccctggaaccaaaagctgccattgccttgattgagcatattcgaacagaaggtgaactggatagaatgcatcaacttctcgatgggctgaatgactcaaacagctggtttgatggctgtggcagagtacttttatactgtgtccagcacaactatcctgatgctgcaattgatctacttaagcagatcagggagaaagatgaaatgagtacatatatggttgttgatcaggttttttgccaaatatgggacatggagaccacaaatttggattttggaatggtgtttcttgatgctgtcaaagagcttggacttaatgtttctcggacaagccttgactttcttctcagcgcatgtgtaaaagcaaaggatttgcgacgtgcccaacagatctggacagaatacgaatctgctggtcttccacacaacgtgctgagttccttgaggatgtatcaagcttttctttcatctgggggacgtaaggcggctaagaagttgttgaaaaagatacaaaaggaagatgctcacgtgcgctacataacatatgcttgtcgtgcgacatactgcagtaaagacttcaagccttctgctacagttaggttaagttccaaaggaagagctagatcaaaacctactaatgaggggtaagaggtctatttacttttaccacttccgttgcagtgaaatactgaaacgggatgaaatcaattcttttgttctgggaaattcgctcgtacttgttaactcctatcgctttggatcttagagactagggtgatcattgctaacatcggattatatcttaagcaattggtggagccatggagattttctgattttattttttgtgtgcatatcatggtcaatatgaagccttcacctataggcttaaaggacaagggaattctaaattgtagccgaacagataaagaccctgcccttcg

SEQ ID NO: 34085 - DNA, 2327 bp, Zea Mays
ttaaaatggggtttataatagcaaaaaaattgccccagcctcctgcagtcctgtggtcgcacggtccttcactcctgcgtcctgtgcctcggtgcctcccagacccaggcggccaggatcccagcctcccaggtccccggtggcggcagcagcctcccagtcccagatggccaccagttctaaaccctagccgccaaaccaacacgagcagctgtcgccctccaggccggccgagcggggcgccgggcaccgtcgcgccgagctgagcggagagtggagcacctgcaccgagcggccagcggtgcgccgacgcgccgtgcgccgagcacctgagtggccagcggggcgcccagcactcgtctagtcgtcttctctgattgtgatgtcaactcccaacgaaaattattatttgatgttgttggaatgttaaattgtgataaatttctgttagaatgctgctgaaatgttgttgtaattttagtgggcgggcggataacagatatctgttggataacggatatccggcgggtacaggtacggatatagatccgtatccacaagcgtaaatgggtatgggtatgtgtatgtgtatggattgggtttacctcgcgggtatggatacgcgaaacatatatccgcgttctacccgcccgattgccatccctaacaatacaggagaagagaatgggcttgcgctaggctgattaagccttgtgaaaactctgtgacataagctaggcagcgacaggggcggatttgggccgcaacgccatggaccggggcgtggtccatatacagagatatagtttggggttatggttcagaaatctaaaaaaaagagcgatactagacattttttagtagcactcacttatatacgtgtatcagaccgtttgggccgatttggatacagcccatgaaaggagaacagcccaacttacctctcgcttcatgcgtgagcgtgacgttgacggcgtaggctagcgcctagcgctagacccgcccgcggcccgccgcaccctcgcagtcccgactcctgcacaacgacgctgtcgagcctgcctggcgagtgttgtccggcggccggcaacggggaagagagcgtccgacggcgacgcactcgagcggcacccctcccaactcgctccctcctcggcccctgcagccctgctccgtggcgcgcatcactgggcggctcgccgtacaatcagcgagcgggtggcggctacctccatactagcaagactcaatcggcgaaatcctgggcgtgcctgccaatgagcaagaagaggaagcatctggatccagcgaactcgttgaaagacagcgaacaagtagtcgcctcagatttcataagaggagacgatcttgatgacctattatcgaagcttatcaggagtgtggagattgccaaggcttcaaggggaggcttaccagaaaagatatggatgaagcaacaatttgctatcggcgtcaatgatgtcacaagggttcttgagcgaatgccgcattctgtcactgctcatcctgctcaaatgtctaatgaagcaccaactgtctcaggccgacgtcaagctcctttggtgccattgcaggctgtccttgtagctgccgactgcaatcccaaatggttaacaaaacacataccaacactagcgtctacaaggcaggtaccggtattgtgcgtgaaggacaacaagggaggctcagtaaggttaggccatgtggtgaatgtcagaacagcccttgccattggagtaaaggccaaagatagcgttctcaacaagaccattgatgagttcctgaaagacagtaaactggttgccaatgaaccataaagtaaccccaagtctagtgacacgtttgtactaaaaagcctgtacttccgggcatgcaacatcccaggatcatctcataaatgggtttaagtttgagaagggggtcaagtatcttgagcagattgtggcaatatcaatttggagggacttcttgagagaacagtcatgggaaataggacagactatttgtttggtccgtgcaatattgtttgactggtgaacctagttatccattgtgatctagaacttgtatcaaactccaatgtaacgagatgttaggatccttgtttattgggtacagttttttcttcttctcgaggctcgacaccggtacattaatttttcttgttttttatattctatagtatatataataatgtgaaaaggcttatattgtgatggttaagtctttcgagtagcatcgacgaatttttagcttgattaaaaaatcatctcgttatgccttgccagctcccggattatgtcctg

SEQ ID NO: 34086 - DNA, 1016 bp, Zea Mays
ggaaaagaaaagagggctaaaaacctagcaatcccctcctcgccgtagctgtcggacgaggtaaccatggccgcggggggcaccgccgacttcttctaccgcgagtcgcagcgtctgggctacgtcgcccgctctgcgtttaaggtggcttgtcagaacctgggtcccctcgagaagggtggcattgtcgtcggcgtcgatgttaagaaggtgaaagtgccctctgcgcactgtgactcacgggtcaggacggtctgtgcagatgtcatgacgctgatgaagcggcaggctcgggcaatgtcgccacaggaacgaggattctctgtgatactgtcagacatgtgccccccagtttcagggatcacgactaaagatggagctatatcttgtgagttgggcatgcgcgctctctcgttggcagtagggaagataaagttaaaagattctaattacagtgataccctagagaagtatctgagctccactgagcctgagtctgacgaggatggcgttcttcgacgtggaggcaacctggtagtgaagtttcttgagaatgaggacatatcagggtttggcaaattctgcaaggtgaagttcaagaaagtatcgttgttgagacccaaggcgactcgacctagctcgagggagatctacatgatctgcgaaggtttgcggtagaaaggagggctcttcagaaggcaagcgaagactccaagaagctaggtcagttgagttgccctgaactgggcgctgttagttctagctgctggtgcaggtgctggctgattggcaatgtgatacagctgtttgatgctgatagcctcccagagcaagttaccacaaagctttgtgtgattgaaccatgctagtagttcgtctagatgttacctgtaataattttgttgaactgtgatactagttcgtctaggagaaacaagcatttgacttgagccctttctgagaacctgaaacacccttgctttttatgttgcaaatttccattatttcggccggat

SEQ ID NO: 34087 - DNA, 503 bp, Zea Mays
cagaaacaccagaagggctgcaccacactgcacagctaccaagagtggcgtccactgtataatgtatataaatctctgacccgagttgcttctaattaagggaactagcttggcttctgccctgccgtagccatggaagcagacctcgagagaggcctgattgtgtatgaagagccgggtccagagccgacggacctgctctccagcgcgtggtgcagctcggcagctatccgagtgcttcacgcgggacccaaggacgagtgctccatggcgctggtggagcacccggtcatggcgcttggcagcggcaggagcgacgtgttggcgaagagtggtcgtagtcgtagcttggtggctgacagcagcggtttcagcacggcccagtggaaatatgatgatctgaagtcgtggctatggctgcagaaggcaattcatcccgaactggactacgatctctgcctcaagaagaaatggatcatctccatgtcctgtatccaattgat

SEQ ID NO: 34088 - DNA, 578 bp, Zea Mays
ctcacattgatccttcccaaccatgccccaccgatcggagagagagcggaagaccgagcagagaacagaagtgcgccatcgccatcattctccacgtatgtcaccggcgggtgctcggtgatcaattgggctatttcgtcggaacacaacgagctcgtccgtgacagttggagaagcgtggaacctctgtgaccgcgtaggacttcacgcagtggagtcgtcaccgccgtggccttgtggacagccatcccagacgcttcaattgtccgtgaagagcaagtactgctggagaaggactactacgatgaattcgatgaaatccaggggtcgtctcccagtcaactattggcaccgaggagatatttatcttagttcgatttattaattatcaactattttgtaagacattttcgttatgtaataaagattatgacgttggtctctatacactgagtcattgtatgtgtgaatctttatttggcgcaatatgaagtgacagaagtggtatcagagtaatgctggctgtagaatgtaacctagttagaactagataaaatccttaactacttacttttacc

SEQ ID NO: 34089 - DNA, 1089 bp, Zea Mays
tcgaatcgggtcggtcttgtcgtgcgtcgtggctgcgcgagcgactcgactgcacccaacccccctcctcccagtccccacacactgcgcgccgccgccggatcctcctagggtttcgccgcaatgtcgctccggccgagcgagcgggagcagatgcggaagggcaactacaagcagacggtggacgcggaggagagtcgctgccgctgcgagggccagatgatggacatgcgcaaggccaagcgcgaggaaagtttccaaaagaagcgctgcgatgggtttcccgcctccgccgccggtgtgccgccgatgggccactccaccgcgctccagcagaaggtgcggtgcccccctcccttgttcttcctagccccgatctgatccgctctctgcgttagggtatgggtgacgtggtggcactcgatctgctgggttcggatctgattttcttggtgacgggatggcttgccggcgatggtgcaggccgtccactccaacgacccctccgtgcagcttgaggccaccacacagttcaggaagctactttctatagtcccccaatcgaagaggtgatcagcacaggagtggtgccgcgattcattgagtttcttacacgtgaggaccatccccaactccagtttgaggctgcatgggcactcaccaacattgcatcaggcacatcagagaacactaaggtggtggttgagagtggtgctgtgcccatctttgtcaagctactcaactccctcaagcgaggatgttcgtgaatagacatgcactaaattacaagagatgtgtcatattatgaccagaggtggatccagaatttttctatgaccccagccaaatctaccaaattttcttctctttattttatcttaactattttataccatattaaatagagacttatatagagttacatggatcaagccctgggccacagatcgggtggcctggggtgtagatccgccactgattatgactatggatgagacttttgtgatgtaattgatgagactatggatttaaatattgttatgtgattgtgtgtgagatgttttatgtgaaaatatgttgtgttatata

SEQ ID NO: 34090 - DNA, 4823 bp, Zea Mays
tcactttgaaactcaaaatgtcataatattttgatttcattcatttggacgaactagaaactgtgattttttagtaactcatgccttaactaaaatactaaatagacactgatcctgaacatggcacaactgtattggctggtcactctcataagcttttgcttttggcaaacacatgcctggaacaagcagtactacttcgttgacatataaataccttgagcaagttggtgttgattttgatgataaaaatagctgggagtatcttttcaagttatattggttggatctgaaagggaagcatttactaacgattgaagagctaaaaagtgcaaagaactattggactgttcctactactgctggtaggagagagaaagaggagtcatctgatgaactatatgatgcaagcaatgaccaagatgctacgtttgacatttcctcaaagaaacaaagacagaataactcttcaggaaaaagaggacaaaaacgtaaaaaagatggtggcattacttcaaggaagcgtggaatctcaattaatagtgctggaagcttaccgaatggatcaacaggtgaagggatgtccttggcaggtgacacaaaatgggcatcatctgagttattggaattcattggtcacatgagaaatggtgatagttcttatatttcccagtttgatgtccaggttcttttgctcgaatatataaagcaaaataacctctctgatcctcgcagaaaaagtcagattatctgtgatgcaaggcttagcaatttgtttagaaaaccacgtgttggtcattttgagatgttaaagcttttggagatgcattatcttgtgaaacaggttccaacattgaatgcagatagtgaaagagcatttgattcatactcggcccaagtaaatcatggaggatataatgagttgtccgataaattaggttctgataagaggaggaaggctcatatgaagattgaaagagaatcgacaattaatccagaggattatgctgccattgacatgcacaatatcaatctgatttacttgcgccgcagtgttatggaggatcttattgatgaggttgctgttttctctgacaaaattgctggggcttttgtgaggataagaatttccggtcttggcaacaagcaagatatgtaccgactggtgaaagttctcggtacacataaagttgcagagcgatacactgttggtaagaagacaacagattatgctcttgagatatctaatttagaaaaaaaagagattatcacaatggacacgatctcaaatcaggatttcacagaggaggaatgcaagcggttacgccagagtatgaagtttggtctaactgcccggttaaaagtgagggatgtctatgataaagctaaaatcttccaatctctgcaatttaaagattggttggaaaatgagaaacagaggctgagccgtcttcgtgatcgtgctagtgaaaccggacgccgaaaagaattgagagagtgtgtagaaaagttgcagcttctgaacactcctgaagaaacagagcgcatgattaatgaagctcctgaagtacatgttgatccccagatggatccaagttatgaatccgctgaagaacccgattataagaaagctgttgattggaccatgcatcggaacggaccagatctattatttccaggaagaaaagggacaaaattgaattctgtggagaatcatacacaaaatagtctggatgcaagcggtcacattagcagtctacctacagaggatgtggaccatagattaggtgctggaagtaacattaatttaaacaatatggcaccagagcctgcatcacttggagttttatcaaatgacactgagccagaaaaagtttggcactacaaagaccctaatggaaatgttcagggaccgtttactcttttgcagttatccaattgggcaagttttttcccacgtgacctgagaatatggcttacatttgagagtgaggagaactcactactgttgactgaagtgctcccaaagcagcagaaagattttattcagccttcaacagttactaccagtgataaatcaatatgggcaggctctggtcaagatagaattaactcaaatgcaaataactcttcctcccctagcttgtctgctgagtgctatgatccaacaaaatatctaaagcctctaggtggaacgtcaccatcaagatctctgaaagattctcatgctttgcatgaggtccagaatcaggttaacgattcatccacaattctttcttcagctggttcatatgtaccaaccagttctcatgatgaaagggtctcaagagacagggttgatgagtggaacagtagtcaggacaatggtggcatttggaatccaaccatgaatcatagtcggaagagtaatgcacagcaacatcctgacggttttacagggaaggaccaaatgctaactgaatctaaatgtagttcacatatggtctcagttcttaccccacaacaatctgagagagaccctgccacttctcttagtactacaagtcgtccggagtgcaaaaccatgtgccggcaggaaggttcttcatggagttcagctacaaatgctggagttcatgaccttcagttaactattgctttaacaaagccagagacatgttctccaacaaatcctgttgaagacagagattcgagttctgcttctgcggtgtcttgtcagtcaggggctcctgcctgcattccccaacccgatccaacatctacatgtaattcaagtaagattgaggcaaccatggatctgcataaaacatgccagcctgacacatcaaatgaatcattcggccggcttcctgaacctcaaagtggctcactcttttccttgaaaactctaaatcttgagtccgagcaccctagttctacgccaaaactggaggggaaggaaacttccatgaaccagtcaggatcaacatcagtagcacatgagaatttagctacaaagacacgtgtccgcccacctaccagtaaaattgatagcttgcaaccacttaaggaaagatcatgtccaacagaaagggactcaatcactcaattagagcatctgtttgaagagaatgtggtaaagagaaataacgaagtggtcaatcctgtatctgatgctgaagggattgctgtatcagatgtgttggaatcgttaacagaacaagattgtgaaaaatacagtacacatggagcagattgtgaaaaatacagtacacatggagcagcgcctttacaaaatttggtgccagcttcagccgaggaagaacaaccacaatgctccagtcctattgcattgtccccttggggggaaccaagttactatcagggtgaagctgttgattctgctctatggggcgtccaggatggtaatgacatgtggtcaatgccttcaccaacacctggtctccagccttcatcagaggaggcgagagcggaccatggagatggtgcatttgtcgaaacattaccaagacaaggggacgaaaagacggaacatgcaaactcaagtgtctcaggttctggagtgccagaacaggtaaaaccaaaagcaagcactgcatcaggtccatctctagatgggagcacaaaagctttgggttggcaactgctgggctcatctctagaggggagtgcaaaagcttcaggctggaaaccgccagctttatcgattgaagggattgctaatgcctcaggttcgcaagcattgtatcctacgcaagggagcacaaaatcttcaggttgtcagcgatcaagttcatccccagatgggagtagaaaagcctcaggttggcaacagtcaagtacatcaccggtggggagtggaaaagctcatggctggcaacgatcaggttcttttacccagggtggtacaaaagctgcaggctggcaaccctctggttcttctacagatcggagtgcaaaagttgatggctggcaacgaacaagttcatctccggagggaaacagaaaagcttcaggctggcattcatcaggtcgtgagagctcaaagatcacatatggtgccagtgaaaaccgtaaatcattttctagccaccaagcgacgacaccaacagggagacactctttggcaaggaggcagggaagcagcgacaagggtgctgctggttgggaagagagtctaggaaacacttgggaagcatcaaagagacaacagagaaacagcgacaagaatgcaggctgcggagaggctctcggaagcaacaggacctggcacccatcgtctggtaaccccagtcggagcagccaggggaatcaccaacatgacaggcattctcacggcagtgattcgcggcggggtagctcaaactaccctcggaggtccgaccatcgtcatgaccatggcagtggtggttcgtcaagaccctcgtcaagagggcagccccagaggggggtttgtaaatactacgagaatggccactgctggaagggctcgaaatgccagtacctgcaccgatgactgccgtgaccgtgggaagcggaacgccctcacatttttgtatagcagcatatggtctcgtcgtagtcagtaaaaggaggaactgtgtcggcgggaccactagttcgtagtagtacatatccttcagagcaggagcatgactaaagattctccgctttggtgcaggaatgcgccccttttgttcagttaaacggaggtgtgggcatttgcaaacatggattttctccataagccagggtgttgtgcaatcgtacggaataactactgaagagctgcacgtccgattgagaatgacactacggaagag

SEQ ID NO: 34091 - DNA, 2430 bp, Zea Mays
tccccctccccctccccctccgacccatccccgccgagaactccatttcccggctcgcaccgaggccaaggttccctcgtcccttctccaggcggcgcctacgccttcccgccctcctccaagtccaatgcctcgcggccaccggccccgccgcgcccgcgccgcggtggcacgcggcactgtccgccgcggcggggctgtacccggcctacgtcgcagccggcgcctccgtggccttcacgcggcccgaggcgttccggtggttcgtggcgctggcgccggggtcctacaccgctacgctcggcttcatcatgctcgccatgggcctcacgctccagctcagtgacttcgccgccctcctccgcgacaggcccctcgccattttgttcgggtgtgccgcccagtacaccataatgcctgcgtttggcgctatcattagccacgcgctggggcttcccccgtcgctctcagctggcctcatcctgctgggatgctgtcctggaggaactgcatccaatgtggtgactttagttgctcaaggcgacgttccattatccgtcgtgatgactgtctgcagcactcttgctgcagtgttccttactcctctgttaacgaaaattcttgctggtgcttatattcctgtggatgccgttaagctctctctcagtactttgcaggtggttgttgccccaattctattaggttcattgatacaaactgcattcccatcagtagctcaatttctgagtccttttgcacctctgatggcagtcttggcttcatcacttctagcatccagtgtcttctctgagaactttgtgcgcctaagatcgacaattgccgatgcatcccctgtgaatggaatgttctttggggatgtagggactgtcatcttctctgtcttcttgctgcattttgctggtttctttgtcgggtatgcagcagcagctataggtggtttcaaagaaaagcaaaggagagcaatatcgatcgaggtaggaatgcagaactcgtccctaggggtagttttagcaaccgcgcatttctcctcgcccttggtcgcgctgcctcctgcagtctcggccgtcgtcatgaacatgatgggtagcacactgggtctcgtatggcaatataccagcacttccgtgtcagagaacgaaaccagtgcgtgatctactcttactgtcgccatgtgcttaatctaatgtgtcgtatctaccaccaccaccactactactacccgaatatacctttcgagtacttttgatcatgttggggaacggggtcgctgatgatgaccctggaatggaaaaaatcttgctgtcttaattactggaggacccaggttacctgtctgaattatgtgggtggtgaatgcccaggctacatatgggtcccttttttcagcactgcaaatagagggaaaacccattttgcatgtgacctggtacattacaatgctgtgctgtgcctgcaaacaaagccccgcgcccactgcttccacctgtatgtgcgtgctcgtgcaatggcatcaggcaaaggtcgcaaggccaagtgccatttgcacccatgcgctcttgtggcagtagtgctaccgactaatgatgatgaccagagctcgcgactgccccacagagagaggtttgccgaaccgcttgatgagattcattcacggaaccacgaggagcaggcaggcagggaaaagcagatctcgccacagctgcaggatcatgatcatcgcctggtgttttcctgggatctaaaccacgctgcttactttttaaagcttttcttcttgcagctcaacggcgacgacctggagcgttcagctttgcctttgaatgaccggcactgtagcacgtccagatcaggtcccgttgttctgaatcctggctagcagcttagcatggtacggtcaaatgaagctgtcatgtgcgcccgtaacgagtcaaagtagatgaacatgtgagtgcaactaaacctgtccgttgagatgaacatgtctacgctacttttgccgaggctgacggcgtctcccgctcctgttcaagtggagattaacaaagttgctcacacacactgatcggggagggatcaaagtagtatatgttcaatctggctggttatttggtctgtgaatcatgtgctgggatttaactagtctctctgtctcccagttgcggttgatcagctccttcctattaatgttccagccacgctgagtcacagctgctggctgaacaccgggcatcatccagtggagttctttttgtggacgaagtcaaagatgacaatgagacgtgattagtgcggacgcacgttctcattgaaaaattaacggctttcactgtcatttcgtatttttattttattcctgtaatggttgcactatgtccttgttgtgtatatatatatattgttggccattcc

SEQ ID NO: 34092 - DNA, 1143 bp, Zea Mays
aaaacggtcatcgcccttgtcttcttcttcttcttcttcatctcaccaacctttcccttcccgtcccaaccgccgtccgcctgctcccttccgctcacctgcttcatctgttttgaagaaaaaaaggaaaacagaaggaagagagtaaaagaggcctgcgctgccctgcgccccagagtatgcgcttctaacacttgcatatttggatggatgatgtatatggacggatagaggtcttcccccaacactttgtaccatcaaaagaagctatggagacacctgacggtctatcaacaattcatgtaagcgttcctggactccaagacgagttaagggagctgcatccattttgcatttattgtccattccccgcataagatggtctacaagcaatgaggatgatgacaagattgaattatctagagccgaagtagaaactttacgaaccgaaatagcgggtgccgaggaaagggaatctcacttaaaagctcggttggaaaacattgatgaagttttgagatatgcacggctttctggctatctctacattagaagtcgatggacccaactccctggtgaaccacctatattagatgatgctgatgtggatgactggcttcctcgctttgttgttctacaagggcagtgtttatactattatctgaaatgtacagatctgagcccacaggaatctacactcttatgtgatgttgttgaagtagggcagcttccagactttgtgccagaagatgaaaagacgagatatgcgttttacctgttgacccgtcaagggttgaggtttgaatgctccagtacctccgaaatacaggttgattcatgggtaagagcactgtcaagtgactgcaaattgcaggatggcgctggtgatgataagatgatgaatacgaggagtagccaagtagaagctgggtcatcatggtagacgatgtatggagtgctgtacagtacaatagtcaatgaaatgtacatacattacatgcatgtaaagggagcaacatagtagacgcattcaacacgagatgacatgttgctcgtggtatttttcaacttttagggagcacacaaatgatgtatttctgtagcaaaaaatccgtcgtccgtttgagtttgatagaccgtaag

SEQ ID NO: 34093 - DNA, 1205 bp, Zea Mays
accaaactagaaaaacaattgcgtggagaaaaggaagggccatgaaaagcacggctcaggaaaaacaacggcggacagcccgcctccaccgccgtggcgccgttcaccccgccccgcgttctctctccctcggcgacggctcgacgaccgccgcgccgccctacgctccagcctccatgtgcttcgcggggcccttcgccgtcgactaacacaccaccaccaccattcggccggcacctggcccaagggttgagcatggagatcacgaacgagatgcttaagagactgccgagactacaatggcagaatttgttctatggactttcacagcaaggctaccaactatctcgtgacagctagcgatgatgaatcaatccgtttatacgatacccaagatgcagtggttgtctgcatcgcactttgctctggaaaagaaaactttctctcatgttcgcttgatcgtaccattctcttatgggaccatcgggctgaaaaaccgcagggcttactgcgcgcgcaaaggaggcctacagtttcgtacgacgcccagggcatggtatttgctgtcgcctatggtggccgcataaagatgtttgatattcggaaattcggaatggggccttttgcgaccttctctgtcggcactgatgattcggaagcccatgtcgtacagttcagcggtgatggcaggcggattctgttaaccactaaagctgggcgtgttcatgtgctagattcttttgaaggcaacagcattgcatcgtttcgcgcgaagccaatattaaccaattcgacactggaggcatcgttctgtcccgagggaaaccatatcgtatctggctccggtgatggtagtgtctatgcttggaacgttgagagcggaaaggttgcatgctgggaaagcacagatgtgaaaccgccgcgggtaaggtggtctccaggatccttgatgttcgtgacaggaacgtcggagctgtcctgctgggtgccggatttgtccaagctggagtccttcaccatcagccacaccaacaccaggtccagctcgtccctgtaggcttggaccgatttgcatgccgtgtggccggttgacgcgaaggaggaacaagaaagcatagcggagcatcttgtaccaattgagtttgtgatctgttcctgatggcccggtaagctactattgcaacgattgtggtctgcggcaacgg

SEQ ID NO: 34094 - DNA, 1866 bp, Zea Mays
gccacgcaaacaagattagacgtacgcttggtcgggaagtgttagcattagtgcgtcactaaactcgcacgccacctaatgatttacatttgctgctgcgtctgggatatataaaggaaaaaaagcgtgacaccaacccgacaccggctcccctcgctggctctcctccgcagctccgctcccctgctcgccacctcccgcccattttaaaccaccaccactaccaaactttgcttgcctccccagtccccaccaccgcttggctgccgcttgctgctgcggtcgtctagctaagctagcttacatagccagcttcgacacgtcgcgacgcagattaagcggcacgaggccagcctccgggagctggtggtggagctaggcaggcggcgttgtgcttgctggcttctgtgatggggtcgtccacggatcacgccgccggtgcccgtggcaagaagcaggggtcgcagctgtggaagaaggcgctgctgcattcctccctctgcttcgtgatgggcttcttcaccggcttcgcgccgtcgtccgtgtccgactggacgtccgcggcggcggcggcggggggccgggtgggcagcagccacgtggtccgggcgctgccggcgggcggggagcggcaccaccagcgcaacgtggcgctcggacacatcgagcaccaccgcctcgccggcgtcgtcctcttcgcgggcctcggcgacgtgttcgacctccgcttcttcgacgagctcaggggaatcagcgcgttcggcgcgtggccggtggcgacgatgcggcgcggcgagaggaaggtggtcgtccggggccccgcgtgcagctcggccgcggtcaccggctggttctcccaggacttgggcggcagcggcaccgcggccgcctccgcatccacggcgaggcctggtgagctggacgtccacggcttcgccttcaacagctccgtgctctgggaccccgagcgctggggccgctacccaacctccgagcccgacaagtcccaggactccatgaagttcgtccagcaagtggtcctggaagattttagcaaggtgaagggcatcccttccgactgctcagaggtcatggtatggcacgtcgatacggctgcgccgtctttgcagaacaagaagagaagatagagagctcaactctagaacagaacggggacgagctggatggaggacggctgagtgtgttcgttgtacatgcatgtctacgccgtcaagaatcaagatgctggttgccccctgctcggtacctgcaaagaaggaaaatttttgagtttctcaccggaggatggatcagcctctgaacaccacccccccccccccttctccatcatgatgtacaattttccactgttcttttctttttttttctaaaagaagttgtgatatatgtatatttttttcttttctagagggtttaggtgaatacatacataatacccccttgaagtgcctctcaacaaggatgtaatggaaagaaaggcaagctaaagaccagcttaacaatgatggtacacatgagaatgttctcttctgttcagaagttatttccaatacaagatatccagttcgtagcaaagatagacgcctgtactgttcagaagttattccaataccaaatagcatgcttcagaagcacacaaaaactatggcattgttcttggtggtccgtgtgcccgttcactaggagcgagattgggggaccttgagtaccattgcatggttgttgttaggctgttagcccatcgccatcgtgcgggaaattaactatggtgagcctagagataatgaactgatgtggattggacacgcgcttttgaaaaaggaagctccaacagtctacctgcaa

SEQ ID NO: 34095 - DNA, 683 bp, Zea Mays
ctagatttcatttcaaggagcaccagtaaagtagttccaaaatttaaattctgcacgaatctgatggtttgtttgaattgcaatttggaccgaggcgaaatctactatctcatgccaaggtgacactggtgtttgaggttcagtaacttgagttgctaaagcaccagacaagagttggagaactaggagtcttcggctgtcgctacggccttcggattgctcctgtattcttcaatggacaatccttaacacggtcacataagcacaacaagaggagaaccctgaccacagttcctagtccaagggcgacgatggcggatttgcttttattgctgaacaatgggaaccctctgtgggttgtgaaactattcctggtcagcgagaggtacgacagggatctcaactccttgaagctctccggtatccccccccacgagcttgttccttgtaagattcagtgtcctcaacttggtgcacacactgatgccaggagctatagcgccactcagatagttggttccaacatcaaaagtattaagcttcggcagcaagctggagtcgatagcaatctcaccagagagcgagtagttcctcaagctgattaccctcagcagtggacaactttacagggaagcgggcaactcaccgtccagcctattggtggccaggtttacggactctag

SEQ ID NO: 34096 - DNA, 1665 bp, Zea Mays
cacggccaccacaacaccagcactaacaaatccccaaaaaaaaagtctagccacagcccacagcacttcttctccacaacgaccccacagagggccagagcaagacatccgcaccgcatcgcatatacccagagctgtgatcgctgccattaattctcccctcataggcctccaacaaggtcgatggaggaacaacacatggctgggccgccgtaccgctaccgccttcagcatcgccggctgatggacatagcacccgcaagcgcgagcgacgacgattcagggcatcacggctccaacgggatggccatcatggtgtcgatcctggtggtggtcatcgtctgcaccctcttctactgcgtctactgctggagatggaggaagcgcaacgggcgtgatgggcggcggcgcggagatcgccgtgaagcggctgtcggctcggtcgcggcagggcgcggcggagttccgcaacgaggtggagctgatcgccaagctgcagcaccggaacctggtccgcctgctgggatgctgcgtcgagagggacgagaagatgctcgtctacgagtacctccccaaccgaagcctcgactccttcctcttcgatagcaggaagagcgggcagctggactggaagacgaggcagagcatcgtcctggggatcgcccgcggcatgctgtacctgcacgaggactcgtgcctcaaggtcatccacagggacctcaaggccagcaacgtgctcctggacaacaggatgaaccctaagatctccgacttcggcatggccaagatcttcgaggaggagggcaacgagcctaacacgggccccgtggttggcacctacgggtacatggctccggagtacgccatggagggcgtcttctcggtgaagtcagacgtcttcagcttcggggtgctggtgctagagatcctcagcgggcagcggaacggctccatgtacctccaggagcaccagcacaccctgattcaagatgcctggaagctgtggaacgaggacagggcggcggagttcatggacgcggcgctggcggggtcgtacccgcgggacgaggcgtggcggtgcttccacgtggggctgctgtgcgtgcaggagagcccggacctccggcccaccatgtccagcgtggtgctcatgctcatcagcgaccagacggcgcagcagatgccggcgccggcgcagccgccgctgttcgccagcagcaggctcggcaggaaggcgtccgcgtcggacttgtcgctggccatgaagacggagacgaccaagacgcagtccgtcaacgaggtgtccatctccatgatggagccacggtgagacgagggggggcgggggggcttgcttgatcgtcaaccaacaagtgtccgtctccgtctccgtcccatccgcatgagaaacccttactcggggagccgtcgtgatttgcttggttctttgatcagcaacggcggcaacaacagcaggcacacttttcgtcgaggatacgctgtgcgtcgtcgtcggtgcgcgcgtgtatgtgtgtgtgatggttacggatgtcttgcgagccgtaatcgcgctgggaaagtcccagcctttgtcgcggggaaaatcttgtagccatgacatgtgcagcgagaaaaacgcctttgagtttgagactagaaagaaaa

SEQ ID NO: 34097 - DNA, 4969 bp, Zea Mays
atcaccatgacggactcggggaggaggccaccaactaccaaacccatcgcacacgtcctgctcccctccccttctcgtcgcgtcggcattgcattgcacgcctcgcccggcgcctgctcccttgcattttccattgacctcccccccgccccctctcgtccgtctcctcctccccaaagcttcgaattttcccgagccggagccacaccttctttctccccgcgtcccacgattcgccgtcggaaagaggcaaggcaacggaaaccgagccgtcctgcgtgagctggggcggggtcccccgtctgggtgccttccgtgccactctcctgcaacgcggggcgcattgtcttgctgcccccttgagaagggaagattcccgccatctattaatcctcctctcgtatgccgttttctgcctggggaggacacaaacgcagcgccgcgggaaagccgggcgccgcatggatcgaggcatccggtgttcctgtctcaagacccagttttggcgtcttggcgtagcgggacggaggaggacgacggggtttcggagcgcagggtcgcggcggcacgccgggatctccgaggcgccgcgctgttgagtgttgacgccttctcgttcctgggaggaggtgatttctctgctgagggcctggggagtctcttggttcagtccctctccctctgcagtttatttgctttttttaggtaggtggagtgtggagttgttgggtgggagagggcctggaatttatttcgagctgcttctttggagaccattgtttctcgaatctgagttcctcttcttcggagggagttgtcaattgcgttctgattgatttggacaagatcggaaggaactggcactctcggtgggcgtacaaaaactctgagcttgtggccttatcgacttcttgggggcatctgggagtagcttcagcgattcacttgagtctggaggaatggcgccgaccaagaggatggagaagctcaagctcagcacattgttgactttcatgcgttgccacaggggctctagtgatgaccactcacggattgggacagtggggttctcccgagtcgtttacgtcaacgagcctgatatgcttgaagaggagggattcaactaccccttgaatgaagtgtcgacgacaaagtacactctggccaccttccttcccaagtccctcttcgagcagttcaggagggtggccaatttctacttccttgtctctggtatccttgccttgactccacttgcaccttacacggcagtgagcgcgcttgcaccgctctgtgtcgtgattgtagccaccatggcaaaagaaggggttgaggactggcggaggaaacaacaggatcatgagctcaataatcggatagtcaaagtgcataggggaagtggccattttgaagagacaaaatggaagaatatcaaagttggagatgtaataaaactggagaaggataatttctttcccgctgatatgattctgctttcatctagctatccggatggaatatgttatgtagagaccatgaaccttgatggtgaaacaaatttgaaaattaaacaagctctcgaggtgacattggatttacaggaggacacaaagttcagagaagtcagacaaacaataaaatgtgaagacccaaatgcgaacctctactcctttgtcggttcaatggaatggagaggccagcagtatcccctgtcacccctacagcttcttctccgggactcaaaactacggaacacagactacatatatggggctgtcatcttcacaggtcatgatacaaaagtgatgcaaaatgcaacagatccaccatctaaaagaagtaagattgagaagaaaatggatcaaattatttacgttctgatgtcttctctactcatgattgcattacttggttccatcttctttgggatctggaccaaagaggacgtaagagatggtgggctcaaacggtggtatcttcggccagatgctactactatattctatgatccaaagagagcagctctggcatctttctttcatttgttgacggccttgatgctgtacagctacttcatacccatttctttgtatatatccattgagatagtcaagatcttgcaagctctatttatcaaccaggatattgaaatgtatcatgaagaatcagataagccaactcatgctcgtacttcgaatctaaatgaagaactaggtatggttgatacaattctatccgataagactggaacattaacatgcaacatgatggagttcatcaagtgttcaattgctggcacagcctatggtaagggcgtcactgaagttgagagagctatggctatgaggaaaggtgacagtttagatgatgacattgaaaatggagactacaaagacaaaaaaaatcacaacagtcccaatgttaaagggttcaatttcaaggatccacgaataatggatgggaattggattcatgagcctaacaaagatatgataagagattttttccggctcctagccatctgccacacatgcattgctgaaatagacgaaaatgagaaggtttcatacgaagctgagtcccctgatgaagctgcatttgttattgcggcaagagaactagggtttgagttttacaagaggtcactggcaactataattattcgtgagcaggatccaagttggaatgttgttgagaaaaggtacagaaagtatgaactcttaaatatattggagttcagtagctcaaggagacggatgtccgtgatagtcaaagaaccagagggaaggatattacttctcagcaagggtgctgataggcttgcaccaaatggaagaaaatatgaagaagaaacaagaagacacataaatgagtattctgactctggtctaagaaccttggttctagcataccgtgtcttagatgagaaagagtacaaggaattcaatgaaaaactgaacactgccaaagcatctgtaagtgctgatagagatgtaaaaattgagcaggctgctgatagcattgaacaggacttgattcttcttggtgctactgcagttgaagataagctccagcaaggggtgcctgaatgcatagacaagcttgcgcaagccggaattaagatatgggtcctgactggcgacaagatggagacagctatcaatattgggtttgcatgtagcctgcttaggcaagacatgacacagataattgtcacactggaacaacctgacatcatcgcgttggagaaagatggtgacaaatataaaatttttaaggcatcaaagaaaaaggttatgagtcagatagaggatggaatcaaacaaattccaccttcaactaaaattagcactgcatcatttgcactaatcattgatggtaaatcaataccttatgctttggaagatgatgtcaagtttaagttcttggatcttgctatcaactgtgcatcagtgatatgttgccgatcttcaccaaaacagaaggcactggtcacaagatttgttaagcaagtaacacataaagtgactttagcaataggtgatggggcaaatgatgttggcatgcttcaagaagctgacataggggttggcatcagtggtgctgaaggaatgcaggctgtcatggctagtgatgttgctgttgcccaattccgctttttggaacggctacttctggtgcatggacattggtgttaccggcgtatttcagtgatgatatgctatttcttctacaagaatgttacttttggtgtcactctctttctctacgaagcatttgcatctttctctgggaagccagcttataatgattggttcttgtcactctataatgtcttcttcacctcccttcctgtcattgctttgggagtctttgaccaggatgtgtctgccaggctatgcatacagtatccacagctataccaagaaggagtgcagaatatattattcagttggtgtcggatacttggctggatgcttaacggtgttatgaatgctgtcttaatatttttcttctgcatcacaacctttgaggaccaggtgttccgccgggatggtcaagttgcaggcttggatgctctaggcgtcgccatgtacacttgtattgtatgggttgtcaactgtcaaatggcgctctctgtgaactacttcaccataatccagcacatattcatatggggcagcattgcagtatggtacctcttcctcatagtttatggttccatgaacccgaggttctcaactacagcctacatggtcttcatcgaacagctggccccagccctctcattttggttggtgacactttttgttgtgctggcaacacttgtcccctacttcacgtatgccgcgatccagatccggtttttcccaatgttccacaacaagattcagtggaagcggtacttggggaaggctgaagacccagaagtggcaaggcagttgtcatcacgacaccggacgtcgtcgcagcagaggatggtcggtatctctgctcgtcgggacggcaaggctatgcaaataacaagggagacagagatagaagttcaggagtagcattgtcagtagattttgcgttttgtacagcttataggatattgtctccggcaggatgacagctgaactgattggaaaccggaatgtttctggattgctgcttctatgatggctgtcatggaagctgatggtagagcaagactacaaattgcttagataggtcacaactcacaaggaggccaagagatcctgttgtaaagttcaattttagcagttcaaggctgtgtttcccccccccccccccctgcttctcttacatcatagatgcttgtaaccagattggtagaatttcgttgtttttattcctctttaccccccttgcctgccccctctcaactgtattttaaacaataatgtaaggcatcttgtttgagtggctttcatgctttattttggaaagaatcataattgag

SEQ ID NO: 34098 - DNA, 1373 bp, Zea Mays
gcgcttttgtggacgacgccgtcgtcgccaggcagcttgcatgtggctctgcgctgcgcccttgtcttcctcttcctccccactccgcatctccagaaaattccgttattttactcccagtatttagcctcgacgattgctcgggactctctttacaggtcctatttcgcggtttcctcatcctcctaatcctaacctccttccctgttttattcttcctcgtcgagcctgattcccctgccgccaccgcggccagcgccgccctcgccgccggtcgccaccgccgccgccaccgtccactcctcgccctcacctaatctcactcggagggagaaaaaaaaaacctcgccctcgccgccgggttgagttgaatctgtggtcgctgggttgaattgaatcgatttagatccgtttatccctagttcgggtgcccgtgttctggaaggtggaagctttggttgggttttctcttccagagcattaatgtttctgagggcctaagatgctctatttgaagcagcccacgaggagctgagtctttgtgttttttttatcgttctctctcgtcgtctgttgatctgatcggatggaggctatgacgggtggcaaattccttcaaaagtttcgactctacgaaaccagatcgaaattttatcttattggaagagacaagagcaggattcactggagggtgctaaaaattgatcggttggagtccactgagctgggtgtcgatgaggatccaactatttacacggaaagtgaatgtcaagaactgctttggcggatccatgaggggaacatgttgactggtggactgaaatttgtcacaaaatgttacggaatagttggttttgtaaagtttcttggtccttattacatggttataataaccagtagaaggaaaatcggcacaatatgcggccatgaaatttattccgtcggcaagagtgaaatgattgcaatttcaagtgttacagtctggcccaacgtggcttattctagggacgagaacagatataagcgccttctttgctcagttgacctttcgaaggatttcttcttcagctactcttacaacatcatgcgcagccttcagaagaacataacccagaagaatactgggcaggctgtttatgaaccaatgtgtgtatggaatgaatttctgacacgagcaattcggaatcatctcaagaatacatgttggactgttgccttagtccatggattttttaaacagtatcatctattcatcattgaagaccacaagtagggctgctgctaactcaatgacacccccactaacttaagtgttttactccgcgtctcatgacctgatatatagtgaaagcttgaaacaagttctaatctat

SEQ ID NO: 34099 - DNA, 5132 bp, Zea Mays
ctcgtctctccgttcggccgtgtccagtctccagtccgcaacggaaggagaggaggcgtcgagggaaaatcgcgccaaccgggccgaacgaatcgtcggaaggccggggaggaggtctagaaggtgtgggaatggcgacggggcttgccttggcggcggcgcctcatgttgcttcggtcacgggatcggggacagtggaggagcaggcggcgggggtcggcatcttgcttcagatatcaatgctcgtgctctcgttcgtgctcgggcatatcctgcgccgccgaaagttctactacatccccgaggccagcggctcactcctgatcgggatgattgttggagggcttgctaacatatcaaacactcagaaaagcatcaggagatggtttaattttcgggaggacttcttccttctctttttactgcctccaattatattatatccttgattgtattctgcttttatttcttattggttcttgtagaattgttcatgttttacttgactgcatcttacccagtccggattcagcttagcaccaaaaccattcttttcgaacttcgatgctatcataacatttgcaatcctgggaaccttcattgcctccattgttacaggtcttttagtctaccttggtggattactatacattgtctacaggctcccactggtggagtgtatgatgtttggtgctcttgtatcagcaactgatcctgtgacagttttgtctatatttcaggagcttggcactgatacaaatctatatgcactggtttttggagaatccgttttaaatgacgctgtagcgatatccttgtacaggtctatggcatctatgaggacgcaccattctggaaaaaactttttccttgtaattctgaggtttcttgaaaattttgttggatcaatgtcatcaggcattggtgttggactaatttccgctctcctcttcaagtatgcagcactgggcgttgagaaccttcacaatctggagagttgcttgtttgtgcttttcccatacttctcgtaagctttatttgaacttcacttatttttatgttttgtttagggctggtttggttgcatgggtttggaggagattgaggggcatataatctctttctaatcaaaaataattagcaaggaattatatgcccttcaatcccctccaatcccaacgcaaccaaacaaacccttaaagatttctgttagttaccgtgatttgtactaggtacatgctagcagaaggcattggtctatctggcattatttctattctcttcacgggtattgtaagttcaactccaataatttgccatatatcttgttttaggatttataagctaaaatttgttactgtattcataaaatgcttctatgtatcttatgagttttggtgctgtatatacaagagttgtaaaggatctttatgtgaaagtgaggaaataaagagggtgtgtgctgatgctacatcttactatcctcatctcttattttttttctcgaacacgcaagagcactgtacatcattatattaagagaaagaaagcaaaaataattacaaggaggccatgcggagcaaggccggacagaaaaataaaaaccacccaacacgggaccaaaaaaggagaaaggaagaaataactacttcgatccaggtgcccaaagggcttcagcgatactaagcctgccaaggtgctttgccccagccataacccaacagcctaattcattaaggaaacaatgctgcgccttggaaatagaaggtgaatccctctcaaaaacagccatgtttctttgcaaccaagggcatcaggctccaaggatgatagtgcaattaaggcctttccttttatccttgatgaccctgcaattcatgtctcgccatcattctgcaaaggaagaggcagaagaggagggagcaagatgccccaaaccatagggggagagaatactaaaccaaaattgcctggcaaaaacgcaggaggttaagatgtgttgcactgtttcctgggcttggtcacatgaagggcaaacagcagggtgaggcagccccctcttttgcaatctatcggcagtccaaactctgtcccgaattgccagccataagaagaacttgcatttggggtgcccaagacttccacaacctcttccaaggttcaaacgctatagaacctgcgaagagggccttataagaggatttagccgaatagatacctgaggtttcatgcctccaagagtgtatatcatccccatccttcagaaccacctcattaaccatatcccacataaggtattgttgtaaaccaaccaaagataggggaggtttgaaatccctcacccaagagctgttatcaagggcctgagccattgtcctagtgtacacgactttcttatgcaccttccgataaacttctaaagcgacctaaaaaacggagcacccctctaaccagcgatcagaccaaaacaacgtgtttgcaccatttcccacagctgtaactactgagatgtcaacaaactttctggcctgcggttgtatgggaagatccagacccctccatgacctgctagcatcagtcttctgcaaccatagccacctagcttgcagagcccatccctgtaatttaaggttaggtattccaagccctctgaggtttagaggccttgttaccacctcctagggcaccaaacaactgtcacccttcacatccttccttcccttccaaaggaaaccccttctaaccttgtcaattgctttgatcacccatctcgggacactcatggcaataaggagataaaccagaatggcaaagagcacaaaacgaaccaccgcagttctacctgccaagttaaggagggaggccttccaaaaagggaaacgatccgctatcttttcaacccaaatcatgagggtattctttgacagtttttgatggatttgggcagccccaaataggtgcagggaaaggttgcaacagcacattgcagcaaggaacaactttcctggacaacctgatcttcacaagcaatcggaatgaaataactctttctttgaagtgaaagatcttggagctcttcgatattttcttgggattgagattgattggtcgtcaaagtgaattgtcctatctcaaagaaatataccctttatatattgacagaaacatgtatgcttgggtgttgtccatatagttcccctactgatagagaccaccaaacttgtgcccaattaggtgatccagccaacaaagaaacatatcaaagattggttggacgattgatatacttatgtcatacaaggcctgatatctcctatgcagtgagtgtggtgagcaggtatatgaagattatggttcaaaaagaatggccacttggactttgaaggatattgtgatgcagattgggcgaatagcatagatgataggtctacatcttgatattgtgtatttgtaggaagaaatctcgtctcatagcgaagtaacaagcaagaagcaaattcgtagtggctcggtctactgcagaggctgagtacagggcaatagtgttgagcctatgtgagatgatgtagttaaaggtctcgctaggtgagttacgggtgttgaggaatgagactgatgtttcactgtgacaacattgcggcgatcaatattacaagcaatactgttcaattttatcacacaaagcatgtggagcttgataggttcttcattaaggagaagctagtagggtcttaaggctagagtacattaagtctcgtagccagctagctgactgcttcacaaaagatctaggtcctaaagagaagtcaagttgtaacaagatggacatgagaaatatttttggcctatcttgagagggagtgttggtataaatacaagagttctaaatgaccattatgtggaagtgaggaaataaagagtgtgtgtgtgctgggggatgcaacacaccaaaaaaacccaaacctcaataaatttgtagccgcaaacttcaagttcgtcaacctaaattgcttactaaaagaatttttacttccaggtgatgaagagatacacattctctaacttatcagatgattctcagcgttttacagctcgcttttttcaccttctttcttcactagcagaagctttcgtgttcatatacatgggatttgatattgcgatagaacgtcaaagctggtcacatattggattcatatttttctcaattatcttcatactagttgcaagggctgcaaatgtcttctcttgtgcatacatactgaatttggcacgacctccacattgccaaatacctaggcaatatcagcaggctctttggtatagtgggcttagaggagctatggcttttgccctcgctcttcagtctgttcatgatcttccggatggacatggcgagacaatttttactgctaccacatctattgttgttctaactgtactccttattggtggctcaactggaacaatgcttgaggccctacaggtagttggggacagcaaccgttattgccaactgtatgagctgcaggagagttctaatggcaacgacactggttacacgggacaaaattatgatgaaggagcatccacttcaagcaaattcagatctaaacttagagatctaaggagaagcacctcgtctttcgctttactggacagaaattaccttactcctattttcacttcgcaaaacggcgactgcaatgataacactacagaaagtcccaatgaagaattgacgatattcagaggacctggggatttggaggtacatgattgatgactgcagatatgaagtgcttatcttccatgaatctacacgatactccttgtaccttcctcggcgacccaaagtggaaagtgcaaccagacattcggccatagcattgccatattattaatctataaacattagttagctaggatagttcaacgtaagtctttgtacgtagaatataggtgtaatttatcagccttgaaattctgttctgatccgtttcagaaactttgtgcgtacggacgcatctgccttcttgtgcacctgcaacactcgtaggttccttgaaatgccttcttgtgcacctgcaacagtgcaggttcctccaaattgaactcgcccagatttccgg

SEQ ID NO: 34100 - DNA, 2794 bp, Zea Mays
ttcctggggaattccggtattttccatcaaattctggtaaagcatcctgggctcctggcggttagccaagaattccatcaattgctctatacacgacgtcgtcgacgtgtaatgtaaagctacagcggttcaacttcgacggcggccccagcctcgctacactgtcgctatccattttccccgtcacgagctgccatgagcaattaagtcttcttcacttcctggttcccagtattggtcgaggcgatctgacggagggagcagccaagtcagcaagtaccgcagcaccaagcagtcgaacagcgccgaagatgccagggctcgccgcgtcggcgtccgcagctccggcgccgttctcgttggcgacctcgcgcttaaccccggttgcaagacctgctccaagtttcagaacgcaagcttgtggattgaggtgctggattgctgcaaagctgaaactccgcaaggcattgaaaaggcatcacggatggcaacttcaaagaaatctagatgctcgagggaatgataacgttccagattgcttggaggctgcatctctgactgaaaagagaagtcattggaacatgcatcttgcttatggttgtcactctattgggaaatccgttgtcttgagtccgttactttgcatgtgcagatgtgcttatcacagttgtcattattgtcttaatgccttatgatttcgtcagtgctgctgacactggattgcttcatacttttgatagttacattcaatttgcattagcattataagcaaaaaaatgctcaagagaaactttcttcgtcatattatcttacaactactttttactgcaaacttcttggcaatttttgtctttatgctttcatgttgccctgactgtttcccctttatgcagattctggaggtgaaatggccaacacaagctctgatactttggatagttcaactgttcaggaaaaaccagtggttccgggacacatcatctctgaaatcagttctcatgttcaaaaggaagagtctgctgtgtccaaaagacgctctaacaatgaaccatctctttgcattgctgtaattggagctactggtgagctggcaagaactaaagtttttccagcattatttgctctgtattacagtggttttcttcctcggaatgttggtatatttgggtattctaggaagaaattgacagatgagggcttaagatctataattgaagccaatttgacctgccgggtggatcaccatgaaaattgtgatgacaagctaattgagttcctcaaaaagacgtattatgtagatgccggacatgacaaccaagaagggatggttagattaaattctaggatgtcacaaatagagggcattggtgctgcaaacagaatattctaccttgctgttccacaagaggcactccttgatgtagcattgccactggctgacggtgcccaaactaagcaaggctggaatagaataattatcgagaaaccatttggctttactggtttgtcctcactgcgggtaacacaatctatgctgtcaaggtttgaggagaagcaaatttacaggattgaccaccttctggggaaggatctgatcgaaaatcttactgtcttgagattttctaacttggtgtttgaacctttgtggagtcgaacttacatacggaatgtgcaggtcattttttctgaagaaacatcaaatgaaatacaagggaggtactttggaaattatgggataatccgtgacatagttcacagccacattcttcaaacaatagctctatttgctatggaaccacctgtaagtcttgatggagaggatatccgagatgaaaaggtgaaggttctcagatcaattcggaaagtgaaccttgatgatgttgttcttggtcaacttaaagatatgtctggtaaagttgacagatacacaaaatccatgataccaacctattttgctgctgctatgtacattgacaatgcacgctgggatggggtaccattttttatcaggacaggcatgggacttatgacgaatagagcagaaattcgaattcagtttcgccatgtccctggtaatatctaccgtgaacgctttggccatgacatagatctcgacacaaacgagctggttctacgcgatcaacctgaagaagcaatcctgttgaaagtcaacaacaaggtcccagggcttgggctccagctggatgcttcagaactgaacctgctttaccgggataggtacaacaccgaggtaccagattcgtatgaacatcttctactggacgtgctagatggagatagtcatttattcatgcgcagcgacgaactggctgccgcatggaatgtgctcactccgataatccatgagatagatcagaacagagtagttcctgagctctacgaggctggggacagagggcctatcaatgcttaccatctcgctgctaaacatggggtgcgatgggatgacgactggtgagtcgatacatggcaaagattctcgatgcgcaacgagattcattaccaatttttgtcgttgtatcgcagtcagatgtacaatatgccttctgtaatcggcctgatcaaggactttcaaggagacatgcctttcaaggagatatgcaaacatggtttctttcctgtcctgtagactgtagcactgttgattcaagttggaaaaagaaaaaaaggagaaaagaaaatatgcttgcgacaagccgaggccccatgtcttgtgcgtttagcatctcgtttgccacaagtatggcagtgtttggaaaatggcaatgaaaag

SEQ ID NO: 34101 - DNA, 1967 bp, Zea Mays
tgatcatataagaagcaagcctgtacgccaagatctggaatggttattctacttcaactttcacagaaattagcataaaaaggaaaaaaataaacatggcttcaagctgtaaaatagggcctgttacactgtttggaacagctccagctccaagatccatacaggatttgctacttgtcggataaaataaagcggtttaaacatatgtatttatcacaaggaaatatcgccaaaaatatcattagccactcatcagatagaaaccgtcattaaccatcttcataaacatattactgcgctgtaagaccaattaaaacagcacatttagaactttcctgacagataatgccagaatctgttaccttgagccattcagattcctctcatagccatcaccgctaataactttggttattccatcatgtaaattgtgcttccagatctggtgttgcccagccattgcaatatacacggcctcctctgcgggatcgtagcatacatcccatggtgaatttaggacctgcatgaacactttccagtcaattgttgttccatctaccataaacaatgatatgataaagccaagggtgctgaattaatccactaatccagacatacaggtgaagcaatactgaattacatagtcattgaccacctcagttttcagataaatgctgactcaccccccccccccaaacatattccctttcttgcatgcatggtcatttgcctcttatttcatctaaatataagatggtgtggtatggtgttggttgatgaattgaacctgatacatattccttgtgtgttgtggctagaaaaccataatgtacttttacaatgttatgataaattaagaacttgaatttatagtttaaagtataaatagttttgaagactgttattgatgcttttcatggctcatgggccgtacgtattagcatactaagcataggcacccaaagatatcccaacagctggctaaatgggggtgtaccagctgttaagggttagggagattagcttaaatataggagattggttagatgtattaggcggcaggactatataagccgcatagaggaggagagggtaagcagaattaggaatcttagtccagagcctccaagggagggcggacagatttatctaataaaatgtcttcagttcggagccccccaacaaagacagattgctagaatgaacgtcactctctagttaactatcccaacttctcatgatatggagtcagttgatgcagcatgatgccatctaagtatatctatttggttggaaacaagtgtagggtgcattgcagttgataaaatacatctaaatttattcaacgtaaagtatgttacagaacataagttatacggttgacatcctacacacaggttattcgaatttgtaaagggttatgtatgttgtaaacaaataagtcaatgaatcatggatattgaccatataaggcatctctaactactagtaccagactaccagagtatttgcatgtgtttgtggataacctcgaccacaagagggtttcattgataatatgagcagaaatcatgtctttatacagatcagcaatattgtggctatacttatctgatatatcatgttcaaatatcaaatctaataggctggttgctggactatgctccttgcagtcaagacaagctattgatacttgcagctagtttccaacaaaatttcatgttcctctaacagccacaaatgccacttgagggtgaaccaaaacagtgttaggaacaatctatgtagcttatagaagttgtatgcagaagtcttttgtttctggtatgatgattccagagtagctagggaaaaaatgtcagagcctgcctggtttgttccttgtcctcctcctctgtaatcagatcctttcgtcccatttccagctagtgttctcacagtctcgtccacaaaattaatttctctaa

SEQ ID NO: 34102 - DNA, 2470 bp, Zea Mays
cccggactcccagactcctcccaaaaccctcgcatcctctcccacgcatgtcacaatcgccatgaccgacagaaaccccgccgccgcctcaagcaagcgtcactgtgacctctccctcgacgatcccacgccgtcggccaagctccagcggtgctccgagccgtcagaaccaacgccggcggggaaaccgaacggcggcgcggcgacgggagaggagagcgagatgatggccggcgcacggaaccctagggcgcagaggtacctggtcgccgtggagtacattggcacccgcttctccggctcacagaagcagcccaaccagcgcaccgtcactggggtcctcgaggaggcatttcaccgatttattgggcagccagtttcaataatcttttctagccgaacggatgcaggtgttcatgctttatcaaatgtttgtcatgttgatgttgagcggataagtaaaaggaagcctggcgaagttgtctgtacacaaaactcattttttttcttaacactgattaccgaccaggccttgtctacatctcttgacactctaaacttatttctttttttgatctttgcatgataagtatatttgtgacagttgttgttatgcctgatttaaatcttctaggttttccaaaataaaattctacaagcaatagaattaccttttctcctgaccttgcctctaaatcatctattttgtccgttccaaatcataattcactttagctttgccttaagtcatatttaaccaagtttaaataaaaatgcaccaacatctacaacatcaattagtttcattaaatttctatatgaaatgtcttgatagttcacaaaatgttgatgtcgttgaagacctggcggctggcgccactgctgaaacaagtcgctgtagtctgggcgtctggattgatgtattttggtgggagagttgtttggtaggttttgaactgtttgttgtgagtgttgttagtagttgagagtgattgttggtagttaaactatcacaatgttgattgtaagctggtaacatcagcagtggatatttgactattggtaagctttctaataaagctgggtgaatgcttttgatctaaaaaatgtcttgatagtgcacttgattggactttaagattttaatatgtttttattcctaaaaacttgttcagttagaggcatttgacttagaaccaaactaaagtgtcctataatttgtaaaagaggaaataaataaaaatatgttttctagaacagcgcctcttataactcctgctgctgatttgcttttccctttttacagttaacacctcatgagcctggagttgtaaaacgtgctgtgaaccactttctactgatatcactatcgcttgcttgctggacctgaatcaacatctgtttttgagaaaaactctgtttggcatatatctgaagatttggatattcagtcaatgaagaaagcatgcagcatacttgttgggcatcatgatttcagttcatttcgagcggctggatgtcaggcaaactctccagtgcgaactctggatgaacttagtgttacagaagtattccctttcatgttttttccttcaagtgtagaaagatcagagttggaattatcaaatgtctctcttgtttattcaaggaaaccagacatggaatcttctgggaaaggatctgatggttcctgtaccagtagtgtgaaatcagattttgagaatggaaaagattttggaaagcggtcaaggcaccgttgctttgttgttactgcaagggcacggtcttttctttaccaccaggtaaggttgatggtcggtcttctaaaatctgttgggactggagatctaacaactgcagatgttgagagaattctggatgcaaagacggttactgctgcacccagtatggcaccttcttgtggtctgtaccttgctaacgttaaatatgatctgaatacctgaagacaagttttatctagtggcttctgttggtgggcctccagattttgtcagctgttggctatcaaaggaattatatgctgccacttgccaaagctttcagttgcctgttttgtccactgaatcttgcatggtgattgaaaacctagaattaagtttatctgtcagcacaagagccggcttcattctcttcttgtacacagagctcttctgcatgttcagaaacaaaataggtagcttcattttagttaagttcaactatccactctttaaatttcagctggatccacccgattttgttgggtgtacgtagatttgacctggtaggggcaaaattttatttcttggttttctcatgactgtacttggttcttgatatataattaattagccaaatgcgttgtgtgcatattgaaaatattcttttctgttccttgataaattacatcgagcaagactgcaagagaactttcttcaagaaaatattcttttctgttccttgataaatt

SEQ ID NO: 34103 - DNA, 864 bp, Zea Mays
tgtataaaaagccagcatgagctaggtgtggggagcacagcaaaaattagcatagttagtcactatatctagctagcgaaagactcgagagaggaaagcaattcacaatcgcggatgcttccgccccacctaatatctgctcgtataggcaacttgtgagcatgattttcggcggccataattattttcgatggtcaaagctcggccgccataaataaccttattttcggtggctagtgacacggccaccggaaataactgacacgatcataaaaaataactgtttattttcgccggttgtgccctgttcgctgaaaatacgtctttttaaaatgcggtcgcctttctttctttctctttcttccccgtttcttcctctgctcgacgctgcgcgccccctacgaccaagcgccgccctcggcacccgtcgcccgaccgccgccgagccctcctcctaccaccgttccgccgccgccgtcgagcccatctccatgaaaagtattacagttgcttcgttaccagaaaagctttgatataaatcaagggaagtacgatgaagcaagcttcgtcacgatgaagcaggaaggcggcgtagggagaaggtgttgttcaagttgttgagtgcaaatgacaatactgtccctgtgacatttgtaaaccattgtatgtaaagggtatgaatgtaataacgtacgaagttgtacgattgcctataaataggtgaatagtaccattactattcacgctggattgtaattgtactcacgtcgttaccttcaagcaagtcgaatgtatcaatacaatacaaactttgatagtatcaatatattcattatgatataaatatatgatataatattgcat

SEQ ID NO: 34104 - DNA, 830 bp, Zea Mays
tcaactaacaccaacagtgacaaggaccattatcatagaagatctcaggaaacaggatttgaatgtactatcacaatagcagaaataccagctgaacacaaatggtggtttccatcttgcacaaaatgcaataaagcaacaatccctcacactacaggttatcactgtgaatcatgcaattgggatggatacaaatttaaatacaagctcaaattcctggcatctgatgaaacagatattgcagaaatgttttgttttgacactgtagcaaggcacatcgttgttgcccaaacgtgttccgcattaattctattgttgctgcacatgggagacaacgttctttaccaatgcaaataggaatttctgatcaacaaggaccatcaacacctcaaaacaaatcaaaaccgatgttattggaagactctccatctacaactttggaaaaattatctactacaactcctacaactgtagtaaggaagcttctatattccgaaactgacaacacgccgaaaacgcactcaatttcttttactcaattatcttttattcattttaagatttagtgagtattgacagttaaaaatacttatatttgttccatgttgacagtgcaaacaagagtaatatcaatagcccagaaaaagatgatggcgataaggaaaccgcacagcttgatacaatacccactaacaaaggaaaaggaccagcagatacaattgaatcgccacctaaaaggttcaaacaagggacgatacgcatcggaaaagaaatggacatcaaatcctccgagaactaaagtttcactcagatcttcgtcgaccttttga

SEQ ID NO: 34105 - DNA, 3943 bp, Zea Mays
ctctcggccgccatcatggaaggtccgaccccgccatcgctgtccccacgcggttgctccaaggaaggaaactctgatcccgctatccccgcccccgctctctctcgccatctccgtgcggctgctccaaggaaggaaggtccgaccccgccatcgccatccccgcgtggctgccttcccctctcgccatccccgcgcggctgctccaaggaaggaaggtccgaccccgccatcgccatccccgcgcgcccggtcgagcgccaccagccgcataagtctgggctagcgccgccggccaccattggctcggtcgagcacctcatgcccacgacggtcagtcgccgccttcatggctcagagtcgtcggtccctgcccaccaaggtcaccatgggctcgacgacgatggcaacaaggtcaaggtcgtcatcacaacccaaggtagtagctcttcagttcccccgccattccccaccacccctccaccgtctccaccgcacacagcatgcccgactctattctcctccccgaaatccccgtggcgcgcagatctagccccggctcctcgccggcacaaaccacgtgcgcgccctcgacccatggcatccccaaatcccgcccccggttcctctcccttcccgttcgcggacgacgcttccgcgcgttgacgtacgcgtccccaaatccccggttcccctcccttcctgttcgcggatggcgcttccgagccctcgacccatggcgtccccaaatcccaggttcctctcccttcccgttcgcggacggcgcttccgcgcgtcgacgttcgtgtccccaattcctgccccggttcggcgcttccccacatcgaggcaccacaccatcgccatggggtatcgacaacgtcgacagcgtgtggccccatcgttcgcagaccaacccggccacggttgccctgctgctgacggataaggacctggagtcggaggagagcatgtacgagcggtggagcagcgtgcacaccgtgtcgcgggacctcacggagaagcagagcaggttcgaggcgttcaaggcgaactctaggcacatcggcgagttcaacaagatgaaagacgttccctacaagctcggcctcaacaagaacaaaaggaaagttgagaagattgaaaatgactatgccaaatgcaagttcgttgcccaatgttttatatatggtgatagtttcagctctggaatttagctgaagttgaatgcttcatatgtttagactgaaattttggtactaaactggtagattattgttatttaaatatataaaaaaaatcatcttctacgattcagagaaattatgtgaagcttcaatttgactccatgcaacaggtttagctattgacaacctcgattacattttcacagtgggagctccttcgattattaaccacagttgtgtaccaaatgcagttttgatatttgatggtaggacagcatatgttcgtgcattgcaaccgataaataaagatgaagaggtatctataagctacattgagactgcggcagtcaccaagaagagaaacaatgatctgaaacagtacttcttcacctgcacatgtccacgctgtgtaaagggttttgatgaggatgcactacttgaggggttcaggtgcaagagccaagcatgtgatggctttctgctgcccaactcaggtaaaaaggcttatacatgccaaaaatgtggtgcttctagagatgtggaagagataaaaaatatgagaagcaaaatactacagttatcggataaagcatcttcatttctttcatcaggaaataaggctgaagcaggttctatctacaagataatcaaacagttagagagaaatctgtaccatgctttctcaactactttgctgcacacgtgcgaaacactattgaagatatatctggaattacaagattggtggactgcgttgacatactgtagattgacaattcctgtttatgaaagagtttatccaccttttcatccgatgattggattacaattctatacttgtggaaagcttgaatgggactggttcggagggagacggcccctcactctctgccctcctgctgcctgcctactgctatactgttctcttgtgttcatgttcatataaaattcagtttcatgttcatattttcataactgtatatgttcatcttatcatacagtttgggtccttgaactttggaacactgaatccctactactctccccccataaagataggaaggaacacaaaagggtcaaatcaatacccttatgtctccccttctggaccaggctccgccgccggtgccgtggcctgcatcgcatgcccgacgctctacgcctacctgaagaagacagaccccggagtgcccgcgcagctgctggagtacgacgagcggttcgggcagtacggctgcgacttcaccttctacgactacaaccgaccggaggagctgccggcggcgatgaagcacgcctaccgagtcatcgttgccgaccctccctatctggtactgtttctaccctaccagagattgcctattaaaaagtgtttgatcagttcttaacatttgagatgagaggaaatatcgaggagaaatggctattattcattggttgatgatgtagagtaaggagtgcttggaaaaggttgccaaaacagtatctttcctcgcacgacctgaaggttcattcctgctgctgctcacaggggaagttcggatggaccgggcattggagctgctgaatgttcgtccctgcggtttcaggcctcgccactcgaacaaactaggcaacgagttccggctgttcacgaattaagatcctgctgacagacttggtggttgggagcaaagtgatggtgcccccatttaactataaactaatacaatttttgttctagagctgttccatctttatgaacatgttgcatctttgatccacagctcactgatccctccaatttaaattgtagtgacaattatttgaggaatctgtgtgctatgatgtatgattaatcaaacatttacactgttagtgtacctcattttaatttcattttaaaatacactgttagtgtatgtttcattttaatttcatcagtattctttagaatgtctcgttggcttattcagatttatagccaaaatgacattatcttggggatagttcatcagtattttttaatttcattatctcgttcggcggcggcatcccggacgggcacagcctgcacactggcgggcaggtcgtgaaggcacccaccatcgagcagaacctgtcgtgcaaccttgagtagctgtacaagggcatcaccaagaagttgaatatttctagggaaattgttgacgcaagtggctaaccagatggaccagtccctgtcagatttatgcttggttaatttctgctcgcccggtgcaggcgacgcttctccttcagacgctcaaccagtcaagaaggagtccgagagccaggcatggctcggattaggaccgaatgccgtcaagtccaacctgaacctgagctagcacacaacgacacagccaaataagacagcacagcaacctcaccaaagcctttgcaggacgatctgaaaatatgctttgccactagagtaccgaaaccataaatatcctctcgttatcgtgttttagtgttctgtttaggccgtggtcctacgccctcttgtcacatagtctggatgtaaagataagtagccagccatgactgagagaagttttttgggggggggggtgttaacacacggccactctgaattggccatgctaaggaaaatgatagtagtgcaaagagaagtatatgtcttttttctttttctttttctgaaagccagatcgtttggctctagccttgatgtatgcagaacaagtgattgtaatggattctgagtatcctcatcgtcttgctgttgcttc

SEQ ID NO: 34106 - DNA, 743 bp, Zea Mays
atcaattcttacagtgaagcttatgtaaatggttgctcgtggtgataacactggggaatcaattcctatgctcctaaggataccccgcttctttgatccatggggtggttatgatatgataggctttggtgacattatcttccctggattgcttgttggattcagctatagatttgacagagcaaacagaaagggtgtcttgagtggatattttctctggctaattgtgggatatgcagttggccttttcattacgtatcttgcgctgttcttgatggacgggcatggtcaacctgcgttgttgtaccttgtgccatgtacattgggggttattgttattcttggttggttaagaggtgagctttatgaattatggaacttcggaaaaagtccaggagaaaattttgtcaatgaaccatgacaacaaaatccagggaagatgtattcttcagcgtagtagatagcttgaggatgtttattaggaggcaccgtgtattgcaagatgttatgtttagcattatttcaaagaaggatgctattgtgtttgaaaaaaatgatatacatgtaagatgcaagcatgtactcccacagtcgtaaaataatccaatataagtgccgctatatagttccaaaataagtgtcactagggttggaaacgagttgagcctgacttggctcggtcaatttggatatgtttggttgcctggtctagtgcacgaccaggcccatttgaaaaggtcgac

SEQ ID NO: 34107 - DNA, 3089 bp, Zea Mays
atggatcccgcgcccgatcagctctctatctccgcctctgccccgttccccaccatcccggctgcctcaagccccaggccccgcgccgcgaggacgcggcgccatgccgcgcccttccggtcggaccaccccaccgccgggagctggcgctccgggatcgatctcccgcgccgtccttcggcctccgccttttcccagcaggagcgttatccttccgtggcctcctggagcgcctctcgcgacgccaactttgtgttcgggagcggcgtggccggtgcgccggagatgaggaggagcttctcgtctggatccggatgcaaagcatgtgtttggttcaagtgacaatgatcttccaggttcggaaccttgtgaaatttctaccacggtggaaacaccggatactataacctctagctttggatctgaagatgggatcgtgacggtttcttccataaaggtgccttgcaatattgaagtagtaccagcctcagaacttgttgaatgtcagccatttgatgagaaatctttcacctttgacgaccaaaatgtaccatataggaacaaaggaggggttaagggtatgggcatgaacagaggagcttttatgccaaataagtcctcagcaaaccaagcttcttttgaatcagtctcaagaagcgggcattgttctaaaaaagtgtctcctgaagaaaagttaaatttgaaagaagccagtagctctttgcaaacaacagaaagtgggcatgctgaagcagagtttacgtctgcagcaaatacggaacattctggtcaatccgatttcatattttctgcatcaactttccatcaaagcatgttgcacccgcaaagacgacataacaagaaaaaaagtggaggaatgggtaatcatgctagctctattcaaagtctcccttcatccgccattggactcgcatgctcagaagtctcaggaagtcagcaatgtgtggatttagctgccaagtggactgaatacaacaaaatagaacctaacagggttgcaatcagcagaggagccagatgctcaacatcagaaaactttggagaccatgacaattgtgaaacatggcgattaaggggaaaccaagcatatgcagaaggattgttaactaaggctgaagaatgctatacccatgggattgattctttttctccaaatgaagtttcaagaaaagcattaatgctgtgctacagcaatcgagcagctactcggatgtctctgggtaagatgagagatgccctatctgattgtcaagaagccattgatattgattccagttttctcaaggcacacgccagagccgccaactgcctacttgccctgggggatgttgaagaagcacaaaaggcttttgagatgtgtttaaagtctaatcatctatcaagcttggaccataaaattgtagaagaggcttctgatggtctacaaaaagctaagaaaatatctggtttaattagtcattctgaggagtatcttataaagaaagcatttgacaagatacccagtgccttacaaatgatctctgatgctttgtccataagtatttattcagataagttaatggagatgaaagcagaagcactgttactgttgcagcgatatgaagaagtaattcggttttgcgaagaaactctttatgtagcagaaagaaatagtgtgtgtttgtgtcttgacaagcagtcagaaagcaataacatggtcaacaatacttgctttgtgaaattgtggcgttatcatcttattgctaagtcatatttcttccttggaaagcttgaagaggctaaccagttcttaaagaagaatgatcaaataaaagtcatggggtgcaggtgtgggaatcaatctcaggactcaattttatcattctccatggctatctctgaactattgcggcttaaagctgctggcaatgaagcattccaatctggtaaatatttggaggctgtggaacattatactgctgctttgatgagcaatagcgagtccctacgctttttagcagtctgcttttgtaaccgtgcagcagcatatcaagcaatgggtcaaattttagatgcaattgcagattgttcactggctatagcccttgatgcagattatgctaaggctatttccagaaggtctagtttgtatgaacttataagggactatggccaggcagcaaatgatctccgtaggttgattgctcttcttgagaaacaactgcaagaagatatgaccatgccagtagagaggtctgagagtattcgtaacaatctgaatcgagccaatcttcggttttcttctttggagcgggatgccagaaaaggggcttcattaaatatgtatttgatattaggaattgagtcttcttcctctgctgtggatataaagaaggcctaccgcaaagcagcactaagacatcatccagacaaagccagtaactttcttgtcagaagtgaaaatatcagtgatgctgtatggagagatataacaaatgaaatacgcagggatgctgattatttattcaaaataattgggaaggcatatgctatgctttcagaccctacaacgagaagggaatgataacctggaggtggagtgatagaaaagcagtgcacatgtaacatgagcagcgggagcaatgaaaatgatgacaggacctcttagtgagagcatttaatcatgaagttggtaccgcacaaagctaccatactggagaggtcctatgtgaaattttgtgtgctctcaccaacgatatgatgccactggtgttgtccaatacctaatcacaaatgtcagtcggaacatgtcccacttttctgactgagtgctaataccgttacccccggggagcagtggatctttgtgttcatgcctgatcactgtttcgtgttctctgatgttccatttggatatgcagattgcatgagtctgagcacccgtgcaaaaggctagtttttttgtttgtgaagttgatgtcaatatatcaggtgctgtgcatagtagcttggagcagttcgagtggaatcaacaagagtggatagtgtaaatagaggtacacgtttcttgtacaccccctcactccaca

SEQ ID NO: 34108 - DNA, 1749 bp, Zea Mays
ttcccacactccccatccccgattcccagcttccccaaggatgctcttcctgcacaccatcaccctgctgcaggcgccatcaccaccaccctcacttccacaaattatccttccctaccaccagcataaccctaggaggacggcgcccaaacgccgggatgcacaacaggaaagcatacaaccgaaaaaccaatcacaaaagctgtttcatctaaccgtacaaaggcaacaccgatccagtcctctaagcagggtgtgggagttgatgtgtgtgcaaggtgtcgtcaaggtttcttttgctccgatcatggatcacagcccaagccacaaaagccagctgctaccgacgatacaaacaaggaacctgttgagaaatcagctgttccaccgcccaagaaaaggatcgatgtaaatgagctgaggacatgtaaaaataaaggatgtggtaaatcctacaaggagaaggataaccatgattctgcatgtgactaccatccaggtcctgccgttttccatgacaggatgagagggtggaaatgctgtgatgttcatgtcaaggagtttgacgagtttatggagatacctacatgcacaaagggttggcataatgctgatgcggtgtgaattcacgccatgcttaaggctgttttcatgttgtatcgtcacctgccatgtaaacaccatttctgcagtttattgaggatttcatttggaagtgtgacaagagctttgaggatgggctccgggctgcgggctgcctaagctttgcgcacggtagctgtctggaaatcttacgtgattctccttgtactctggaccacatttggtgtctggattcaaattggggttttgtctgtttgaagccgaaggatgccaatattttaaccatgtctaagccagagaagttagcgcatgctgtggagcggtagaggtgccgtgtttcttgtgtgtgttccatggctgctggagaagtcctgtccgtgtactggtttgctcggtttgagcaggcaaaagcctggaccatgcatcactagtttgttctaccgctcctcactccccagaccagaaagttgttgccaatctacaatataatgaaaacttagctgcactcttggaaagagaaaagcacaatctcttgatttattggatgctgttttggcgtgcatacactagcattatcattatgtcatggatacatggacatgggattcaaatgtaagtagtactggtagtgctttggacacggcagcgttcaggttcaagggatgccgatgatcgggatgaacgggaagaagaagaagaagggaggcagtcctccaaaactgaagggcggcctgttgcctccacgggacggtggagtccacgccggcgtccgtgccgccggtggcgtcggccttagcgctggctccatcggggcgttaccaccctggtgttcacggtcggccatggtcgcagcgacagcggagccgccgctagccgcagcgcacctcgtgaagaaggcgaggcgggagcccagaacataggaggcggggtaggaggcggagccaggcccccgggccgggacgacgcgcgcgaccgtgagtccccacggcgcgcagagctgctccgtggcgccgaggaccctggccgcgcacggcgcgcccgaggctgacgcttctgctggcacggccacgtcgaagttgccgcgcccgtcggtctgcgctgcgtggaggcccgcgctgccgtcgccgtcgccggcgcatttcaccg

SEQ ID NO: 34109 - DNA, 3340 bp, Zea Mays
ctcgtccgctttgtcggaaccgttgctggtggctccggggttctgcgactgcgcatagggaatggcgatggcggcggcggttttggaggaggcgctgcgatggggtggaggaagcgttggggacgacaacgtggccgcgcgcagggcagaggaggccgcgataagaaggcatgaagcagccagttggttgcgaaaaacggttgggatagtgtgtgcaaaggacctgccggaagagccctctgaggaggaattccagcttggtctgagaaatggcattgtcctctgcaacgcactgaataaggtccagccaggcgccatacccaagattgtcggagtccagtcagatactgcggtccctgcagatggctcagctttgtgtgcttatcagtacttcgaaaatctgcgaaacttcgttgtcgttatacaagattttggcctcccaacatttgaggtgtctgatttggaaaagggtggcaaaagtgttcgaattgtggactgtgttcttgctctgaagtcattcagtgaaagtaagaaaacagggagacaagctgcatgtaaatatggtggcattttgaagcctttggtttccggaaattatttcatacttaagaattgtgatgcttttatgaataaaaatgcgagaattcacacagaagaggctaccctgaatggttttcgaggagagcaaaacttatctcttgattgttctccagaatcctatgaggtaattacttcagacaaccttagcacgattattcgcacaattctcttagataaaaaaccagaagaaatcccactgattgttgaatcactactaaacaaagttattcaggaatacgagcttcgctttgcaaatcagaacttgatggatgaagagaagcaaaataacttgactacgaaggaggaagccagttttgcagtaaatggtagtaatgcagctcaaaagttccatctgaaggctgaaataaattttgatctacagcacaaacagatcaaggggttgagaggtactgtttcttctatcaagtctggaatggaacaactgaaattgcactactctgaggagttcactaaacttgggaagcatttgtacactatatccaatgctgcttctggataccataaagttcttgaggaaaatcgcaagctgtacaaccagatacaggatcttaaaggaaatattagagtttattgtcgagtgaggcctttcctacctgggcaaataagttccttaagcagtgttgctggaatggaagaaagaaccattacaataatgactcctacaaaatatggaaaagatggaaacaaatctttcactttcaacaaagtctttggtccagcagccactcaagatgaggtcttttcagatatgcaaccattgatacgatcagttcttgatggttttaatgtctgtatatttgcatatggccaaacaggatctgggaagacttatacaatgagcggacctaaagttttaacagaggaaagcctaggtgtcaactataaagcattaaatgacttatttaatcttcaagcacagagaaaggggacaatagattatgatatttctgtacagatgattgagatatacaatgaacaaaaaggacttgcggttccagatgcaagcatagttcctgtcacatctacgtctgatgttgttgaactgatgaatcaaggccaaaagaatcgtgcagtgggttcaacagccataaatgaccgcagtagccgctcccacagttgcttgactgttcatgtgcaaggaagagatttgacatctgggacagttttaagaggttgcatgcatctggtcgatctagcaggcagtgaaagggttgataagtccgaggttgttggagatagactaaaggaggctcagtacataaacaagtcactttcagcactgggagatgtgattgcatccctttcccaaaagaacacacatgtaccttaccgaaacagcaagctcacccagctcttgcaagattcacttgggggacaagcaaaaacacttatgtttgttcacataagcccagaacttgacgctgctggtgagaccataagcaccttgaaattcgctgaacgtgttgcctccgttgaacttggtgcagccaagcaaaataaagaaggcagcgagattagagagctcaaagaacagattgcttccctcaaggctgcattggctaagaaggaaggagaaccagagaacattctaagcacacggtcaagcccaagcatatacagaattagaaaaggcaatgcaacacctgcaactcctaaagacaggcagccaatggaagaagttgggagcctagagaatgtcttcactccagctcaaaagaggtcaaaaatgcatttgcttggcatcctcactgagaacaactcgtctaactcggttcagaattgcaatgttcctcagaaggaaataggattaggtggttgggttgacaagatggctcttggagacaaccactttgagaactctaattccatcctagagttggagcctgacacagcacagcttccaacttctttttatcatcaaagatatagtcctgtgcaacaaagctgtaggaccgaatcagtaccatcattgggcctacatggctttgattctgctactagttgttctaaccaagagattgtagtgtcaaccatgggactaaaagcttctggtgttgccaatagaggcgcctcaactgtaaaaaagtatgaagctacatcaacgaggagtacaaatctagcaagcaagtctccattgttgcagaaaaaactgcaaacaccaaccaggaacaggaaccagctaacttcgagcaccataggtggaagaagaacaccaaatggaaaaattggcattgcaaagtaatcaattaatgtgaaggcagatttgctgtgaccatgcttagaatggaaaaattggcattgcaaagtaatcaattaatgtcaaggtgggatagcacggagcctaaaaggactgcggtttttgaacctgcagaaggatcaagatcaatcatgtaaactgatgcacattccgataggtagcacattttatttattacattgaagttggaaacagacaccaaagaggacagaaagatgataaatatgaaggaaattcgaattgaggcttctgtacattttccacacttataaagtaatgttgtatcatgtgcctattagccatgacacatcatcacctgaaagttgcttgtattagacatgtgctaagtttacagtttctctgtctcatgtatgttaccctttctcataatggatcgccactcacagactaagagggtgattggtttcacccaactaaaatttagtcccttttacattgaat

SEQ ID NO: 34110 - DNA, 1164 bp, Zea Mays
cgtggctgcaactggtgaactctttacttttgcagaactatatcttccactaatgtactggcatcagatatacgtcctttgccagttttacaagaaacaatggattatcttttgcatttactggattcttcagagcatccatttgagacaatacatgatttcatcttcgataggacgagatctataagacaagacttaagtatgcagaatatagtgaatgatcaagcagttcaaatatatgaggatgcggtaacatttcatatcaggtcccatcaaagactttccacgtcttgccaggattcagctgcatcttccctttgttacctaaacatggagcagctaacaaaatgcctgctttctctgtatgatatgtatcatgtacttcataagtgtgattcacacagcaaaaaggaggctgagtattattccttctatgtgcttctacatttgggatgcaagatacacaaaatgatagattcactctctttgtggtatggtcaattggctactccagtcagacggtcaaaggaaatgatatttgctagatctttattaagatgctatcgcctaggaaacttcaagcgtttcttttgcatggtagcagctgaagcaaccgatcttcagttgcgccttgtagaaccttttctcaacgaggtccgagctagagccttaatgtacttcaactatagtggctacaaactccaacatcaccctttggaacatctatcaggaatcctgatgatcgaggagtcggagctggaatctctgtgtggaatatgcggacttgaaatcaccaggagcgaaggtacgaaagcttttgtgcctaaacaaacaagcttcaacctaccgacatccatgccccaaagtaatggcatttatgtctcaagggagtttgaaagattaatatagcattgtagttcaggttttcaatggattgtataatgtgtcaggattcaggaaagagtttgtcacgcatgatatgtgtaatacttactgttacaagaaaaaggctgaatatctatctcgatgcgtttttacagactgcttagcattccggtgtgcttttacatactgggccattggctctttgtgccggacggcgtttgcgcatttactttttccacaggctggtaaatcataaaagatgggaacgagcagtgtttt

SEQ ID NO: 34111 - DNA, 5242 bp, Zea Mays
cagtgctgccggctcccatatgagtggggtagtaaccgagccaagacttaattccgtggtacattctacatagaggcttcatcgaactcaggacctttggcttaatggaaaggcctgtcaccattgcgtcaggtggctgaccaagacagcttgacttgactcccaccttccatgaaatgcactggcactcagccaaaagacttcaggagttcgacacatacattgaatcgcaaaatcaatatttacattacttcactccattacgattcacaacagctaaagccgctccatgaccatgggcacagttgtcggtgagatgcttgcatcggctgtcctgaaggtggtcatggggaagcttggtgcggttattgggcctgaggtcaacatgctgtggaagttcaaggatgatcttgagtcgatcaggagcactctgttgactctccaagctgtattgaatgacgctgagaagcggtcttcacgagaggaacgtgtgcgcctctggctcaagaggcttaagtttgctgcttatgacattcatgacattttagaggaaatggaatcaaataatgacattggctatggttcgtttaagaagcttagcgcacacattaccattgctcacaagatgaagaagatgaggcagaggttggagaagattaaggaagaagcaaaactggatatattcaattttaaggctgattgttgctccttggatgaaaatgttaatagcagggctacgttttcttgtatcagtgaagatattgtggggaggtccacggagaaagaaactatagttgctatgttgacaacatatagtgaagaagagattttgaccatctgtatttatggttttggtggccttggtaagaccactcttgccaggttagctttcaatgatgaaaatgttgggggagttttcgattaccgagtatgggtctacgtatctatgaaatttgatctgaagaaaattggtgaatctatactttctgaaattgatgaaggcaactgtggccaccacggaaaccttcaggaggttactcgtcatctccaaagagtacttgatggcaagaaattcttggttgttcttgatgacttatgggaagacaattggatccaattgcaaaatctgaaggcaatgctcagctgtggtgcaaaaggaagtaagatcgttgtgactacacgcactgggaagattgcttccctgatggatcattgcatgccttacaagatggatgtcctatctgatgatgattgttggattttgtttaagagaagagcctttgttcctggaagggatgatcctaggatagaagtgattggaagggatatagtgaagaaatgcaatggtgtgcctttgtctgcacaagctttgggtttcatgatgcggttcaaggaaggggtggctgcatgggaagcagtgagggacagtgaaatatgggagatagaagatcagaatattatgccatctttgaagcttagttattgtctcatgccttgtcacctgaagttgtgctttgcatactgtgtagttttctccaaaggagctgccatagacaaggacatgctgatacagcagtggattgcacttggattcattcaacccactagtggaagcttgacacatgtaaagcgcggtgaggagtacatccgtgaactagtgagcatgtctttccttcaggcttcgatgttctcatcctcagcggataaccatcacatgaaagctgcaagggtattccagatgcatgatttggtgtatgaccttgcaagatgtgttgctaatgaagaattcctattcatggatgccaaaaagagtggcatgactagcgctagaaatgatcattatcgacatattgtgctgatgaattatgttgaggtaccaatgaacagcaaggctgcactttgtaaggcaaaatcacttcattttagagattgcaaaaggctgcagatttctgggagatcactctccctgaccctgagtaaattcttgcgagtcttggacataagtggctgttctatgttagggttaccaagtcaacttaaccagatgaagcagttacgttatcttgatgcatcgggaatgcagaatgaattgaaacaggagtctttcgctggtttaaaatgcctaaatgcactaaacctttcggcaggttattttcagaaactgccagttcaaatagttaaccttgagaaattgcattacttaaaccttcatggttgttctcgtctcatgttaattcctgagtccatttgtgaactaagggatctggtgcatctagacctatcaggatgcattaacctacgagttctgcccacatctttcggcaaactccataaattatcattcttggacatgtctggttgtctcaacctagttagcttgccagaatcattttgtgacctccgttccttggaaaaccttaacttgtcatccttccatgaacttagagagttgccgttaggcaatcatcaagaactcctcatactggacatgtccaattgtcataaaatccaaattttacccatgtcattttgcaatctcctacatttagaggatctcaatttgtcatgctgttatgaacttcaagaactgccagaagattttggaaaaaatcgtgggcttcgtattctggatctaagtaactgccacagacttcagacattgcctgattcctttactgaccttgtaaacatagagaaactgatcttatccgattgctgggagctagtacagcttccagaactgcttgggttcctacagaaaattcaggttttggacctatcatgttgttcacagctttttgcattgcctgagagtgttactaagctcacaaatttagagcacctaaatctgtcatgctgcattagccttgaaaagatgcctggagactacggcagcttaaagaaacttaagcttctgaacatatcatattgttttaaggtccgtatccctaatggcatagccaatatgtctaacctgaaatgtttgatggcggttgggttggacggttactcttgtgggaataaggatgatttcaatattgtaagtagcttactgtgtatgcctaggatagatttgagtaaaaaggacagccccattggtgacttccatgggatcttgaagcacaaaagactacatctttttggtctcggcaacgtgcaaagcattgatgagtttgagaacttgggattatgcaggcatcagcagctcaactcactaagacttagtagctcctacatgaatggtaatgaagtggctaaatttatcccagatgacattgtacttgaaaagatcatacctccaaggaccctggaacactttgaacttttgggctatcatggttcagaatttcctgagtggatgctgaatctgacaaccattttgccaaaccttgtacaccttaagctttctggccttgctacatgtgaccatctgccgcctcttggccagctaccaaatttgcagtccctggtcatagaatgtataccaaatgtcaaggctgttggagaagtttttgctggtggcagcagagcgtttctgaaattaagggacctcactatcagtggtatgccaaacctagaaaggtggctgacaactctatcaactaccaatgaagaggcccatgtgtatgtgttccctaaccttcaccatctgaaggtgtcatggtgcccaaagttgatatttgaaccatctcttccacagtgccttttattggaaattgatgcatgtggtgagatcttgcaaggatggacagcctcacattcacaaataaaccttaggccaacaagaaggttaagcttccagttctgtgacttatcattttcaaggggggaccaacttcatttttttagctccttaagttcacttaagttcctgacagtaaggtcatgcgaaggtctggacacttggggagaaagtataggaacattaaccagccttgaggtgttggagctttcactctgtgatataccaatgtttttgggaagaatcgcttcgttgcagagtctgagtattgaaatgtgccatctaccttgtgatttttctcattacttgctacagcttccattcttgcggcagctacaaattgtttgttgcaacgctaagttagagttacctggtgaaataaccagagccatcttggctcgtattccaaatatcagcatacacaatgtcggatgtgtcaggcatatagaacaggagaatggtatatgccaaaatgtttcagttgacaagctgattctattgattgcagttttatattgtgatgttgtgcgaggcatatgagtaccattttttcttcttaatatagcactagtgttctgataggcgcaggaaatcaacagctcgtgcagatgggtttcttcgagcaccctctcttgtcgacaaccttgttatatttcagaggttatttgtttgacatccatccatccatcttctctccaaatttaggtcggatgtacgagctctatcgacgttatagttgtgcctccgcgagtccgagctgacccagcagcgagtcagaatccagcagttgttgccaggaggatggttctgaagtcaccacgcctaaggatcaaaaggcctgtcgtagtggcacagctgatgaagggcagccaccgcaagcggcccgcagccaggaaaacaagaactggggacaaggcttcgagtagcacccgccagggaacgccgaatgacagcaatatcacgggtgaggtagatattggagatcttatcgacttccttcgggaggagtacggatgtcgaggaacgtcgacaaggagctatcaggcgcggcaaatgacggtgatgagcggattctcatgtatgaacttattctgctagcgtcgtgtcgtgtataggcagagtcattgaaaaaaatgcaaacgtgaaggcggctcaagacggcttcgccaaaatgcccactgagccatgtaactcgtcaaaatacccatgtcaacatgaaaacattgatgtaatgctcatacctctttatatattatgttttgtagacttgtatagaccaaaatagccttcttagatatgcatacacaaataaaggtacaaaataaaacgtaccatatttcatcaccagcatacagtggccgcagatatagaatgataattcatgggggccaacaaaccgcacgataaaattaaacaagaccataaaaaactagtgttgcatataatttaacttttatatacaggtttaaagaatgaaactacataaacaaaagaaacaaa

SEQ ID NO: 34112 - DNA, 1640 bp, Zea Mays
gaagcgaggccgtttctgatgcgccagtccctttcagaattcctttgatgccggtcgagaataagaagccatttgctcctccaagggaggtacatgtccaggttacacattcaatgccacctcacaagattgaaattttcaagtcacttgatgattgggctagagataatatcttgacacatctcaagccagtcgagaagtgttggcagccacaggatttcctccctgacccagcatctgaaggatttcatgatgaagttaaggagctcagagaacgtgccaaggaaatccctgatgattattttgtttgtttggtgggagacatgattaccgaggaagctctaccaacataccagactatgcttaacaccctcgatggtgtcagagatgagacaggtgcaagccccactgcctgggctgtttggacgagggcatggactgctgaggagaacaggcatggtgatctgctcaacaagtatatgtacctcactgggagggtggatatgaggcagattgagaagacaattcagtatcttattggctctggaatggatcctaggactgagaataatccttatcttggtttcatctacacctccttccaagagcgggcgaccttcatctcacacgggaacactgctcgtcacgccaaggactttggcgacttaaagcttgcacaaatctgcggcatcattgcctcggatgagaagcgacatgaaactgcgtacaccaagatcgtggagaagctgtttgagatcgaccctgatggtaccgtggtcgctctggctgacatgatgaggaagaagatctcaatgcctgcccacctgatgtttgacgggcaggacgacaagctgttcgagcacttctccatggtcgcgcagaggcttggcgtttacactgccagggactacgccgacatcctcgagttcctcgtcgacaggtggaaggtggtgaacctgactggtctgtcgggtgaagggaacaaggcgcaggactacctttgcacccttgcttcaaggatcaggaggctggaggagagggcccagagcagagccaagaaagcaggcacgctgcctttcagctgggtatacggtagggacgtccaactgtgagatcggaaacctgctgcggactgcttagacaagacctgctgtgtctgcgttacatagttctccaggttttgaccagatggtcccgtgtcgtcttatagagcgataggagaacgtgttggtctgtggtgtagctttgttttttatttttatttttctgttttgatgtacaacctgtggccgcatgaactggggcgtggagatgggagcgaccatgccgttctttgtctgtcgctggcggtgtgtttcggtatgttatttcagtcgttcagatctgttaaaaattttgtgagctatgcagttcagttcagctctgttctgttcgttagataccctaggtttctccgtggcctgaattctgcagtgtcgaaaacaaagcagagctccaactgaagtgtagctgactacttgacacatccagcatatatgtcttccaaaaaggtcgacacatcttgcagacaatgagctccaaccgacgaaagagcagctacctttctgcttgcactgcagataagcggcatacgattcatc

SEQ ID NO: 34113 - DNA, 4014 bp, Zea Mays
atcacacggccgtgaggagcaactctgttcctcatctcccgttcaccccgcgggcgcagggcgcgctctctcctcgtggcgatcgccgaccgtagcggccgctgcccgggttttcgtcggccgcttcgccatgtcttcgctggacccttcgccagcgacgagcacccaacagaagcaattggagagtttggtaaatctactgacgcagggaagcaggttctaccgcaaagcatataatgaactgttctcaggtgtaactactgagcaggatccggattcatcgactaatattcctgagtatatgctttttgggtggcatctcttcttaatgctccatttgagatcaccagaattgttcaaggacctggtgtcctgcatccatggattagttgctgtgttggccatacttttgattcacgtgccagctaaatttaggagcttcacgattgaaggctcttctcacttaatgtgcctttgaaacattggcatctcccacaaagacaataaagaacatgctgactgttcctagttctcctttgtcaccagccaccggtggttcagtcaagattgtgcaaatgacaccagtaacttctgccatgacgacagctaagtggcttcgtgaggtgatatcttcattgccagataagccttcatctaagcttcagcagtttctgtcatcatgcgatagggatttgacaaatgctgtcacagaaagggtcagcatagttttggaagcaatttttccaaccaaatcttctgccaatcggggtgtatcgttaggtctcaattgtgcaaatgcctttgacattccgtgggcagaagccagaaaagtggaggcttccaagttgtactatagggtattagaggcaatctgcagagcggagttacaaaacagcaatgtaaataatctaactccattgctgtcaaatgagcgtttccaccgatgtttgattgcatgttcagcggacttagtattggcgacacataagacagtcatcatgatgtttcctgctgttcttgagagtaccggtctaactgcatttgatttgagcaaaataattgagaactttgtgagacatgaagagaccctcccaagagaattgaaaaggcacctaaattccttagaagaacagcttttggaaagcatggcatgggagaaaggttcatcattgtataactcactgattgttgccaggccatctgttgcttcagaaataaaccgccttggtcttttggctgaaccaatgccatctcttgatgacttagtgtcaaggcagaatgttcgtatcgagggcttgcctgctacaccatctaaaaaacgtgctgctggtccagatgacaacgctgatcctcgatcaccaaagagatcgtgcaatgaatctaggaacacagtagtagagcgcaatttgcagacacctccacccaagcaaagccacatggtgtcaactagtttgaaagcaaaatgccatccactccagtccacatttgcaagtccaactgtctgtaatcctgttggtgggaatgaaaaatgtgctgacgtgacaattcatatattcttttccaagattctgaagttggctgctattagaataagaaacttgtgcgaaagggttcaatgtgtggaacagacagagcgtgtctataatgtcttcaagcagattcttgagcaacagacaacattattttttaatagacacatcgatcaacttatcctttgctgtctttatggtgttgcaaaggtttgtcaattagaactcacattcagggagatactcaacaattacaaaagagaagcacaatgcaagccagaagttttttcaagtatctatattgggagtacgaaccgtaatggggtattagtatcgcgccatgttggtatcattactttttacaatgaggtatttgttccagcagcgaagcctttcctggtgtcactaatatcatctggtactcatccagaagacaagaagaatgctagtggccaaattcctggatcacccaagccatctcctttcccaaatttaccagatatgtccccgaagaaagtttcagcatctcataatgtatatgtgtctcctttgcggcaaaccaagttggatctactgctgtcaccaagttccaggagtttttatgcatgcattggtgaaggcacccatgcttatcagagcccatctaaggatttggctgctataaatagccgcctaaattataatggcaggaaagtaaacagtcgattaaatttcgacatggtgagtgactcagtggtagccggcagtctgggccagataaatggtggttctacctcggatcctgcagctgcatttagccccctttcaaagaagagagagacagatacttgatcaattataaatggtggcctctctcgtatatagctcacagatccgtgctccgtagcagtctattcttctgaataagtggattaactggagcgatttaactgtacatgtatgtgttagtgagaagcagcagtttttaggcagcaaactgtttcaagttagcttttgagctatcaccatttctctgctgattgaacatatccgctgtgtagagtgctaatgaatctttagttttcattgggctgacataacaaatctttatcctagttggctggttgttgggaggcattcatcagggttatatttggttgtcaaaaagtactgtacttaattcacatctttcacatttttcactagcaatagcagccccaaattgctttcctgactaggaacatattctttacaggtataagcatgccaactctaaactatatgaatcctttttatattctcatttttaagtacttctctgtttctgctacttttgtactgtatatttccagcttctccatcagactgatgatcccatattcagtgtgctgcaagtgatttgacatatgtggcttatccttcaggtatgtctcatgttgtgacttcattgctgattgcttttgtaatggtactgttgagttcatttctggttacaatcagcctttactgctttatattgttctactaattttggcttgcacagccaggacgattggttttctgcatcaatcaatcttttttaggacaagatatttttgtatgctacacttcccaaattgcaattaatccagaagtctaccttgttttattctattagttctcagcaacagtgaatgaatatgaatcagtcatgctgatagatgttcatctggttattccaaacaatctgacatcgcatctctttctgcaagtgagatgaagaaaacctgaaatgctatcaccatttaaaacattggcttctggaagttcaggtgattagcaggagacgttctgacattgccattgacatgtacggtagtgatggcaggagacgttcttaaacagcagctgctccttcagcttgtaatgtctgattgtattgaccaagagcatccaccttgccttatggtactaactgaatgagctggtgacgctgactcatctgcataatggcagatgcttaaccatctttaggagctcatgtcatgattccagctgcaccgtgtgcaaatgtgaaggccctgcaagggctttccaggccgcaccaatcctgcttgcttcttgaagatacatatggtgccacctaaataaaagctgtttctggttatgtctgtccttgacatgtcaacagattagtgttgggttgcagtcatgtggtgtttaagtcttggagaaggcgagaagtcattgctgccagcattgtgatcgtcaggcacagaagtactcaaaagtgagagctacttgttgcgagcaaacggagggcgatataggttgatagccaatttcagttctctatatacaagcagcggattttgtttagagttagcttttgagatgcatcatttctttcacatctgattctgtgtgttgtaactcggagtcgcgtagaagttagaatgctaactgaccttaattttcaccgaataatttgctagcgtttttcagtatgaaatccttgtcttaaatt

SEQ ID NO: 34114 - DNA, 1333 bp, Zea Mays
ccggaatcgtgcagacgggcaccgcttatcctccgcgcaggcaagagcagccagccgcttcgggatcgggacgcggagaggggaaaggcgagtcgtcgactcgtcgtccgggcagcttccctccctctcctctccgcccccgcttacctaggccggccccgcctacgcccccctcccgccgccgcacgatgagcacttctcccgccgccgccgacgtttcgcctttgccgcctactgctgccgccgacgaggccgcgcgggcgacagagacggtggtggtcgatgagagggtcgcctcacacgtggacccgttcctcgtcgaggcgctcgacaaccctcgccaccgtctcatggattctgatgctgcaagtattatgggaactctttctactggcaaagatgaaccagtaaatgttgacccttctgttgatgaaaccaaagtcagcacaatgaacagtcgttccagagttgctgtttttaaggatactgaaaaggatcgtagtgacccagactacgatcgaaactacaaaaggtatgttaggagctcagtgcctggcttcaacttgagcccaggtgtttttaactttgttgtgcctcagtttatgcagtatgacattggttatgtgcaatctcctggcatgtccacaaaccagcatactatgtactttggccagcctgatctaacaatagggtcttctggagctgctgtttatcgacattggccaaccccaacaatgatgtatccccattgctatgataatgttagtccaatgatgtctcaggttcctctgtaccagtctttcaaccatgattaggagattctgcttgctggaaagttgggaacaattctctgttgaacttgctatgttgtgttgtcctatgttaagtggagttcctttagattcgagccgtttttattacaaaaaattgtataaggagtcctaattcgttgaaactatttcgtgaactagtctggaactgtgatgcttgtctaatgtctagttctcgtttgcaatttgctcccggtttatagttagtagtgtgctgcgactggtcttgaaccgtgtcgcgtggtcgtactggtagaaccaggttgctacttgccagcagtcattgctttgattccgattttttatttaacttctttttaatcaagtatttcaaataatctaccctagaagttacttttacatctagttgtgccagaccacaaggacgacaaaataagattgttaaaatatgaaatgtaaatagaatttgccattgtttttcccattgagtttagagttcaaatgtcacaccggtatattccttaaattttcttatattcctc

SEQ ID NO: 34115 - DNA, 1999 bp, Zea Mays
gcgtctccctccccacgaaacccccttccccaaactacctctgctgctctccttgatccccaattctctcttctgcctacttgcctccatctcggcctccacctccactcctcgcccccgaacatccggcgctgtccgcaccccgactcctctcgtcctttcgcggtcgcgatggtggcgtccatggcgtcgccgtaggggcgatcgatctaggagaaagtgctggagaatgtggcgtcgtaccaccagcaacaacggaggcagaagctacgcaagagcctcacctacaccggcggcgagctctcgttcactgtctgggcccgtggggatgaccccacctccacgtccgtcgaggcacagaaggaggacatgcctcttgagcacgtcttcaaaatcatcagatctgatggcaaaagtgtgtgtttatggttcctgagtcagatgatctttcttcagttttaggtacttttctgctttaatatagctcatgcaatatgatttattttaacacatatttgaaatagaactggattgtgcatattttgtaaagtgtttgttctacattttgtaattcgtattattcatttttcctttagtttttctctttctacaactcctatctctttacaatcaaatttcagatgtgatagatattggtataaaagataaaaactagaatgctatgtctgtcaaaggagctttcttcagttcaggtactgctctgctttattagccatccagccgatggatattttctatatgtgtaccgcccctgcactttcaaacacttatgttcaatgtttacaatcacattttttcttctcatagatttactatgtggttgtggtcttagtttggcttgtaggttaatttgtatactcatgtcattttagtttttctatgttgattcagtatgtcttaatttagttaatttcaattcttgatgctaataatatggatagattgtgacactactttctggcttgagcagaaatgggtttgttgcatatagcagaatatagttgtcgtaactggcaacaatgacccctctatggatgatctgaaaactattccgtggtcatgtagttaaatatagctgaatatacattactatgttttattaatcttatttggtttttctctcaaaagaacacacctctccatctttcagtgcttggtggatcaccgtctaaacgatccaccaccagaaccgccctaccccaagatagctatgtgcaggttcaactactcatttagatattggtacagcctgtaatagactttggtacaataggatttggttttgctattcacttagtttttagttccaaacaaccaacaaattgcatgtcctttaggaaaaatatcacatgaatatcagtaatataacactgataataaaaaatgcttcgattctatatatttttcatgttataaggttgaaaacattctgtctcacggatcagaatgtgtacaaggcgacatactgtgtttacaaatatatttaaccataataaaaacatatttggaaactgaatatcatttaagtccaaaaatgtttttgctgactgttcattaagctagagtaaagagtaaacttagcatttcttttctatatctctctttcgtgctcatgccgccgcagtctcctccatcccacctttcctacgcaggcagctccatctcagtcgttgtacccattcaacgccgagctggtggcagcgatgcaggagatgatccagccgaggtgtacaagtacatgttagtggacgtcacctgccaaagatacacagtttctactgtttttcagttggagaaaatatttaagacaacattttcatcgtttgttctccatatggggcttgtttcacgccacttgaaggaaggagggaatgatggtgttaagttcggacaatacatctacacatctatgaaatgtacaaccacgatgtagagcatagagtttctaaagttggtgggagttatggctgccttcttc

SEQ ID NO: 34116 - DNA, 1263 bp, Zea Mays
ccccgacagttgttgtgtgtaagaaaaatagggtttcagtggcggcagcctccactcacgccgccgtcgcctccgagccccactgcccgatccagacaaccaccccgcccagatccagatccacctgtactggatctcacagcctccgcttctgctttcctttatgtcgtcgaccgcgatgtcttgggacgggtacggcgggcagatctaccctggaggcggtgttccagcagcctgagacgaccccccttgcaggcgccgacgggggagatggagctgccgagcaacgctggcgacggcgaactcctgcccatggaggagcacaaggagcgcgcgctgcggcacctactccgccgatccaagcgcccgctggaggagttcgtggccgccgtggcagacgtcgcggagcagctggtgagcgcgtatctggacctgggcgtcgagtggcgcggcgcagactggcgggagcggttcctggccagtcgtacgatagcgcgagctcgatggccaggcgtagggcacacgtcacaccgggtggcaactggcagggcaatgcccgatcaggtctccgtcgtcgattcgtctgaacagctatcctcatcatattttaatgtctcgagcataatacggagtacatatctgtatttacgtcagcgttattgcaacgctctctctccgtggtctcttctacatactataatagtagtacattagtactaacaatgtggttggccatggcatgcttgcttcgagatcaacatgaacaatggaagcacaagtacgggaatccatgtagaagcgtgaagattttccggtgccaattgccacggaataatgccttctactcagctcaacctccaaagcatgatggctctgacaaaccactctgtccaggagctcctgtatgccactggtgtggtacctggaaaggtgataaaatatgtagtagctgcaagaaagcaaggtactgttatgagaaacatcagggatttgtttggcttccaaatggtttgttggtcctaaaatagtcagaatcacatgacatctgtgctatagatatggacctcggtggttttctccacattaggaaagctggaagagccttttgaactcagtttttttgctaacagtggtgttatggtgaaacagagttttgtgtgtatgtaccaacagataaaatgtaaacacgacattatcatagttgagtacaggaataattatctcgtatatcttattgcaaaatctgaaacagttctcctgtag

SEQ ID NO: 34117 - DNA, 5585 bp, Zea Mays
gtgttgtgttgtgttgtgttgcgtgctgtggagggggaggaggagatggggaagggggcaggagcagcggagccgtcgacggtggtgctggccgtcaacggcaagcgctacgaggcggccggcgtggctccgtccacgtcgctgctggagttcctccgcagccagacgcccgtcagaggccccaagctcggatgcggcgaaggtggctgcggtgcatgcgtggtcctcgtctccaagtacgacccggccacggacgaggtgaccgagttctctgccagctcctgcctgacgctgctccacagcgtggaccgctgctcagtgaccaccagcgagggaatcggcaacaccagggatggctaccaccccgtgcagcagcgcctctccggcttccacgcctcgcagtgcggcttctgcacacccggcatgtgcatgtccatcttctccgcccttgtcaaggccgacaacaagtccgatcgcccggaccctcctgctggcttctccaagatcactacctcggaggcagagaaggctgtctcgggcaacctttgtcgttgcaccggatacagacccattgttgacacctgcaaaagctttgcctctgatgttgacctcgaggacctaggcctcaactgtttctggaagaagggcgaagaacctgcagaagtcagcaggctgccggggtacaacagcggtgccgtctgcacctttccagagtttctcaaatccgaaatcaagtctactatgaagcaggtgaacgatgtccccattgcagcctcaggtgatggctggtaccatcctaagagcattgaagagcttcacaggttgtttgattccagctggtttgatgacagttctgtgaagattgttgcttcaaacactgggtctggagtgtacaaggatcaggacctctacgacaagtacattgacatcaaaggaatcccagagctttcagtcatcaataaaaacgacaaaggaattgagcttggatcagttgtgtccatctctaaagctattgaagtgctgtcagatggaaatttggtcttcagaaagattgctgatcacctcaacaaagtggcttcaccgtttgttcggaacactgcaaccataggaggaaacataatgatggcacaaaggttgccatttgaatcggatgttgcaaccgtgctcctagctgcgggttcgacagtcacagtccaggtggcttccaaaaggctgtgcttcactctggaggaattcttggaacaacctccatgtgattctaggaccctgctgctgagcatatttatcccagaatggggttcagactatgtcacctttgagactttccgagccgccccacgaccatttggaaatgctgtctcttatgtaaactctgctttcttggcaaggacatcaggcagccttctaattgaggatatatgcttggcatttggtgcctacggagtcgatcatgccatcagagctaagaaggttgaagatttcttgaagggaaaatcgctgagctcatttgtgatacttgaagcaattaaactactcaaagataccgtttcaccatcagaaggcactacacatcatgaatacagggtcagcttggctgtcagtttcttgttcagtttcttatcttcccttgccaacagttcgagtgcaccatcaaatattgatactcccaatgggtcatatactcatgaaactggtagcaatgtggactcacctgagaggcatattaaggttgacagcaatgatttgccaattcgttcaagacaagaaatggttttcagcgatgagtacaagcctgttggcaagccgatcaagaaagtcggggcagagatccaagcatcaggtatatactcttatactgatacataaactgatttagcttgaacttccaaacttgttccactgttagtgaacctcgtctattttctatactccacaaaacaatcatctcatggctccttttttttgtctttagtgcaatagtttcgtcagccagaaccatctcataagtttctgtcccagcatgctctattgattgtatttcctcccttaaaaaatgccaaaccatattcatttttcttatacaggggaggctgtgtacgttgatgatatccctgctcccaaggattgcctctatggagcatttatctacagcacacatcctcatgctcatgtgagaagtatcaacttcaaatcatccttggcttcacagaaggtcatcacagttataaccgcaaaggatattccaagcggtggagaaaatattggaagcagcttcctgatgcaaggagaagcactatttgcagatccaatcgctgaatttgctggtcaaaatattggtgtcgtggtaatgtttctttagtgtcatttcaaattacacagaaatagaaatatgttttgtataaccaggcagcttaccatgtcttgttgctttttcaattcactcagattgctgaaacacaaagatatgctaatatggctgcaaagcaagctgttgttgagtatagcacagaaaatctgcagccaccaattctgacaatagaagatgccatccaaagaaacagctacatccaaattcccccatttttagctccaaagccagttggtgactacaacaaagggatggctgaagcagaccacaagattctatcagcagaggtataggacactttgttacgttcaaaaggatactccctccctctctgaatttccagaaaagccaaacactcacgcctagtatttttgtgcccacaggtaaaacttgaatcccagtactacttctacatggaaactcaagcagcactagcgattcctgatgaagataactgcataacaatctattcctcgacacaaatgcctgagctcacacaaaatttgatagcaaggtgtcttggcattccatttcacaatgtccgtgtcatcagcagaagagtaggaggaggctttggtggaaaggcaatgaaagcaacgcatgtaagtcctgcctgtaactagagcttcagttcactcaatattttgtgttttcaattgccactgtattgtcaattgaacttcatgatttgaccaaaaaactgttgagatgcaaatggtgttagaaatgatcatggattttcctctttgtcagactgcatgtgcatgtgcccttgctgccttcaagctgcggcgtccagttaggatgtacctcgatcgcaagacggacatgataatggctggagggagacatccaatgaaggcgaagtactctgttgggttcaagtcagatggcaagatcacagccttgcacctagatcttggaatcaatgctggaatatcaccagatgtgagtccattgatgccacgtgctatcataggagctctcaaaaagtacaactggggcactcttgaatttgacaccaaggtctgcaagacaaatgtctcatcaaagtcagcaatgcgagctcctggagatgtgcagggctctttcatcgctgaagccatcatcgagcatgttgcctcagcactcgcactagacactaacaccgtcaggaggaagaaccttcatgattttgaaagccttgaagttttctatggagaaagtgcaggtgaagcttctacatacagcctggtttccatgtttgacaagctggccttgtctccagaataccagcacagggctgcaatgattgagcagttcaatagcagcaacaaatggaagaaacgcggcatttcttgtgtgccagccacttatgaggttaatcttcgaccaactccaggcaaggtgtcaatcatgaatgatggttccatcgctgtcgaggttggaggaattgagataggtcaaggattgtggactaaagtgaagcagatgacggcctttggactgggacagctgtgtcctgatggtggcgaatgccttctggacaaggttcgggttatccaggcagacacattaagcctgatccaaggaggtatgactgctgggagcaccacttctgaaactagctgtgaagcagttcggcaatcgtgtgttgcacttgttgagaggctgaagcctatcaaggagagtctcgaagctaagtccaacacagtggaatggagtgccttgattgctcaggtgaggataataacttaactctaactctgttggtaacatgccacttaatatgattgaaagagatgccaagaaataaagttactcaaatctgtttgcctcccttcattccatcattaatgtattgcagtcggtagcaatgtcaaataagtttaaggaactggaactcaatatcaagcagtttaaattattcatgacatttgttcctcatttacaggcaagcatggcgagtgtgaacctatcagcacaggcgtactggactcctgatccatctttcaagagctacttgaactacggagctggcaccagtgaggtatccttgatccaaaatacaatactaacagcacaagcgcaattagcaagcgattttgttggaggttgcagatttgcagctaaagttctttaaacctgacatttcattgggattttgcaaatggtcatcgcaggtggaagttgatatcctaacaggagcaaccacaattctgcgaagcgacctggtgtatgactgcgggcagagcctaaaccctgctgtagacttgggccaggtcagctataaaatgaacacagttcacgcagaccattgtatcaacaaaaatgtgctcctcctctaaaaacactgttcatcatttatccagatcgagggctgctttgtccaaggaatagggttcttcacgaacgaggactacaagacgaattccgacggcttggtcatccacgacggcacatggacgtacaagatccccacggtggataatatcccgaaggagttcaatgttgagatgtttaacagcgcccctgacaagaagcgtgtcctatcttccaaaggcaagtatctcctcacaatgtttcatcccctctccacattctcaacactcatgcggacatcatcaaattctggtaactgcatatgaaaaaaaaaccaaaatcctgacataccggggacttgtttgcagcgtcgggcgagccgccgctggttctcgcagcctcggtgcactgcgcgatgagggaggccatcagggcggcgaggaaggagttctcggtcagcaccagccccgcgaaatccgccgtcacattccagatggacgtgccggcgacgatgcccgtcgtcaaggagctctgcggcctcgacgtcgtggagaggtacctcgagaacgtgtctgccgccagtgccggcccaaacacagcgaaagcatagatccagcaggcctcagggtgcagtcggcgcactgccagagatgatgtgtgctgccctgatgtacagacagtacagtacagaggagagagaattgggggaactcaggaactgcgaggagcgatgaacagtatatagagtgaaaaataaaagtgcttcgtactaataatcactagaaaaaattatgcacatctcccacgcactaccggcacgactgttgaatattttgtaaaataagatgtcataagctatttattttctgtatgattagatcagcaaataatttaattcaagtataaatcacagaaa

SEQ ID NO: 34118 - DNA, 198 bp, Zea Mays
atacctagggtttccccaagaaaatatgcaagaagagatggggaagaacacctccttgatcctcccttcctcttcaattcaacgtgctcctcctcttctcgatccttgctgcgtagggggagatcttgggggaggaagcaatggaggatggctgccatagggggagggggcggccagccaagggggagaaagggggtg

SEQ ID NO: 34119 - DNA, 2748 bp, Zea Mays
cccacaccagaaggagccaaccccccctcaggccccaacccttttcccacttcccgccggagcgctctcctcttcgccgctccatcaccgcctcccaatcccatgggcgacccgcaccccctctcctccgcccacctcaccgctgctgcctcctcggctcgagaacaccgtggccccaccaacgagcgcctcgccgcgtccgatccttccacgtccttcgctaagcgtcctagggttgcggcggagccgtccgattccggcggctgcgttccatgcgtcgaggcggacgtacgagctcttgtgtcggtgtccggaggaatttacccgctggcgcgggcaggagcgctccgtggactcaccgcggtccttgagaaggtcgacaccagcagctgtgtcagcgcagcgatcacggactgttgctacaaatgcgcggtggagctcatgagggacgacgacaatggcgtcaggtggacgcgtgtgctcgaaatatttcagcgagattggattttgatgccaatggctatggtgacctgatggacatgattttcctacagctaagctccatggctagggacatgtgcacgcaggtgagaagaactgcctgcaaatcattaggagcgctggcaaagttttctactcagtacacagagaaggccttggacttgttgatggacatgatgaatgatgatacagaagcagttaggctgcaggctctggaagcactatttagtatggcaacatatggatgtttgagtgtgcaggagaagcacatgcatatgtttcttgggttgctggttgatgccaatgtcttaattcgagatgcagcacgcaagatctttgggttagtcaacatgccaaaacttcaaatattcaaatctgcagttgatggtcttgttacaagtttggagaagtatccagaggaagaggatatatatggtattatgttttccattggtaagaaccatgggagcttttcagctaacatagctaaacatttggccaaagagattactatggcatctgacggagagcttatcttggacaaaccaagggtcaaagcattgttaatagtgtctatttcagcacctttttctgatgataagcacaagcagctgggtataccttcgattatcttctcgtatgcaattcccctactggagaagatctcatgcgcactaggagaggttgatcaggattcactcttatcttacttgtatcataaaggtggaatgccattttgggaaaacaggtcagtatctgcagagtttggagaatctgaaagctgcaatgttgaaacagtgaaaattggtgcccatatagaaaacactgcaaaggaagccaaatgtctagatgaagttctggtaatgaaatccatactagaaatagttgaaggagtctggactatgagaatgtcgtgcaatgtttgtgaagttcgaactattttcagaacatgcaaagaagagctgagattattggcagaaaattcttctggatcaattggtgcattattgagctttctgagtgagtatcttgatgcaatattattcattgttgaaatatggcagttgattcagttggacaagccttatacttgtggcctaacgtcacttgatattttactggagaggttggatatgtctgtaaggaggatgaaatattgttatattggattaaatagagtattggaggtccaagttttggagctttctttgatagctcatttatgtagactctcaaagattgcagtgtgttccaaggtagttctgggtaaggtgctctgggtaattaatcgcttagaggatctgtgtgctgatgggtcctgtgaactgtctgacttcagtggagaaattaagaaggcctgtgataccaaccgtattggagataatctgattggcaacatcaacaatttgtttcaactcttccatctgaaaccaacaacagactttggaatgcttaaagtgataagtgcaatgttgcgggtctgtgataacgattctgaaaatccattacaatacatttgtggattaccggtgggtgtcagctttaaaatatctctgtggaacatatctggtcaccatcgactgtggctccgcatgaccattggtgaatctgtgcaacataccttcctagaattttctcgttttgaaggcaatgatgagggatcagcacccaccagggtggacatggaggaccgagtgattgtgtggttcaactctctgatgaactgaatgtttattttgttagtgctagccaatggtgatgattaaaataagcgaccatatgctttccatgctcatcgtcttaaaggcttttgcttgagtggacattcttgatccaggtctcttctggggaaaagggttcagttgtgctgaaatttttgtagttatggcaaaagcaatgcagatgagctgcatgctccatgaccgtatgcatagtgtggagtgcaagtgggttttaacctggtcgaagcactttgagttcgttaggagctacaacttcagacggaaagtgaaggcgtgaagctcaccaagtgacgatggagaaagtgcagcgtgggggtgaagctgacgatggagaaggtgcggcggaccacgctgcgcgggtttttttttgtcaccaatttgtgtggccttggccggcggtgagtgagaaacagccgggtcagaaattcgcaatcctgcagtacggttcatattatattaataatacttccgttttcgaaaatttatcttgtagttcatttcttca

SEQ ID NO: 34120 - DNA, 3591 bp, Zea Mays
ttttcgcaccgttttcaggcctaacgacgtccatcgcgggcagggtccgtccctaaactgggcaatataccccaagcaattcacatgaattgctcaacgactcgggggctacatctagcagatgcgctcgcgcgcactcgagatttcgactatctgtgataaccgagcgaaagtagacccacactcagtgcatgacgaccatcgcgagcagggtccgtccctaaactatgaataaacccccaagaaattcacatgaattgctcgggggctacatctagcagatgcgctcgcccgcacctgagatttcgaccatcggtaataaccgagcaaaagtggacccacgctcagtgtgtgacgaccatcgcgagaagggtccatccctaaaaactgcgcaataaaccccaagcaattcacacaaattgcttgggggctcgggggctgctgttgggtacgtaggaacgaggtacccaaaataaggcatataaaccttctggccgactaaagtctccctgccgagcaagaccgcgaggcaaagcgatcgaccaggtctccaccgagcaagtccacgaggcggagcgaccgaccaggtccctgtcgagcaagtccgcgaggcggagcggccaatcaggcccctgccaagcaagtccgcgaggctgagcgaacacccaggtctgtgccgagcaagtctgcgaggtgtggcgatcgaccagatcaccgtcgagcaagaccgcgaggcggagcgactgaccaggtccccgtcgagcaagtccgcgaggcgaaacgaccgaccaggtccctggcgagcaatcccgtgaggtagggcgaccacccaggtccctggcgagcaagtccgcgaggcagggtgatcgaccaggtcccgccaagaaaatcggcgaggcagaaaccgaagtcaaacgtcgcgagtccatgccaactaagacaaaacatgtcatcctagggcatggacatacatacgaacgacaggccgggggcacgccgagtggccgctatcgacatgaccacacctcctcaagtatggccctggcgcacccccactgcctcaatggtttggacgactctgttcatggaggacctcaacatcggagcttctatagtaacccgaatactggatagcgcggaacagatacaccaaccgggtggcgcgagcctgaaccagtataacccaccgtcccaagttcatcgttcgagtcctggtggctcaccattcagagtaagtccacactagcttcccctccgaacacaaatcttattgtcccctggtttccgcaaccacgacaatatactaaaccaaattacagtgaaatttagtaaagtttctatgttttaaataagacgagtagccaaagtttagactaaaatgtcaaacgtcatatattttgtgaacagagggagtatattggtatatgacgatctagatagggtgataatgaataagcgatttcctttaataagaaagaaacctaaatttgcaagcaagatacatatatgtgatttcatcacgattcatttaaattcttacagatgcaatcaatttcttctgagcttgaggtacttggcaggcatgatcacccacgtctaactgttccatttctgaaggcagtttctgagatttccaaggcatgtagacatgaatccacttgtttgccagatgaggcacaatcattttatgagaaggtcagttctgagggtcaagaagtaaaaattatgattgagaagagaatggaatccagtgcaatatctgaaagaaagaatgttgatgctcgatcttactttatgaccttggaatactgggaagatttattttgtaagctaaatgagatgagaagatataggagaatagttgggtctcttgcgggctcttgtttatcagctgccatcccacttctctcttccaataaggaaacagcatgccttgtggcccttgacattgtggagagtgctgctatatctattgccaatgttgaggaggcttataagtgtgaatgtcaaagcaaaggagtcattgaggaggccatccagttttgttcatttgacgagcttcttgatggtacagatgccaccgaagatgttgatgaaaataggctactcccagcaatgaacaaactgtggccttacttggttatctgtctaaggaacaagatctcagtgccggttgttaggaagtgcaccgaaatgttgaggcgagcaatttgcatatctggcggcgatttttatgtacgcaggtttcataaggatggacctattgtttggaggttgctggctttatctccattccgacgtctgtcaaagatggatgaaaaagcaatcattttaccatatagggatacctcacttaactcagaggaacctatggctgagatctccagccaaaagattcagattgcagtcctggacatgatcgctgcaatatcttcgaacaagagaagtgctgttgcactagaaagcgtactaaagaaggtctgtggccttgtggtaggcattgcctacagtagtttgacaggtttgcaggaagctgctataagggcattggcaggccttgcctgcatggatgctgatcttgtctggcttctccttgcggatgtgtactactcactaaaccaaagggaatctttacttcccaaccaagatctagccctggtatcagatcttttgccccctccagtgtcttcgagagaatacctctttgtacagtatggaggtgagggtgtcaggtgtgatgtagatccctcatctgttcattatgtgttcagaaggatgcagggtgtgtgatcttgtgtgacctgaaaatcaggttcctgatactgtgtatttgtaatcttgctgagtttctttggtcatgctagcaccctatgtcacacattgaacataatatcacctgctacagagaatggtaaactttttcatacgtgttctcgcactgaaaatcatcaaggttggtcacatgtctgaagaatgattatgacaagtctttaccactttgatcataattatattaagcaaacatcaggactcatgatgacaatgaaggatgtgatgggtttgtatctgttagccatataaggttgcacgttaagcatgcccctgacttgccggacgagcagcaagacttcgggacctagattggctaaggcactaagaatagaatagcttatctaccgatatgtaaagtcttatttccacctttcgaattcttttcctcggtagctaagcttatttagttgcctaatggtcgatgtaatctttttattgtgtgattcattccactttcatggtatttccgctcttgttacctccctctaccgcttcttcatctacatctaacctcatgcctggcgacctctaataagtaactgttgatccggccacataattggaatgccttcgcgtgaggttgccggcctttgtgtcagtcactcaacatgctctcaacatgctgaggaaggtcgttgttgtgccgtagccgagcgacgcaacaagtggctgttcagaacacggacaaggtgatgttgaacgtgtagaaacaacggcagcgtgatgcggaacgtctgaaacaacgacagcgtgatgccg

SEQ ID NO: 34121 - DNA, 360 bp, Zea Mays
gaatgcaattgcctcgagtcacaactacaagattgacaacttagtgattggatttttggtggtgattttggtgccgcactgcaaattaagagagaaatttcggttcccaagcagcccacagattctattgattgcgggtgtctttcagcatctgagggtttctaccagtccaggttacgcacaagcttcaaattatcgcaaaattcctcttacatatctgcatctcataccgaaccaggtctcataccggaccaggttaataatttgaagtaaaaaaaaagtcacgagtatctaaactaaataatgaatccctcatcgacatccgcgacaaccagcaacaacaaaccaatgaggaaaaga

SEQ ID NO: 34122 - DNA, 1090 bp, Zea Mays
acagcgcctccataccatacccgtccccgccgcccggtgagatgccgaggcgcgagcgcgacctgccgcagcaggcctgacctcgcgtatctctcaggagtcaggactcctgaagatcagtttcgtgccttacctcgagagcgcctcctgaagaaaagctttgtaggattggtagatttgaaattggaagagagctgtgggatgaagctacaaatagtggtcttgtattaggatgctcacaagatctgctcgatcccttgaagacagaggtattcagaccaatctgtccagcacaaagattaagccctcagaactataaacgcttggcctggaaaaagaaggttactgctgttggagtcaaaaaggacattgctatctcagcctcaaggaagaagtcgggagtgtaggaagctcgtgcatcacaaaagcaagaaggcttggtgttcctactcctgtactttatgctgtggatccacttctgcatactttgacagtatgtggatggcttgtctgtcaaggatatacttcttggttttggttcagatggggttaacgaggaacgcctggatgatattagtatcacacagataggaaacgtcgtcggcaaactacatgatggaggccttgttcatggtgatttagaactgtaacaattaattggtggttcttattgatttcggtctgagttttatataaataattcccgagggcgaggacaaagcggtggacctatatgtgctagagagagctttgatctccatgcattcgtcccgtggggatgtggtgaggagactgcataaattggcatccaagttgtcttttgctgattatatgcatacattgattcctttattcggtgactttattttggggaggccaatgacgtatacgggttacggttacataagcagccaacaatattggattcatcagtaattgaaatgtctggtcaatatttgggtttgcttgagcttggctgttattccgcacttgggtccgactaatctgtgccaatgttttctggctatatacaacacaaaactagtccatccgcatcgtggatttgttatttttttcctttcgtccgtgg

SEQ ID NO: 34123 - DNA, 278 bp, Zea Mays
atcacaagtaagatggacattgcttaagtgagacttggtgtgcgtaactcagagacaaccgatcaagccaaggatggaggcaagaagagcttcgagttatcgagtgcacgggagaaggtcaaggagaccaggaacccaaagccaggggtgaagaagaagacttgcaaagtcaaggttgatcgagttaagaagacttatggtgcatcaaggatcactacataaggctcaagatcaagctcgagaagtgaacgggggttggggctcagatatgtcaatct

SEQ ID NO: 34124 - DNA, 2560 bp, Zea Mays
tgcatagcctatcgagcgacggcctacgctcaaaaaacacaaatcgctttccgcgccgccgccgcgccgccgaccggcgctcctcacctctcccgccgcacccatcgtccccccgttcccggctaaaccctgcttgagccctagacaccgcccgcctccgggaggtagagagcatgcacgccaggttcctcagcgcgccgtcccctgcctccgccgccccctccccgtacgttcgcttggccttcacgggcgccctcccgcgccgcgcgtgttggaagccgcgaggccccgcgtccgcgtccgcgccgccgcctcggcctctccactcgctgtgcgcccgggcctccatgcagcccgcctctcccgcgcacgacgggcatggtggtccgccggtgcacggcgtctccaacaccgtcatcggggtcctggggggcggtcagctcgggaagatgctctgccatgcagcgagtcagatggggattagaattgtcatcctcgaccctcttcccggctgccccgcgagctcggtttgcgatgagcacgtcatcgggagcttcaacgatggggacacggtccgggagttcgccaagaggtgtggggtcctaacagtggagattgagcatgttgatgccgccacactggagaagctggaaaaacagggcgttgactgcgagcctaaagcctccacaatcacgattattcaggacaagtacaggcagaaaaagcatttctcaagatacgagatcccattgcctgacttcatggaatatagaggaggctggggaaaagtttggctatcccctaatggtcaaaagcaagagattagcatatgatggtcgaggaaatgctgtagccaagaacaaagaggagctatcttctgttgttgcttcactgggtgggtttgagcggggcttgtatgttgagagatggactcctttcgtaaaggagctttctgtaattgtggcaaggagcagagacaactctactgtctgctatcctgttgtggaaacagttcacaaggaaaatatatgccatgttgttgaagctcctgctgatgtatctaacaaaataaagaagttagctactagcgtggctgaaaaagctatcaaatcattagaaggagctggtgtctttgctgtagagttgtttttaacagaagatgatcaggtttttttggaccatctacatattttttcaaaatttattcctcttggagtggtgtttacatcattatccttgtgttgttctttctctagattttattgaatgaggtagcccctaggcctcacaatagtgggcatcacacaatagagtcatgctacacctcacaatatgagcagcatatacgcgctattcttggccttcctcttggtgatccctcaatgaaagcacctgcagcaataatgtacaacatcctgggcgaggatgagggtgaagcagggttctttctggctcatcagcttatcagtagggcactaaccattccaggcacatcggtccattggtacgcaaagccagataagtgtaaaatcacgcttggacaacttgctgcaaagaaactcgtctgatcccaaggaagttagccctcgtgttgctattataatggggtcccaatctgatcttcctgtgatgaaagatgctgagagggttttgaaagagttcgacataccttgtgagttaactattgtttctgcacatcgtacaccagagcggatgtatgattatgcgaagtctgctaaagacaggggtttcgaggtcataattgcaggtgcaggcggagcagctcatttaccagggatggtggcttcattgactcctcttcctgtaatcggagttcccattaagacttcaacactatcaggatttgattccctcctatctattgtgcaaatgccaaaaggtattcctgttgcgactgttgctatcgggattgcagaaaatgcaggtttgctggcagctaggattctggctgcaagagatcctgagctccaggacagggtaactaagtaccaggatgatctgagggacatggttttggagacggcagaaaggctggaggaccaaggcccggaggaatttctgaagggaatggattgaccccttttgaagccctggctctggggcctgggaggaatacgagtgtattatgggtcggcgataactcactgtccactcgattatggtttaagatggggagtcatcaagaagatactttaataggctcggctgcattcgattttccttacaattcttttttgataattgtgctatcttaacccatctcaacatgcccttttcccttctaatatagggtatgaattttgggtttagagggggaaaaaagaatgggagtaaacgttgtacgtacgaaaaataaaacggttcgagtaacgtaaaaaacatgcctggatttttcagccgcacaagttgctttgagtcaagtaattgtacatattccctccgttctaaataaggccttgtttggttattaccattgttcatggattggatttggttattatcattgcacatggattgaatgagattataaaaaattaag

SEQ ID NO: 34125 - DNA, 3748 bp, Zea Mays
tttgaaataggagataagatggggcttatcaccatacgagaagaaaaaatatgtatggaaaatgctttacatttatatgctgggttatgatgttgattttgggcatatggaaactgtctcgttgatatctgcaccaaagtatcctgagaagcaggttgggtatattgtgacatcttgcttactgaatgagaataatgatttcttaagaatggtaataaatacagtaaggaatgacataatcggacgaaatgagaccttccagtgcttagcattgacaatggtaggtaacattggtggtaaagaattttctgagtcactagccccagatgtccagaaacttcttatttcaagcagttgccgtcctgttgtcagaaagaaggctgctctatgccttctgcggctttataggaagaatcctgatgttgtgaatattgatggctgggctgaccgaatggcacaacttctagatgagcgtgatttaggtgtgctgacatctgtcacgagtctttttgtttcactagtatccaacaatgttgaagcatattggaattgtcttcctaaatgtgtgagaatattggagaggttagcaagaaatcaagatattccacaagagtacacttactatggaattccatctccttggcttcaggttaagacaatgagagctcttcagtacttccctaccattgaagatcccaacgcaagacgagctttgtttgaggttttacagcgcattttgatgggtactgatgttgttaaaaacgttaacaagaacaatgcctcacatgctgttctctttgaagctcttgctctggtcatgcatctggatgctgaaaaggagatgatgtcacagtgtgtggctcttcttgggaagtttattgcagtccgggagccaaacattcggtaccttggtctggaaaacatgactaggatgctgttagtaacagatgtgcaggatatcattaaaaggcaccaggctcagatcatcacatctttgaaggatccagatatcagcattaggagaagggctcttgatttattatatggcatgtgtgatgttacaaacgcgaaggaaattgtggaggagttgttgcaggctgaatcctcttctcttacctcacagtaccttgatacagcagaatttgcaatgcgtgaagagttgtctctgaaggcagctattcttgcagaaaaatttgctccgcaactattgtggtatgttgatgttattcttcaacttatagacaaagctggagattttgtaagtgatgatatatggtatcgagtggtacaatttgttacgaacaacgaagacctacagtcatacgctgcaactaaagcgagagaatatcttgacaagcctgctttacatgagacgatggtcaaggtgagtgcctaccttcttggggagtatggacatcttttggcccggagacctggctgtagccctaaggaattgtttgctattataaatgataaacttcctacagtatcggcaagtactgtagctattcttctctcaacctatgccaagatattgatgcacactcaacctcctgatgttggactgcaacaacaaatcctcacaatatttaaaaagtacgagagctatattgatgttgaaatacaacagagagcagttgaatattttgaactaagcaggaaaggtcctgctttggcagatgtgttggctgaaatgccaaaattccctgaacgtgagtctgcactgttgaagaaggctgaagacgctgaaattgacacagcagagcaaagtgccataaagctacgcagtcagcaacaaacatctagtgctcttgttgtagctgatcacccccctgcaaatggatttgcaccaccagttaataatctcactcttgtgaagatgccaagtcaaactgtttctgacactcaggagagtggagtaagttatgaagaagctcctaagcctcctgttgaagctcccaaagaaaatgggactcctgtcgaagtgcagaacagggacacaaacattactgaaatcaacaatgagattaaagctgaacctccctctacatcccattctacctctcccggagacctcctcctggcagatcttttgggtcctcttgcgatagaaggccctcctgctgtagagcaaaatcctgcccaaggattgaatgctaatcaaagtccagctggtgacttggcacttgctacccttgatgatcagtccaactcagttcagccaattgtcaacgtcgaggagaagtttcatattttgtgcacaaaagatagtggggtgctgtacgaggatccttacatccagattggcttgaaagcggagtggcgtgcccatcatggccgtcttgttcttttcctgggtaacaaaaatacttcagcccttacgtcagtgcgggcgctgattttgcctcctagtcatttgaaaatggaactttcgtcagttcctgatactattcctccaagagcgcaggtgcaagttccccttgaggttgcgaatctccttgcaagtagagatgttgcggttctagatttctcgtatgcttttgggacttcactggtggatgccaaacttcgactccctgttgtattgaataaatttttgcagactataactcttacccctgaagaatttttctcccagtggaaagcgcttactgttcattcgctgaaggttcaagaagtggttaaaggtgtgaaacccatgcctctttctgagatggctaatcttttcatgagccttcacttggcggtcgctcctggacttgataacaacccgaacaatctggttgcatgcacgacattcttttctgaagcaacacgtgccatgctttgtctgatacgagttgaaacagatccacaagacaggacccaactgcggctaacagttgcctcgggcgaccaatatttgacattcgagttgaaagagttcatcaaagaacatctggttgatatcccaaggactcaggtcgccccacctcgcgcagcagtccagccacagttgcctactacagcacctgccacatacaatgaccctggtaccatgcttgctggattgctatgagaagtaacccgaaggaatagtgttttgatgtacatgacagttatttaatacgaggatctaacatctccacaagcatcttgctgccaagacgtacacgtggagcaaccaagaaagagctggcggagtgtagtctccatgaggattctaaaccgagaaagagcttagattctttttgtgcggtttgaaggccccctccctctccatgtagcagttgccgtattgtgtaagcgtaacttgttgtttctcattattatcatccccttttggtccatttgtataacctgtatcgcccatgtctggtggtggacaatcggtagtttttgtgtgttaatataaggtgctaggttttcccaccatgccgattgtaaagttgccctggtgcgcattgcactgcgatttgtacggaatagggaaggaaaaatttataggttttgctttgtgcatgttctatggtttgcatagctcccatctcttgatttcctttttcttctgctgctatgtggtggtgtgtgatggttcacgaggctcgattgtataatgtaacctggttggaaccggtgctccttttcttttggagttcccaattcatggatgtacacctgtgtctctctctctcacgcacgactcaatgatggtgcgtgcttggtacgataacaacagctgctagagtagacaggtgatggtgtggac

SEQ ID NO: 34126 - DNA, 554 bp, Zea Mays
aaacattttggctcaattttttttgaagaatttcactgacctctctaattaatttttttgggtgttacaactgcatggtgaggaagtgatcccaccatgtcctagcggatccatgaagctactaggcggcgaatctaaccttggctgcatcagggcacactcccgtaagtaatggaaacttggatcccaccacatagagccatacgtctgcatccaacgggtctttcgctcgaatgaacaactgtggctgcgtgctgaggaattctttgtaggtagcgaccatttgtggacgctactgttgcccaccacctccaaagtgccaaggctgaggttgaggctaacattgcaccagctatcacaaaatttcattctgctgtgccatcagctcttgcatcatgggagcctatggtggtggcggaggaacatgccaattttgtccacagtgcactcttcctgccatctaaaatgcagcaatccctgttgttatactcatgccccatacttgtgaaatgtgacttaatgagtaatgagtaagcagtaaatcttaagtttcc

SEQ ID NO: 34127 - DNA, 2264 bp, Zea Mays
aaaaaactgaccattttttattgcaaggaaaacaagcaccagtttggctcgtctcggcctcggcgcgtgcccccgacccgttgctgaccccgctccccggtgatctgatgtcggcggcggcacgcgcgccaccgccgccgcgcgcactctacgcgccgtcgagaagagtccctttcggtgccgtgatcctatccgcgccgcgacccggggctagggttcgcgcggcgcggcctcgcgaggggaatgttcataaccattgcctgctgacatcgtctagtctgaattcaagttctttgctatgtcctccatgcaattgtgctcaaatggctttggccgacacaagaattgcttaccagcctgaagtcgacaagcatgctggagttctggcctatgaactggttcaagggaatcttgttcagtggaattcatttatggacaaatcaatacctgatccaccaacagctgttcttcttcatggcatccttgggagcaggaaaaactggggatcttttgcgaagagattggctcaggaattcccaatgtggcagttcctcttggttgatttgcgctgccatggcgactcaacatcaattaagaagagtggaccacacactgttgcctcaactgctcttgatgttctaaagctgataatgcagctcaggctaacccctcgggttttggttggtcacagctttggtggaaaagtggccttgagtatggtagaacaagctgcaaaaccacttgctcgtcctgttagagtatgggttcttgatgctactcctggcaaagttcgggccgggggagatggtgaagatcaccctgctgaacttattgaatttctcagaagaatgcctgagcaggtttcttcaaaacaggaggttgttgatgctcttgttaaaggacaattttctatggacgttgcacggtgggtggctacaaatctacgtcgaaccagtccattgggtcagcgaccatcttcaagcttctcatggacttttgatctaaatggcatctctgagatgtacaagtcttatgaggatactaacttatggaggattgtagagaatgtaccaaggggtgttcatattaattttctaaaagctgaacgaagtttgcatagatgggctctcgaagacctccaaagaatttatactgcggaggaattagctgcagatgagggtggaggagttgaaatgcacgtgcttgaagacgctggacactgggttcatgcagacaacccagacggtctctttagaattctttcgtcaacctttcgaatcgaaactactataagaggaatgcaggactgaggatcaaacctttatcgatccaatgacaatagaggggaggcatttctgaatcgattctactgtaagaggaatgcaagaggatcaaaccttaattgatccagtgacaatctgagaggaggcgctgacactatcagaagatgtgtacattacaagcagggaggtggagccagcatttttctgaatgataggcgtctttgttcatttgttcattcttttttttacaaaaaaaaagagtatgtaacatgagttatacaactaggctgttcttcgagaaacaacctgtaactgtctgtcatatacttgacgaatgagaagcgttttcgtacctgttttagcctgaacggttcagttgtaagatctcgaattaaactgcctgatttgcagagtctagaaaaaaaatgttcctgatagttgcctagagagggagggggacggggttgaatagacgacagtacttgattcacttagaacaaaatgaacaattgtcaaaatataaaactaagatcttttcttgcagatgtgttgctttcaaataatgcagaataaacttatatggtgtttgaatgcactagagctaatagttggcggctatctaaaaagttgtagtcattttcctaatctttccaaaaagttatgaatcactctttttggtggtttaaatcttcggttatagatatttgaagtatggattctgaatctgtctaaatctagatagatacatctttttcgtgttgattgaccttgataggtacgttagacataccgcataaaggatgtgacgttcgagctaaaccacaagacgatgagttggtggacttatccagaagacaatggactgatcaagggtacgttcatcaagcgggtgtcgtctaaccaaaacactaatctaatgttggattccaggttgcaggagttgtttggaaataatcgctgcatttactcttgattaccttt

SEQ ID NO: 34128 - DNA, 1889 bp, Zea Mays
ctttggaaaaattgatttcctaaactagccctaatatggtactcgctgctaatgcgaccacagggataacttcccagtgtgtgttctattcttagtttctctgatcggctccaaattgccttgttcccatggtttatttggactcgaggtctctcactgatgatggatgtaggcagtgttcaacaatatcaggaagctttctcgtaccatcactgcaatcgtcgaccccacatggcagcgaaacggaaacggacgcgacacgctgcaacgttcgggagtaccagcgacgaacccaatcccaatccctatcttccgagatttgtctgcgcccctgcggcgcgcatggcgccacgactgaccgtggccttgggcggcgctcgggcatgagtacatggcgctcggtggcctcgcgtcgcgttactcacccaccggcaccgcgccacggccgcgttcgtctcaacaggagccgatggccactctcgcgccacggccacatatcctcctcggcttgacaaggccgcagcccatagcgcttcgtgcctgcgccgccttctcccgctcccgccacgcgccagtcccaccgcgggccgcgcagccgcggcgcgtcttcctcggccttggcgctgccttcatcgaccaggccacccgcatggcctccggcggcacctcgtcccgctctttcgttgccggagcgcggccgaggcaaggcgtttccccagtcgagcagattctcaagaatgtcgagtggccagatgagttccctttcaagcctgaggacttcagccgcttcgacgaatcatcagatactctgttctactcggttccacgttttgtcactcacattgatgaccaagcaatccaagctctcacagagtactattctgaagttcttcctccaagtaatactcctggggtggccattctggacatgtgcagcagctgggtcagccattatcctcccggttacagacaagagaagatcgtggggatgggtatgaatgaagatgaactgaaaaagaactcggtactgactcagtatgtcgtgcaagacctcaatgtgaacccaaagcttcctttcgaagataacacttttgatgttatcaccaatgtggttagtgtagattaccttacaaagccaatagatgtttttaaggagatgcgacgaatactcaagccaagcggccttgccataatgagcttttcaaaccggtgcttttggacaaaagctatatctatatggacctcaactggtgatgctgatcatgcatggatagttggtgcttacttccattatgttggaggttttgaacctccccaggcacttgatatatctcctaatccaggacgaactgacccaatgtatgttgtatgctcgagaaagaaaatagggtaactaaacaatatatttggcaagtgctatcaagaaacaaatagaaggaaaaatacaagaagcaagttgtttggccctgatcgcaggacctattggtgagctgatgtttccgtgagtaatgtaacgacagaaaaaagaagcaactactacataaactatttatagaagcggcagattcacttcataggttgtagcaactgtctttactaaaagtgtgtttggtttgaggaatgaagtgatccatcttcttctcactcctcacttttttatttggtttgtgtaatagaatgagttgatccatcaccactccattcctcgtaagataataattagtatatacatgaggggtgggttgattccaccaaaattgatagaatgaacttatgatgcatcacctcataaagcatagagtgactgcacaaaccaaacacaccataagggtatgtagaaatgatttattaaaataatggtatttattaaataatactacatccgtatt

SEQ ID NO: 34129 - DNA, 3087 bp, Zea Mays
catttatacgccctgttcgtccttttgaaatagctaggtttacaagtaacgtttgcacaacaatagtgaactaggtacacactacaagatgacaactgaggtcaatcaaaacttttttgcatggtcacaggaggaaacttcggtgcaagatctttcacagggaacatcacaaatgtttggtcatggttccatatcttttggaagatttgacttggaatcattagaatgggagaaatggtctgtatttaccaatgacaggcgtcatgaagagtttggaaagttcaatggattagttgcgaagaagaaggcatactttgaagaatactttaagaggattagggagcttaaggctttacagcaacaggaccagcaaactgaacttcatctggagtactgtggtgatggcagcgattctagtcaaacaggagaatatgaaccagctgcagcccatggagctcctactgaatctgaaacacttgttgaagattccacaaagcagacagcagctgcaaccacgtttgaacatggaacggaatgctacggttatcatgagaatgggagtttagttaatgaaatttctgcaccaacccatttttcacctgttggtgatttgcagcatataggcaaacaaatgaaaggaagtgttagtggcaaaatggatatattgaagcaagatgctaattccagccaagatgttcctatgatccatgagattatgatcactcctaacaaacgagcaattgagaaagactctcgggttggtcaggcttcaaaaacaatttcgaagactgtcaaggtgacttctagtaatgtttctgatcacacatacgtttccaagggaccctgttcaggcgagcctagtgtgataaaccagatggcgaaaccagaaaatatcctgtcattgcggaggccaagagaagcaaccagtgatttagttggcaccacagcaagaagtggtattacaggtgtaagaagaccttcagcagcattacaacggccctctaccaaagaacggcgacctgtcacaaaagatgcttcaaggaagcatgctgaagttaccaccccatgccgtccatctacttctgaaagacgcacggtgaccggagagtcggcactaaagcctgaaaacaatgctattccatgtcgacctgttaccgctcacagacgccctatcaccaaagaatcagcaacaaggcaatgcagcattgctacaccacgccggccttctactgctgacaggcgccctgccaccaaagatctaacaccaaagctatccaacattgctgccccacatcgaccttctactgctcacaggcgccctatatccaaagagtcggcaccaaagcatttcaatgttgctagcccacatagaccttctactgttgaaaggcacactagtggcagagatatgacatcgaagtatgttggtattgctacctcatatctgccatctgctgtcaaacagcgccctatcactggagagggtgcacataagcatgctgatgttgtcaccctgagctgttctactgctgataggcgccccattagagacgttgcaccaaagtatgccactttagctctgccaaggagaccgtctactgccgagaggcaccccattgctagagatattgcaccaaagaatggtttatcactcagaccttctactgcagagaggcgaaccattgctagaaatgttgaaccaaagcatgcaccggcacagaggccttctactgctgagagacgtcctgttaccagagagactgtactgaagcaagctaatgttgccaactcatgtttacctttgacgccagatagacgcctcaccaaaaaaggtgacatttccacccttgagtgcccttctacaggaggaaggtgccctatcaccagtggtactgcactctggtcaagaacaatgccgtactattcaaagggtgctttggtcacagaagttactccccagaagacaataactcccagggttgttagaaacagcaagctagaaaacctaagctatgcaaaagaaagggtggaacttcaagtggatagaaagcaaaagtcaagtctttttaacctgtcctcgaagaaaacattgacttccaacgttagagatgaccaaggtcttgaaatgttcaaaaagccaaacaaggaggggggagttcgggctcatgcatacaaatcaaataatgcaactacttcatggaccggaaatgtaaagacaaaggctcctgtgcctccgcctctgccaccgcgccgaccgtactgcactgagaagaaaccgaatgtcaacagttcacctgttggtggaagaaagacaaaggcctcagctccacactggcactgaccccattatctaggatcctgcagcataactctgaagccgtgaaggtaaaagctatgcgtctgacgtgacctagaaggctgcatccatcaagcaacgattgatgttatctattgtagcttaccagcagtcttgtgacttgtcacctgtgttagaataaccgtagtagttagtgtatgtagcaacgcgtagcatatatatatatatatatccactaatgtctaattgaaccgtagtagaactgccctggatttaactagaacattgtatatacctggaataattggagcttgagtatcgaaccaggagttatccgcacggttttgcaggtcacatcacatgctgctttgaaccgttgagagatgttcatctgtttgctgtccgcgtacctgtcttcgtcctgcacgtctcttctggaactgattgccagccctgtaataaccagcggatgaaatctgatgaaaagttgggattttgctgatgttcggctccagaacaagctgcagccactagactacagtgacatgcctcccatttggcgtcttcaaagtagtgttcatcacttcgttcttcaaccccattcttaatgactcgcggtccaacgtattagctctcacccctaacatattcaacctaacatattcagcagcatgtagagtggctgatgtaagtgcatgtacaactctattcaatagagagtcttttttgaaaggtttttagggctaattaaaaaatataaaagatgtgct

SEQ ID NO: 34130 - DNA, 4680 bp, Zea Mays
cttgctttccgccccccttccgtcgcagcgtcctccttccacggtgaagaggagcgaccgcgcgaggacacgagacgagacccctgttcaatccccaatctggaatggtgatccgcgacgagatctgagagagagcgcctcgcaagaggcccgccgtccgcttcccccctccccacggcagccttccacgcgatggcgtcctccgcggcgccgccggcctccccgtcgtcgcgatcgcacggcaatgcggcgggcgccggcagcagcgccacggcgatgatgctcccgggccctccggggcgcggcaacggcggctgcatcgacctcagccccgcgggcctcctggcgcacggcgccgggagcagcgtcgttgtgtccgacccgcgctccatgcagctcctctgcgtgctccccatgccctcctcctcactcgcctccttcgtcaccgccgtccgctgggcgccccccgacacgccctccctcgacgacgacgacgacgaccgtcgcccgctccgcctcgccgcgggggaccgccacggccgcatcgccgtttgggacgcccgcgcgcgggctgtgctccactggctcaacctcgacgaggcgcgcggcgttgcgccgggctccgggggcggggtgcaggacctgtgctgggtccaccacggctccggctggcacctcgcctccatccacggcccctcgctgctctgcatctgggagacgtccaacagcccgcgcgtcctctggatgttcgacgcggcgcccgagtacctctcctgcctccgccgtgatcccttcgacgccaggcacctctgcgccattggccttcgcggcttcctcctctctgcgattcccaggcaggactccgacatctctctgcaggagcaccgggtgaactgcggtgcaggggatgtcgccgacctgcagaggctggagaaggagatttcagcacctgtacccgccccggcgctcgcggcgttcccgctcttttcctcgagaatttgcttctcccccctgtggaggcagatcctcttcgtcaccttccctcgggagctcatcgtctttgacctcagctacagcactgcgctttctgttactccattgcccagggggtttggcaagttctcggatgttatggccgatcctgatatcgacatgctctattgcacccatctcgacggcaagctgagcatctggaggcgcaaggagggtgaacaagtgcatttattatgtgctgtggaagagctcatgccttcaattggtactgttgttccttctccggctgttcttgcagctacaatatggcagtcagagtctattttccgaagcattgaaaaacaatgtcaggatttggcacagccacattctttcatgattgatacaaattcagaccagaatgcttgtcaagggactatgacatatctaacgtcgatatcagaagatggcaagatctggtcgtggcttttgaaatttgacaagtccgcacttcctagcaaagctaatctaggaaccaggtagaccgagccataacaatgctgcaactgccaacacatgctccaatagacctgattttataataaagattaatttggtgggacaacttcatcttttgtcatctactgtgactacactagcagtgccatccccttcattgcttgccacagtagctcgtggtggaaacaatcctgctccagcagtgccacttgttgctctggggactcagaatggaactattgaagttgtagatgttgtggcaaatgcagtttcagccagtttttccgttcatagcagcacagtgagaggattgagatggcttggcaactcacgtcttgtttcattcacatataatcaggttaatgataaaactggtggatacaataataaacttgttattacatgcttaagaagtgggctaaatcgctcattccgtgtgctccaaaagcctgaacgtgcaccgattagagcattgagggcttcttcatctggacggtaccttctgattctgtttcgcgatgctcctgttgaagtgtgggctatgacaaagaaccccatgatggtccttggcgcttccttttacagtattagaatggacactgccagctgcacctcggccaggtcaaaatgcatcatctaaacagtcttcaacctccaaggagcgatcagcagaggcttctggtgcagaaagttctgatgaaacatgtgaaagttttgcttttgcattagtcaatggcgctcttggtgtgtttgaagtgcatgggcggcgaatacgagattttaggccaaagtggccctcgtcatcatttgcatcttcagatggtttggttactgctatggcttaccgccttccccatgttgtaatgggggatcgatcaggcaacattagatggtgggatgttacaagtggcctttcttcttcttttagcactcacagggaaggcatcaggaggataaagttttctcctgttgttcatggtgatcgaagcagagggcgcatcgctgtgcttttctatgataatacattttcgatatttgacttggatagtccagatcccttggcaaatgcccttcttcagccgcagtctcctggtacccttgtcttggagcttgattggttgtcaacccgaacaaggaaggatgaaccacttatgttatgcattgccggagctgatagtagcttccgactgattgaggttaacattgatgctaagggcagttctatttcgaagccagtagctacgaaagagaggtttaggccaatgccattttgtttgccagtattatttccaacggcccatgctttggctttgcgaatgatacttcaacttggggtgaagccttcttggtttgaatgcaatagtagtgataaattaactggggacagctttaaggtagcaccaacatttggagatcttcgtagttacatgattgagacaacactccctcctattggtgacgccgttgtggctgaattgctccttaaagtgttggaaccatacagaaaggagggttgcattcttgatgatggaagagccagcctatattcagctatagtgaacaagggagcttgtgcaagatttgcatttgctgctgcgatttttggtgatttccaagaagcacttttctggctacagctgcctcaagctcttcgccacttcctgggtaaatccacaagtagatcaagagagaagatctcacaatcaagtttacatcctgattctgaacaaagctccagatttaatcggatagcttcaagagagagatctgcttctgaaaagttcacgaaaaatgctgcgaattatgggcaattaagctcaatggcatttaatcaagagcaactatggttcaatgcaagtgaaaggataccttggcatgacaagctcgatggtgaagatgctttgcaaaagcatgttcatgagcttgtctctctcgggaacttagaggctgcggtttcattgttactttcaacgccacctgaaggatcaaatttttacccaaatgcattaagagcagttgtgctgtcatctgcagtctcacaatccttgcatgaacttgcagtgaaggttgttgcagccaatatggttagaacggacaaatcgctatctggcacacatcttctatgtgctgttggaagatatcaggaagcatgttcacagcttcaagatgctgggtgttggaatgatgcagctactttggccgcaagccatttgcatggatctgactacgcaagggtgctgcagaggtgggccgattatgttcttcgtggtgagcacaatatgtggagagctcttatcctatacgttgctgctggagcactgccagaggctttggatacacttcgcaagagccagcgcccagataccgcagccatgttcttgctagcttgccacgagacctactcacaagccttatcagaatcagagcccgaggacgacacttccgtgttagcactgacgccgacgccggagcagacggagaagctccggttcccttccaagaatgtggccgacgaggacctgatcgcagtcagtgaggtcttcgggcagtaccagcagaagctggttcatctctgcatggacgccgaaccgacgtctgactgaatcgcacgccttgtcgcatggcagactgatgcgggcgtggattctccgtttttgaagcttattattatcaacaggttgcaaattccttccaagtttctgcgaagctttttgttctgtctgttggtaggtaccagacgtccagacatgacatcgggactgctgatgtggcagaatctgatggcaggaggcaggaacagacatgcagtgctgtatcgtaggtgccaatggttggcactgtttatacatacgtaagcatttgtatttggtacaagctatgttttttttttctttggtgcgcaaagagcgagtgcgcagcgaacttctcttgtggccgagatgagatgagaacagatgccatcgaggcagcagcagacgatatacttacacctgtacacccatgacagtttttgtctgaagattggttattatatgcttatctgcaaatgcatcgcttcaggccctggagacatcgctgtcactggatccatcgtcattgccgatccgtgcagacattgttttggaggtccgaaagctacgttcttgtcgcattcaagccctccatgattatggatgatggataatgata

SEQ ID NO: 34131 - DNA, 2264 bp, Zea Mays
ctgaaccgcgcaacttactaccagcatgttagtgtatagtctttctattttctttcttctctctcctcagtctgttcttcctactcccgatccattcgcagagggcagcagccacctcctctccccgcggccgagctcgcgcctcgcccgccgcctgaactcgtcttgcctgcggccgatctcccccctccgttcgccgcgccgcaacccggagaggagaccgcgctcggtcgagcaccccctggggcagcgtcctcgcgaccagctccggcgcggcgtccgccctcagcagcccgggtgtccccgggaacgtctccggcgcggccggcacacagctcgacaggcttttcagttcagtgcagtgtaccaagattctctgttaatttgtgtatgagatcagttaactgataaagacatgtgaagaaccagtgatcagtaatctgtacgcttcagattgtagtatccttgagatggatggaagagaatcaggcttatggtaaatcctggtgaatattcatgggaggtcagcaagttctggcctgactaagactagtaaaaatacggtgcttcatctcagatcatcaatgattcctggtggatgggcagcacagagaataggaggtagacgtgtcctgctactgtcatttgtattgtggtcaatgatatgtggtttaattccacttgatcccaacagagtaaccattctggtcctttctcgcctattcgttggtgtagcacaaggtttcatatttcctgccattcacactgtcctggcacaatgggtgccgccgcaggagcgctctcgctcagtatctcttactacctcagggatgtatcttggtgcagcctgtggcatgcttttcttcccaagtctggtgaagcacatgggaccccagtcagttttttttgttgaagcagtgttgggagcagcatggtctgtaatatggctgaaattttccagtgacccaccccgtactgatcttccaaaggtatcaatgccaaaagtgccatctcgagacatgattaaggcacaagcaggaggggttgtggcacctcgcacggtaaagatcccgtggcgaaggataatattcagcctacctgtttgggcaatagttgtgaacaacttcacgttccactatgccctctatgttcttatgaactggctccctacctattttgagctaggccttaagcttagcctccaggatatgggttcctcaaagatgcttccctatttcaacatgttcattttctccaatatcggcggtgtggttgctgatcacttgattacaaggaggattctatctgttaccaagacaaggaagcttctgaacaccatcgggttcatcgtctcagcgtttgcactcatggcccttcctttgttcagcacaccgtcaggcactgtaatgtgttcagcgatatccctcggttttcttgctctaggaagagcagggtttgccgtgaaccatatggatgttgctccgaagtttgcagggatagtgatgggagtctcaaacacggcggggacactggctggaatcgtcggtgtcggcctcacgggcaatattctggaggcggcaaaggcttctaacaaggatctaacggactcggaaacctggaaaacagtcttcttcgttccagcatacctttgtattttcagttccgtcatttttttgatcttttcgacaggcgaaaagatcttcgaataaagggtggctattactttttttgccaattcttttcttacttacggtgaggcaggattgtgaaacgggtatcttacatgtatctgtagcatttgttacaaaattttcagattttagactgcatcacatacacgatcagaggctatgtcaggagatcttgcattttcgttatgatgaagactcggttcattggcagtcacactcacactccaatgcagctaacagaatttgcttctctcccaggttaacttcttggttttggtacatagtcccaccacaaagtttgtcaagttcccttacctttgccatgcaatgtaaacatatatggtgccaatgagaataaacggcattgctattttcttatctgcatggcccttgttgaggcaaattcacttccttcgagtctctcaaccatttttctggatcttttttttagttgtggtcaactggttatatagttggtctttccagcgttgacaggatttatgatttttttgttgctcttcaacgagacaaggcttaacattcatagatatgactccattattactggtcttt

SEQ ID NO: 34132 - DNA, 2091 bp, Zea Mays
cctttttttcacgcgcgacgcctctgcgcccccgccgcccgtcaccacccgcagcgagccttgctcgtcaccaactcaccatcacgcgcgagcgcgacgcttcagctctctctcgttgaagagctgcatctccagccagtgcctagcccgtcgagggaccggtcgccttggcggactcccgctggtgctcctccacgcccatctctctcttttcctcgctgcagccacggatcttggtagcagggacgccaccgcatttccagaatccaaacggaattttacaggaatcgcgctggaatttcacaggaatcagttcaatttcacggaacaaacgcaggagcaaggaaattttgtcacgttcccctcatttgtttccttcggcgacgactaggcgagtgctgcccgctcttcacgaggttttcacctgcgagtctgcgacgaacatcctccagttgatcttctggctggaaaatcacgttgacggtggcaagtaggggttctatcatccgcagcctcatctcaagaagcaaaattctttcatgatccctttgaaccggagggcaagcctgcccagggctgggatggagtactttgatgcaaggcggaagcctcgtaatgttggaaaaatcattgcagccctggtcctcacaacactctgtatatttgctctgaagcaatctcctggttttggtggcaatagtgtgttttctcgccatgaacctggtgttacccacgtcttagtaacaggaggagctggttatattggttcacatgccgctttaaggctcttacaggatagctatcgagttaccattgtggataatctatctagaggaaatatgggagcagtaaaggttctgcagggcttatttccgcagcctggtagactacaattcatctttgctgatctgggggaccagaaatctgtcaacaagatatttgctgaaaatgcatttgatgctgtgatgcactttgcagctgttgcttatgtgggagagagcacattggaaccccttaggtactatcacaatattacatcgaacactttactgattttggaggctatggcatctcatggagtcaaaacccttatctactccagtacatgtgctacctacggagaaccagagaagatgcctattacagaagccacacctcagttccctatcaatccatatggaaaagctaagaaaatggcagaggatatcatattagatttctcaaagtcgaagggagctgacatggctgtcatgattttaagatatttcaatgttattggctctgaccctgagggaagattaggtgaggctcctaggccagaactccgagagcatggtcggatatctggggcatgcttcgatgcagcattaggagtcattacaggattaaaggttaaaggaacagattatcccacaactgatggaacctgcataagagattatattgatgtcacagatttagttgatgctcatgtgaaagcactcaacaaggcagagcctagaaaagtcagcatttacaatgttggaacaggaagaggtcgctcggttaatgagttcgtcgatgcctgcaagaaggcaactggggttaacatcaaaattgagtacctcagcagaaggccaggagattatgcagaagtatatagcgacccaacaaaaatcaacaaggagctcaactggacagctcgatatactgatcttaaagagagtctgtcagtcgcatggaggtggcaaaagtcgcatcccagtggctacgggccaaatcgaatatagcctgctgatttataattcactgaatcaatacatattaattctttagttagcgataaaaaaatcttgctatgacactcctctcaaaatcactccgtattcttctcgttctttttatttcaaaggtttgctgtttttttactagtagaaacatgaacggtgatttggatacaaaaaacttgtgatgacaatttcattgtttttgacacaaattgttgatagaaaaaatgtacatttttcagccagtgagctgcaaggtttggttgcatcgagttaagaaaaaccttatgttgtgaccaatggaaatgctgtggattttgtgctg

SEQ ID NO: 34133 - DNA, 2174 bp, Zea Mays
cgcgatccccgcctcaattcgggtgctccgtttctggatcttgtcttgcttggtccgggggattctctccagctaagctgcgagcaatgcttcgcgggatagagaaacgccagcgcaacaacggcgaggactcgtctccggaggccaacgactccggcgagctcgacgaccggaggagcttggaatgctccacctccaccgagatgtcgagcaacagcggccacaggtcaagaaaccgtgccccggacgacgacagcttcgactcggagagcagctcgtcggggccgccgacggtgaagaggtcggccgcggtggccgcgttgctgccgcccttctctcggccaacgccgtccaagtgggacgacgccgagaagtggatctccagcccgacgtcaaaccgtactggccgtacggggcctaccgctggagctgtgccgaagaagtctgcattggccttccctgactatggaggccgcccgccagccgttgctaaggtggtagcggatgtgcctaccaacgctggaccagatggtctcgcccatcctgatttacttaagcctggacacaatgcttcagtagttgttgacggaacagcacctgcagttaggtctgtctgtatgagagacatgggaacagaaatgactccaattgcgagccaagagccttctcggaccgcgactcctataatcgcatctagtccaacctcctctcggacaccaaccccgcaacgcaccgcagaattcagtgtgagtaatatagatcctaaaaagatcgagatgcctgaagaggaggaggtacagatgagtacgagacaggaaattatggatcttggtgaaaggttagggaagaccactatagccgcatgggcaagcaaggaagagaaatctgccgcacgtttcacggataccacagcctacaaggctgccgatatcggtagggagaatcgagccgcagattggcaggagacggagaaggcgaagtatcttgcaaggtttcagagggaggaagcaaagatccaagcttgggaaaatctgcagaaagcgaaaattgaagctgagatgaaagggatagaggccaagatagagcggaaacgggcgcgcgagcaggacaggctcgccagcaagctggcagccgtaagccaccgagcggaggcgaagagggagaccgcggaggcgaggcggaaccaggaagccgcgaggacggaggagcaggcggcccggatccgatacaccgggcatacgccttcgtccttctcctgctggtgctggtgcccgtgacacccagcatggacagtggtagaaaaattccaacggttctatctttccccatgcatgaacatggagaaggaaaccttcccgttatcgcgtcgtcgtcactcacgcggttgcatggagtggactggggtagtagggtggcgccacctgtcctcgtccaccttccacccctctcgcccggggctataaatggttacgagatccggatagcgcgaacccacttggatccaaaccctgacgacggacggctcccccctcgcccccacgacaaattcctcccgttccgttcttcgtcgcagatacaccggccggcagcaaccaccctatggagtcgtcggcggcgatgacgatggaccaccaccgcgcggcgccgtcgctgtcgacggaagagaaacggcggatcgagcgggtggcccggtgcgtggcgcgggaccgggacggcggggacctcacggagaagctgctgctgcggctgctcggcctcacgcgcaacgcccgccgctggggcttcctcgcgccggaccacccgctccacccctactacctccagcacaaggtctccgagcgctgccggatcctccgcccgcgccacgccgccgccgaccggcggtgatcccatgcatatgcatgcggacgtgcagcggatcgaccattgataggactcgatcggccattaaaaaaaaactatgcgcgcaccacctggtctccttctcttttatgacatgagtaattggtaatccaacaatcatgcaacggattcggaaatacattgatgtgcctaattgcagcgtcaattatatgatagcagttggccattgatatttttcagatttgagatcgaaatgtttatgtgccgatctctttctctctatgcataaataggaggcaactagtagaaag

SEQ ID NO: 34134 - DNA, 226 bp, Zea Mays
gtcggtgcgacgatggcggcgcctggagcagtagactgaatcttggtcgctgggagcctcggacggacggcctggacggtggacgctgctcgggcgagggaggacgctgctcggtgaattagctgctcgggcgagggaggacgctgctcggacggacggcctgaacggtggacaccggcctggacggtggacgctgcacgggcggacgcgccggacgctgctcggt

SEQ ID NO: 34135 - DNA, 2625 bp, Zea Mays
gcgaaaaaaaacgagaggggggggagagcaaaccctagctggccgaattccgccgcgcgcagcattgccctcccgcgactcgcgcgccggagctggggcgggcggctgcgtggcgctcccgatcgccggcgatcgtgtcgtcagccggcgctggcgggtgggcgctggggcggcagcgataccgggcagcacggggcccgatcatcgctggcgccgccgccgcggtctggctggctggccgcgggcaaacgtgctgtcggctggtcccgggcgtcgcggagcaagtggacccgggggcaggccgccggagacggcggcgacggcgacggcggacggaagcgcaaggggatggcgctgttccggaggctcttctaccggaagccgccggatcggctcctcgagatcgccgaccgcgtctacgtattcgattgttgcttctcgacagaaaccatggaccaatacagatacaagaattatctggacagcattattttgcagctccgtgaacagtttgcagattcttcattgatggtactcaactttagagatgaaggaaaaagtcttatttcaggcattttctccaagtacaatattacagtcaaagactacccttgcaagtatctaggatgcccattacttcctttggatatcattctccacttcctggggctgagtgaaaggtggcttatgcttgaagggcagcaaaatattctgctaatgcactgtgagaaagatggatggccagtgttggcttttatgcttgcaggtcttcttctgtacaggaaacaatataatggggagcaaagaactctagatatggtgtataagcaagcccctaaggagcttcttcagatgctaaccacattgaatccacaaccgtcacatcttcgatatcttgggtacatatgcagaatggatgatgacatagggtggcctacacaacctattcctttcaccttggattgtgtaattcttagagaaattccaaatgttgatggagtcggtggctgtcggccaattgttcgagtatatgggcaggatattccaacaactgacagaaatcatggtgttgtttcaccaccatcaaaggccaagaaaaatattaggcgttacagacaggcagataatgcgccactgaagttaaatgttggatccttcgtccaaggtgatgttgtccttgaatgtctgcatgtagatgatggccgaggaaatgaaaggttaatgtttagggtgatgttcaatacctttttcatccagtctcacattttactgttgaactttgaggacatcgatgtcccttgggatgccgatcaccagttcacaaagaacttcaaagcagaggtactcttttcagagttggatgctgagtctgatgcatccactgaagtagcacctgattatgattatgatgatgatgatgatatggatgttgcctctgctgatgagttctttgaagcagaagaactcttcagtaatgctgattcccaagaaggaaataaggatgctgatactctttctatagcatctacagattatacttcaactccaagcgccgaacgttggagaaactcaccgttttccaactttgagccgaatattggcattgatggatcacgagacaataaagtcgataacttgggcttgttagaaacagtaaacgatggaaagacatgcacatccactgaagccaatactatgctcaacaatgaaactgcagttgttaagtcaactttggcagctacaatagatggagacgcagatagtggtatttcaaagtctacttataaagtggatgattacatgtttgaaaagggtagttccaagcaggatacaaggatgggttccaatcaagatttgggtcagattgataatgtgttggttaaggaggtgattatattagaaactaatagtcctaaggacatacagatgatcaaagaggtcatcatatctgaagttacaactctcaaacaggtagtagacgggagtatgatggaaactgaattagatgagacagtccatgattcagaaagcattgcattggcagaaactgaggatacaaaacaacttaatattttttgcaaacaggatgagggacacagtgtgcaagatgaatatgctgcttatgacaatggcatagtgattgaacaagaagaaagcagcaacgaagaaaaccttaccatcagagacacaaattcagaagaataccatatcttcactgttcaagcacttcttcggggctaagttctgccaagaaaaatatcgatcagcttcatgcttgcagtagtaatggcactgcagaacaaggggcgggaattgactccaggagccactcttctaatatgtcttgtgtgaacattctaccagaagaatctagcttgacaataaaccatgcttcaacttccatgaatgcaaatacagatacaacagattcatctcgattggtgctaaagaaaaaaccttttcaaccattgttgacatctagtctttttgctccatcatctcccaggcgcaatctgcttcgtggtgcatccacagatttgtcgtttttttctccatcacaaacagaatctaaacagaactctgttacttctacaagtggaagggatgatccagctatatcttctg

SEQ ID NO: 34136 - DNA, 1722 bp, Zea Mays
ctgggtaaagaaaaagcgaaccccatccgtcgcttccatggtgtgctgaaaaatgttcccaccggacatcgtcgtcaatctcacgaattcagatcgggtttaggtaacgataagccgatttattgtttcagatagtgtttgattgatgatttggatatattaattacgtcggtcctttttctcgtagcatatgtgtattgtggtagtagatataatatttattaggatacccgagtcgcttgctgcgatttggtcaaagtcgagtagtgaatcaccagtttgagatgtaggttatggaaatagagcttcagtaggtatacttgtcgagtatatttaaactagttaagttagttttaagtatggatatggccgattgtggttagcaccatcgacctatatcttatgcattttaattcacaacgtggaaacatatgtctagtttaattggattgatctgatgttgtggtgtgcttgtgttcaatggtgaattaatcacgttgtataatgattgtcgatgggtaggtcaggtgagtagtgccttgataggtgtatatgttaaatataattaaataggttccacgtatatgatgagtagtggtcttgaatattggtaaaatgttctgttcatacggtaataggatgaagttagtattttgtagaattctcgagttctaattatattatgtctgattatgttggtacatacataagaattaggttgtcgtgattatgatgatgacttaatcgtaatattatcttgcgatacccgtctttatatgcattcatgtgcataatgcatttcatttaggtacatgaattaaccacatgatgcaaagaaccagaattgagtcgaccacaagatggtgctgatgaacggaactgaagatggacagacgaaacaagtatcagaacaaaagatggtcgtcaggtggacgtcgcctaacaaacactaacctagtgttactccaggcaagccccggtgcatttgccaactccttgatgttttaaaatcttttatcaccttgtttcatgcattaggtgataggagttgtgtgctaaacaattgatgcattttcttccttgaaaaattgattacccctccttgataccctattatgaaaatgatttttatgatgcttagccttgctttagaaaaacaaaaatgttttgttttaaaacaaaaagtgatgcttcagattggatgggaagttttcaaaaataaaacttgatagtggatccatcacggccgtgatgggttcaacatcggaaaagatgtacctctgccaggtaccaaactttgggttgaaatgaataaagctgagaccgggcggttgacttgcacgagaagggagtctcggtgtagtgtctccgtctacgttaattaaggaccgtgtcgatgtaggcttgatgattgatgaccttttaactggtcacatgcctcatcatgggtaagctttgccttgggtagactaataccagaataagataacacgcaatgggagtggagagatggcgagagtagcatgtaccctccgtggcaagaggctggacgatggtgtatctgtgctctcggttggcatgaacctgatctggtcttgtaggaaataggtgatgcctaagaggggggtgaattaggacttctaaaactttcgctaaactgggccacaattaaatccctagagcaaaacatatgcaaatagtcaaactagaatgtgcaaacta

SEQ ID NO: 34137 - DNA, 1381 bp, Zea Mays
cgtgtcgtttctgctgtagtttacttccccaactccaagaaagggtctgcttgtttataaccagcatatcaggtcaacagtaggttagcttagcttctacaaggcgtgcaagggtcagatttgagctggtttcatttgcccccctcctatttgttcatgggtggattctgctgtctccgagactcggaggctgtcgagacgctggcccccaacataagtacaggagaatctgacccagcggcagctgttcctgcggagagcccccatggcatcgaggttggtgttgagttcaagccagtggagcgccccgtggaacctatcaatcttgatgagccagtgaaatgcccgcttcctgagccgtctatactgcacgtaagccatcctctcagttccagtggtttatagaaaaatggctctagaatatcaatttattgacaaggcgattaactttcttttcttgcatcgttcagtattaaacggtatcaggaaactttcttgtgctgcagaatgtgatgttaaaccattctagtaaacttccttgtgttgtgttacagaattagttactcgatgcttgaacttattgttgcgtaaactgatcgatggatgatgctaggataggaggatatgtggtgttttcagtatcaaatgcagaccatattagaaatctttcttgtgctgcagacttaactgctaggtctcatcttgacagtctggtcttgtatatgcttcaagttcgacgtttccttagcagtaaagcatcagctattccagtctttacttgttcccttatcggtttgatcggttgatggtccgatggatgctaggacgggaggatatggaaggagaaaatgtcttcagtcagcacgagggtgagaacagacttgccggtcgtgaaggaagggtcgcagctggagcctgacggtagcagcgctaggtcacgatctgcagttccaaggcgcgccatactgccctccgtaagcgcgcccgagcacaacatcctagcgctgcttgacgagtgcgacgtctccgggagccgtggctctgctgaatgagctcgagttgggcgtcgccagcacattgtaactaaactgcgtttgccacgagctgatctgagcacagcaaaccttacagtatgtctgaaaagaattggaactacgcaacagatcttttgtctggattgtatctataaatacgagtgaaagcgttttggggaaattgtctcgcacttgtcggaggcagttatggttactgaaactgaaacacttggttttgtgttgtaacttttgcactgttgagtgcgagcatgcagctctgaatgtgacgccaagttgtcaagtgcaaaatgaactggaaaatttgttacgggtaggcagtggttgct

SEQ ID NO: 34138 - DNA, 513 bp, Zea Mays
ctgggagagtgatgagccttttctgtaattgagacagactccaccaagatttgggtccagagtttgttttcacaatcaaacggtatcctcatgtatgtgcataaggaggaggatccctagaacttgattctttcctgtgcggccactgatggcatcctttatttgcgtcaaggatttccctcaagatttatgcatgcatgcgtggcacaaatttctttgctctcctaagtgggatttgagatcgtgtgaagctaagcttttcatcaagatggcacttgtaagtgtttgttcaattagtagttgtttaagtagcctctatctcttacatttttatatgctagaggcgtgtttaagttgattgcattagtgatattattttattgttgttttgacttgtggtgtggcatgtcatgatggccttaaatcattaggtaaattacttctctactatttgagttaactgatgctatctatttatttgtttataaccgaacaggttgttatctatggatc

SEQ ID NO: 34139 - DNA, 3043 bp, Zea Mays
gcaaagagagaagaagaggaagacgcggcgcgctcccctttccagtccccatccccggctggtatcgccgggagtaagacgggaccgtcgggacgaagccaccggcgcgacatggaggccaagccgtcttcagcggcacatggtgacgcgcccgcggtcgaggccccccgccgccgtggcagcggcggtaagcgcaagtcggccgggtcctcgttcacgccgtcgaagcggcaggccaaggagcggaacgctgccttccacgtgccccagcatcttcttcacagcgggccgctcacccgcgccgcgcgccactcgccgcacaagctcgcgggcactccgccggagtcggggccagcgtcatcgtcggccgcaactggagacggggtgagcggtgggcaggcggaggttgatgcgatccggcccgagacggaggagacgccggccccagagctgccgctggtggacgagatgttggaggcggtccgatcccgtggccctggcgtccatgtggtccctacctttgctggatggttttcatggaaagaaatccactcggttgagaagcagatcttgccttctttttttaatggaaaatctgtgaagcggacacctgaggtgtatttggcgattagaaattcaatcatgatgaaatttcatgccaatcctcaattgcagctggagtccaaagatctggctgagttgtcaatcggagagagcgatgctcgacaggaagtcttggaattcttggaccattggggcttgataaatttccaccctttcccaccagctggacatgaagagagtaagccagaggagagccaagacaactctaatgatgagaaagcttctttgatcgagcagctgtttaaatttgaatcagttcaatcatatatgacacctttactgaacaaagaagatgtgggagctccaccccctctgcctagcttgtttcctgaacctgtactcattgaaaatatggttgcagcagctgagccttctgttgagtaccactgcaactcctgttcagttgattgctcacggaagcgctaccattgtcgaacccaggcagattttgacctctgttgtgtttgctataatgaagggaagttcgatccaggcatggccaaaactgatttcatcctcatggattctgcagaagtttcaggtgctagtggtactagttggactgatgaagagacattacttcttttagaaggtttggaaatttttggtggaaaatgggctgagattgctgaacatgttgctactaagacaaaagcacaatgcatgttgcactttcttcaaatgcaaatcgaagaccgcttccatgatggtgacgatattaatcaaaacatcccagtaagtacagagcaagccacaactgagaaagccattgttgaaacacctgagaaaatggaagttggagataaagtggaaggaagagataatgcggatgagaaggcctcggagaaaacagagggaagctgtgaagaaacaaaaactgaagatgcaaatgttgtaaataaagatactcagaaatcaggtggcaaagattcaggtgcatctccaagcactgaagaggcaaagcaatcttctgatgatcaacctatagtaaaggaaaattctgtagatgtagatacttctggtgaaaaactatcaaatgttgctattgatatcctaaaatgtgcatttgaggctgctggtcacagcccagaatatgaaggttcatttgctgatgcaggaaatccagttatagcactagcagcgtatttagctggtcttgtggaagatggtaacgctaccacttcattccgtagttcactaaaatctatatctgaggtgcctcctgcactccaattagcaagtaggcactgttttattcttgaggatccaccaaatgaactcaaagacatttgtgttagtgtaagtaagaaaaatacagatgctgatcaaacaaaagatgaggatatgatttcaaattcaatcgccaatgagaaaaaagagatcaatgagaaagaagataagtctttatctgtggaaaagacaaataattcatccatgtcacaaaatgaccatcaagaatcaaacattaagagtgtctcacgtgatgattgctcctcagtggagccaaaaggcaataatgctaaggagtcaagtgattcaactggtattggggatatgagtgcaatcggcactacaaaagatgttgttgcaggcaattctaaacaagtgaacgactcacctagtgttgaggtggaggctcctgatgactcttctttaaaaagcaaggatgagctcaatgatactgaagatgcagtggcgacaccagctaccgtacaggaacagaaacacagccaaacattggaaaatggtgataagaacctaacaatattgaacgtgtagttgtccatgagaagggctctatagtgactgccaaccaaaatgattccataactaggctcaaacgagcagcagccactgctgtttcagcagctgctgtcaaagctaagtttctcggtgatcaggaggaatatcatattcgaaggctgacagcacttatgattgaaaagctgttccagaaattagaagtgaagatgtcgttgttttcagagattgagcaggtggtccttcgaacaagagagtacaccgagaagaccagaaaaaaactcctaatggaacgaaatgcgattattgcagctcgtatgggtgcattgccgtctaggccaaaccagcctggtgtagccggcaacaggttaccacctggatatggcaaccctcctttgaggtctccaaacgcaatgccgcggccttccagctgaggaaaatccggattccggacacccagtggtctatactccattcatttagaagcatacggacctcaaaaacctcaaacctgccagtttgttgtagcattttttagaaagtacattgtacaattgcctgtataactgcttatatgaaaattcaccattttcacttaattttgatgcacttgcttctaccaaacctccgcaactgtttaaaccttccatcaacagca

SEQ ID NO: 34140 - DNA, 2154 bp, Zea Mays
tgaccctgatctccgcgccgtgaaggaagcttcaactacgagaacatgactgacctgctcggcgacggcatcttcgccgtggacggcgacaagtggaggcagcagcggaagatcgccagctacgacttctccacgagggcgctgcgcgacttcagcggctcggtcttcaagaggaacgccgcgaggctcgccggcatcgtctccggcaaggcggcgtccgggcagcccatggagttccagggcctcgcgctcagggcgaccatggactccatcttcaccatcgccttcggcctggacctagacacgctgggcggctcggcggaagggagccgcttcgccgcggcgttcgacgacgccagcgagttcacgctgctccgctacgtgaacgcgttctggaaggcgcagaggttcctcggcgtaggctccgaggcggcgctcaagaagcgggtcaaggtcgtcgacgagttcgtgtacaagcgcatccgcgagagagcccaggagctctccgacagcaagctggcgaccgaggacactgtccctgattcgaggcaagacatgctgtccagattcatccacacggccacgaacgagtccgggacggtggactacaagtacctgagggacatcatactgaacatagtcatcgccggcaaggacacgacggcgggggcgctcgcctggttcctctacatggcgtgcaagcacccggagatccaggagaagatctgccaggaggccgcaaaggcgaccgacgccagcgagacggcgggcgtggacgagttcgcgcagagcctgaccgacgaggccctgaacaagatgcactacctgcacgccgcgctgaccgagacgctcaggttgtacccgtcggttcctctggataacaagcagtgcttcggagacgacgtcctgcctgacggttccagcgtcagcaagggagacatcgtgttctacgtcccctacgccatgggccggatggagtacctctggggcaaggacgccgaggtgttccggccggagcggtggctggatcaggacggagagttccagcaggagagcccgttcaaattcacagcgttccaggctggtccgaggatatgcctggggaaggagttcgcgtaccggcagatgaagatcttcgcggcggtgctcctccgattcttcgtgttccgcctgcgcgacggcgacaaagcgagcgtgaattaccggaccatgatcacgctccacatcgacgagggtctgcatctgacagcgacggcgagatgaggtcgcctggcctggccaccggtggacacgtagccgccggtgcctgtagctacgcgagcgacaggtccttgacaccgtaccttgtgtacatatatatatgcaaagaaacgaaaacgagcagtggtagtaggcaaccactttgtgtactgcgtcttgctggggaataatgacatgtcatggcatgagttgcaggctagcttgcatgcagtacgtcagtgtcgcggcggtgaggcggtgagcagaggtcggtgttctacgccatgcgtccgtgtctgaaaatatcggacttgtcacctgaatctcagctgatcgtcgtcgttcagagcacgtttttcagcattggtggtcacggcgaaacgccacgcatccgcagtttcccgggatctgtgccacatcaagtcatggcaagcaccgtttgctgtcaagacgatggatggctgacgcgacatcctgctggtctagacgatgggcatggagtcgcctcggacagcaacttgcgtcaacatggtcgtcgtgatatatttgacagatggcaccggcaccggcaccggaccgagacgcacggtgacggtgctcactacagctgttcaacgttcttgcgtcacaggagcgacacatgaacaatgactgagcccccaactcactgaaatggattagggaatataagaataaatattggattcacccaataattggagtataaatcgtaagaaaggagaatcacctaatttgtaagactttgttggtcactcgttcttggatgctatagatcaagaacaaggcaacacaattgttaatggttagagaccttcgtccttcgaagcataatatcctctcgaatataatgatcttcatacgaaggtcatgaatggcatataccttcatcatttt

SEQ ID NO: 34141 - DNA, 3068 bp, Zea Mays
ccaaaataggaggagtgacgtgggaaagctccccgcgtcctcctcttcctttcctcctctcgtcgtccagggaaggatgcaggatgctctccgtccctcccccaccacctgaggaggaaagcaagaaatttttaaccaaccaaacgcaccaccgcgtgcctccgtgattcccagcccaattaacccggaacagaagagaagagctcgccacgccaccggtgggatcgccggacacctacgcgggcctggccttgggatccccggaacgcggggcgtgggaaaccgaggaggagcatgtcgcgggtggcgtcgctgtcgccgtccttgtcgggcgacgaggtggaggtggaggaggaagaggaggacgagggcgtcgacggctaccgcaagggcggctaccacgccgtccgccccggggaccagttcgccgccggccgctacgtcgcccagcggaagctcggctggggcaacttctccaccgtctggctcgccttcgacgtccagtcacagagatacgtggccctgaagatccaaaagagtgcgcctgagtttgcgcaagctgctcttcatgaaatcgagttcctgtcagagatcaccaagaaggacccattgaactgcaaatgcattattcagctgatagatcacttcaagcacacggggcctaacggacagcatatctgcctcgtctttgagttactgggagatagcttgcttaagctggtacagtacaaccggtacaaaggcatcgggcttgatagggtgaggcaaatatgcaagtcgatcttggtaggtcttgactacttgcacaatgagcttggcatcatccactcagatttgaagctcgagaaccttctccttctctcgaccattgatccctccaaggaccccattcgctctggcctcaaaccttgccttgagaggcctgagggaaaccctaacggtgaagctgggattaatgcgattgagaataagctaaagatgagagcaaggagggtgcttgcaaagcttgctgagaaaagaaaatcagctgtggaatcttcacgctcagaaaggagcttgggtggaattgatcttacatgcaagattgtagactttgggaatgcttgctgggccgacaaacaatttacagattttattcagacaaggcagtaccgggcaccagaggtcattctaggtgcaggatactcgttttctgttgacatgtggtcatttgcgtgtatcgcttttgagctcgcaaccggagaaatgctatttacacccaaggaaggccatggatacagtgaagatgaggatcacttggctttaatgatggaactacttggcaaggtgccgaagaagattgcaaccacgggaacacgatcaaaggaatattttgaccgccatggagatctgaagcggataagaaggctgaaattatcatccattgaacgtgtccttgttgacaaatacaaaatttctgaatctgatgcccgggaatttgccaattttctttgcccattacttgactttgcaccagagaagaggccaacagctttaggttgcctaaagcatccatggcttcattataacgaggataaaacttgtcagtctcttaacaataatgatgccaagaacattgacctggcccaaagcccagggagcatcaccagcggatattgtacaaatattgatttgacgagcaaaaaaggcggacccactggaacttgtgataagactgctgatgcaaaatataacaccagaagcattaccagcaatgctaccatgaacactgatgtacagcccaatattggaagcattgctaacggacttgccaaaaatgttgatgtaaatccgaacattggatccatcactaatagagatgccaagagttctgatatgaagccccacattggaagcatcaccatcagtaacgccaaaagctctaatgtaaagctggatacaggtaacatcactgatagaaatgccaaaactgtcgatataaagcccaactctgacatctctagcagagatgacaagagcagtaatgtggacaccaccacttccagtgttatcaacaaagatgcgaagcgcagcattagaagtgtcgttaattcttatatcaagaatttcgatgcaaagtgcaacactggaagcactgctaacagtgatgctagggacccatcagatacgaaatccagcactaaaattgttagtagtgctgataatgctaagtgtgtggacataaaaccgatcagtggaagtgataagagcaatgacaccagtgataagagcaatgacaccgtcgatgctaatgtgaaatccaactctggaattgttgcaaacagtgatgctagcaacaccgatgtacagactaacactggaagtgtcgacagcagcgatgattacagcattgactcaaaaccaaacattggccgggttgctgcaagcatacagaggttggagagcagtatggggaaatacagggccgacctttctcaagattgaggatctggcaggtaccagctggcgttattgtatatctctattcctgctgactgtacaaagttttgtatttgcctacagaacttacacggagtaacagaagattgctgttcctagtatggtggatgcactggaaggggaagaattatactctgaccagtcacacgtcatctctcttgattatgttcatattctgccctcagtgaaaaaaaagagatttctttatgtcatttaacaaggatcaccatttatctgagcaagggtgacatttttgtttggtttatggtgtgaggtttgcttgtaaaaagcgggacatgtgttgtataaaactattctttgttcattttgtagtgaaacaatcatatagatgaaatgtttttttttcactttaggctggttcagttaggagtggatcggaggggattaagggctactttggtgactagtgaaataaaggggatccctaggggaggaatcccttgctattccctaggatccctttcatttctttaatcaccaaagcagccttgaaaaaaattaaatcccttcctattcaaaattgaataggaatagttttaattctgttc

SEQ ID NO: 34142 - DNA, 679 bp, Zea Mays
atcttaaggaatagtaaagattgcatattagtcgtcgcggacgctctattcatattgactcctagacaaaagcaccctaacagcgtccgccaatcgccaaacggaggaacgagtgtctgccttcctcgacacctcgacggccaccgcagcaggttagcatctctcctcgccgttgtatcatgatcttggttgctctacatctttgtactaggcgctggtcagcgacatggacgccaccatcgccccaagctttgcgtcgtgcagctgcgccgagtcacgcacctcttcgtgctctacccgctcgcctgagccgtccacagcaactcaaggacacaccaagacgtggctgctctaccggtctacccatgcacctgaggcgctctacccgccaggttactgatgaaatggttcaccaagacgtggtggctgctcagacacaatatggacatgctcaggattgttgatggttactagaatgattgaatgaagacgattataaactgtccccactactgtatgattgccaagtaaaagtgtgacgaaggttgtcgtcaatgtaaaattgtccttcatattaggatatctggtgaccacatttttgtagtagtccttctagacaacttcatccaccagtccgctaataagaacactaaatttaaacatcattttttgcattatg

SEQ ID NO: 34143 - DNA, 1256 bp, Zea Mays
ctcctgtttcatttccatataacaaaacgcgtgggagctattgagatcgtgcgtgctgtacgtgcatcctccatatgtcgcttagaactactgcttggctatcggccaggccagggcaccaccagccggtgcagtgtttgtcgtcgccggagaaaccacgccgccggtcggcgaactaccagcccacgtcttgggactacgacgctcttctgtcacttgattctggcagacctggtgatcaggtccatccttctagttattataagatgaagagaaggataagagatatgttgctcaagaaagtagaaccatcttctaaacttcagactattgatgcaatgcaacgacttggaatctcttaccactttgaggatgagattagtaacatcctatactccatctccaatgagagtaccaaagctcagtacacatatgacaacattgctttcacagccttaaaattccggttacttagagaaaatggtttcccaacaatcctaggaccattaggctaccataattatgaaaaattcatcacaaagacaccaagtctggaggacgcaaacacacttctattactatacgaggcctcatatctggcatttggagatgaggaaaaattggatgtagcaaggacattttcagctaaagcacttaagcaacttatgccattcatgctaccacacttaagggagggtgtggcacattctttagaacttccactgcattggagagcttcaagactagaaacaagatggttcattgattactatgctagagacagaaacatgtgccccttgctactccaatttgctgaacttgacttcaaccaggttcaatatgaacatcaaaaagatcttgcagtagtgacacggtggtggaagaaaattgggcttggtgaaaagttgccatttgcaagggatcgtctgatggagtgtttccattatgctaatggaattgtttgggatccaaagcttggaacatgtcgtcaaatgcttgctaaagtttccaatctaattgtttacttggatgatctttatgatgtatatggaaccatagaagaacttgtactcttcacaaatgcaattgcaaggtgggatgcgataccaaatgagacacttccagagtacatgaaagcactttattctattatatatgacacatcaaatgaagttgctgaacacgctttgaagaaacatggttgtagtatgcattatcttctacaaaaatcggactcattccctctagtatatggt

SEQ ID NO: 34144 - DNA, 3279 bp, Zea Mays
ccgcagctatataaaaatgttctttcacttggctccctcgtcgtgtccgtggcaacgcagacactgccgccgctcccagagtttactctctactcctactctgctctctctctctctctctctctctctctctctctctctctctctctcatggcgtactcctcgagctgcgggacgaaaccctaatggagaaccggagccgccgccacgcccccgcgccgcagcgagctccgtctcaaggataacgccagtgcttgccgatccggtgggagaaagcgggagcgcggagcggcctcgccgcccccgccatggggagtgatctcaaggagatgaagtacaggcggaggatcggggcggaggagcggccgcaatgcagcgaccggaggggcggcgcgggctgggccgcgctgcagcaggaccccgtcgagctgctgcgcaagctggacgagctgagggaccagatcgcgcgctcctgcaacgtcgtcgcccagcggcgggagccccgcagggccagccgccgcgcggtctccatgctccccgccgagcatctggaggagccaccgcctctgccggggtaccaccgctcccgccatggcgggcggtttgggccgggcttgccgcctccaggcccatacgcaccgccgcgccctgaacatggggaaaggtatgtgaggcagtctagcgggcactaccgccagtaccctgggaggcagtgggagaacggtgggatggggcctgggagcttccatcactacgggtgtgcctgtccacactgtctgcatgggcagaggacttcgccgcaagaggagaacatcccgatggcgaggtacttcgccaggcagcatgaatcgtaccggttcgagaggtcaccatctgtttcatccgattatgatcggaggtctgtggcgtcatcactttactcgcaccggtctgtatcgaagaggagagcagagtacttcaggaagaaggcggaacatatctgccgtccagtggatggtgctgcacctttctctgtgtgcagttcatgttataaactactgcagatgcctacagaaaaatgcatagggcggaagcagaaccgatttcaatgcgggtcttgttgtcagatagttagtctgaagcatgatgaagaaaatggtattccctttgcaccgtcattatccttatatgcgcctgaaacagagcaaagctcaagtgaccagatgaggcgagatactgtccatcaacatcatgaggattttaattctatgttctacaattcaaatgatcatagcaacatgcaaaacaacatggattccactgatgataattcactttcttcgaccatgagtaatgacaggattggcaaagattgtggttcaactagaagcattcagtcaaaagctgaggatctccctttctctccaagtaggtctgtagacaatggaagcccaaaggatatattgtgcgagagggacacagactgcaaggtggagccttctgtaggtggtccagttagcccacggtctccagctttagaggacaaacttgttgacccattgtgtgcccaagaaaaatgtaacgacgaggatgatcaaggcatggccatggcttacaaatcagacctaacttgcaaaggagaatatgatgttaatgatcagtatgatgggggcattagtacaagaagcaaacaggagagcaatgaagatgacaaagatgccactgaagatgaaatctcatgcagaagttatgaacagaagagcaaggaagataactcatgcaacattgaagatagtagcaaaacatatgagcagaatagtggagaagatgacactagtagtctagtaaatggaagtgaaaagtaccagtgtatgaatattaaagatgaagatagcagccccggaggcgaggacacatgcaataaatatgagtcaaagatgtcatggaaactggaagcataagtgagagacatgatgggctgaaaatcgaagaagataatgagaaattgcagcagccatttattgaagatgccaattctcaaacagggagtggttcatcagttaatgagcggacaaattctgggttttctcgtggttcatcagaggctgggttggatgaagatcagtcctctaccggtttcaattaatggtcatccaatctctgaaaaagcccttaagaaggcagagaagaaagctggtcctgttgacccaggtacatattggtacgactaccatgctggtttttggggtgtcatgggacgggaatgtattggcattgtccctccatttattagagaatttaattatccgatggccaaaaattgtgccggtggggatacaggtgtttttgtcaatggcagagaactgcatcaaagagatttagatttacttgtaggaagaggactaccacggacatctggcatgtcatattctattgagatgtcaggcaatgtaatcgatgaagcaactgggaaaaaactgcgcagtcttggaaaacttgctcctacgattgagaagttgaagcgtggttttggcatgcacgtccctgaagagttcagataagctggttctagtgctgaatattggctttgccaattatccactccacaaggctgaccatggggtgccaaaccaacgatttctgcgattgtgatgttaaatcctgcgattgtgataaatcgcaggtttctctgaattggactggggctctgcgagccaagataatgtggtccagtgacttaaccaccgattatagtatccctcctgctaatttcatcacttcaatggaagcgacgtttgctagtgactctagcctgccaggcagttcttaacttcactgctctgcctgtacatgttatattcctcaaatgtgtcgtctttatcagtacattgccccatcacaggcacagacatactgttagatgtatgagcaattgtcggcttgtaatttattggtagagctatgcttcccctaacatttatatgtatatatgtgctcatgattcttgaaactctggccgatatgattggctttcggctctcctgaaccctgttagagtcccattttgaagcctgaaacgcccctggccaccatactgtattgtgtatccaagcctgatggagtgatgggcacagtcttcgaaaccacgaatgtgtcactttcgcttcacaggtgactgacgtttagttgctgttgactcggcgacaatacagctatgccagtacactggtgtcaggtgataattgcttctggtttcggatgctggagttggagctatctgctgtacttgcactgattgag

SEQ ID NO: 34145 - DNA, 758 bp, Zea Mays
gaccccgcaacagccgcaagaatcgcgagcgccatctgactcttcatcgtcgcctttgcccacctcccaagcttccgcctcctcccctcccgcgctttctccgattcttccacgagcttccagatcgcgaaaccaccatagccgcagtcaggcgagacgagtgcccacccgcgccgcgggattcatcggaatggcgtacgtggaccacgccttctcaatcaccgacgacgaagacctggtcggcggcgcggtgggaggcccgcgtggcgccccggtcaaggaaatcgcctttgctgccgcgctcctcgcttttggcgtcctcggtgtcgtcgcgggatccttcatggccgcgcaccaagtcggcggcgaccgcgcccacgttctgggaggggtgatgttcatcccagggttctactacacaagaatagcgtattatgcttacaaagggtacaagggtttcaccttctccaacatacctcctatctgaagaagcaattggattggctcatccaactatccaacacatggctgtctctctctctctctgtctctcttttttgtttcttattaacctttgtataaagtcgacagcgtggcaagtgatctgtacatataaaaacaccaccgtaatgtaatgtgtcatcacaacattatgttaccacgtgaagttgttcgttatgagatataaacgttgacctatcagcctgtcatgctttggtaccgaatgtggtcctgtttgtctggtttctgaatgccag

SEQ ID NO: 34146 - DNA, 2705 bp, Zea Mays
ggaattggcgcgggcggcgggaaggcagttgcgcagctggaggctgctgcaacagtggcaataactcccgctgcccaccggctcacctgtccttcatccgccccgatccgaacccattcaattccaaattcacaaccctgccagtggttggcccgccgctgccaaatcgaatcggactccgatccgtgcagcccaccggcgagacggcgagacgccgaagctagcacacttcatgccatctgtctgacgtgatgcgtgtggcctctctgcttttactggatccctagccagctcaggagaaactcagaatagtactatagccaagtccatccagtcctttcgcggcgtcttccttgctcaccgcggctccggcgatgtcggccgccggctcggcggctctacctctccgtctacaactgggtcgtcttctccgtctacaacagccgccatcatggagattcttcatgggcttgtagggttggtgaggtctccagtctctgcaactcttccacaaattggatccagattattcctcacgtgaggtgtcttgtggagttttcccgagacccagtcacatcttcttgctactgccctgatcataagctggtctgtcactgagatcatcaggtactctttctttgcaatgaaggaggcatttggatctgcaccttcctggttatcatggctttggtaaatttggatttttcctccgaatctggagagtaatcctaccacctttgccaaggaaatttcccttgaacgtgtttttgcgtactgatcgtctgcacgtacagcagctttatgctgttctatcctacttgtatctctagtgaagttggtctgatctacatggctttgccttacatgaaggtacaccgatcctactagaaaaccgaagaggtatagtatgcatgctgttcacatctcataactaccatttttaaccgttttttcttgtgggaccacaatttcaagcatcggtcttaggccctgtttgggagggcttcacttcaattattacagctttgattttgcagcttcacaatgaaagcctcaacagattagtcagcggtgttcaagagtgtttggtttgcacatacactctaccttttataatacagtaaatttgtgtgatttttccttaaatatccttgatgattagcgggtgaagaaagagatctaaatcgataagtcatgtaatcaatgtcatgttttttttttaaactatagccggtggaggtaaaatagacttgaaattcttgaagtgaagctctccgagccataagatgcgcaacacatggaacttgtcatacgactacttgtacccatctgttcttgccctcctggtttatgttccaggtaagcctttcccttctctcggctgctgctgtaccgctttacttagatctagcaaacaatgtatgattatcctgtgtccaggaacattttttattatggcagttcatcatgtatgattcttatattgaacttgttttctcttgaaaagatgagatgtgtctcattttattttctctttttttttgtggaaaacgaacatcatctgaggagttggattgcaaaagaccccttcgctaatcggaacaaaaaaaaatcccgttcgccggctcctcccgtcgtgccctcggatatatggccatcgattctgagttctggccacatcaatccccgggatttagaggctgtttgttcgtggctaaatatgtcacactttgattaagaaaggagaatttgctggccatatacttggatttagcgtgggtgcctgggtggtgtactggtgtctggtaaccagtagcggctagcaacagccgtcaaagccaccaccttaaagccatgggcagcagcatctcagggtcttcgtcttcctccctgcagcgcttcaatggcggcgggtgacgacgggtcggcggttcggcggctctacctctccgtgtacaactgggttagcttcttcggatggttgcaggtgctgtaccacgtgaccttggcgctgttgggtagcggccatcaggccgtctacgctgctgtcaaactgccactcctgttctcacaaactgctgccctagcagagattcttcattctattacagggctcgtgagatctccaatcagcgcaactcttccacaagttggtgcgaggatatttgttacctggtgcatcgtctggagttttcctgagacacagtcccatgtcctcgttacttccttggtcctaagctggtctatcactgaggtcatcagataccctttctttggcttgagggaggcatttgggatcacaccttcctggctcctatggctcaggtacagcacgttcactgtactctaccctgttgggctgatcagtgagctcggcttaatcttcactgccatgcctcacatgaagggaaggtccttctacatctgcgctgcactgaccactatctacattccagcgttcccgcacatgtacggtcacatgctcgcccagaggaagaagaacctgtccaaggcgaaagccgcatgacgctccagacgagcctaggcctcactgtcccagacggagagtaaccactgtctctaaccacgggatgtcagagtgcactactcttatcaggtggcaataacaccggggttgtaccaaggaatatactggatagctcttccatgggcaaatcaataataaataaaatcaccatttatat

SEQ ID NO: 34147 - DNA, 2664 bp, Zea Mays
ttcaaatagtaccaactaatgaagaattaggttgatgagccacactaagaagctatggaagagttattaagcatcttctgagaggaataactaggatctctatgtgtcgtgtccaaaaggtgacgggcccgcgagctagggtttccggtcaccgcggatctcggcggcctcctccgccgagctcctcgcagccccgcgacgcaatatcgtcagccgtgccgcctgaggctatttgaggagatgccgccatcgtcatcgtcatccttactctctggctccaatactgcgagtgctgagcttcctctaatcccttgcaagctctgcaatggggtggtgattgagcgggtttccaaacaaccagaaagcacgtcgaggaagttctaccggtgcagagccaagaaattggatgggtctcaatgtgatttttttccactggcaagcgagctatgctgttttgttaatcaaggatggggttgtcagtggtgaccaatgccttgagttgttaatggtcgcacttaatgatcatggcaaagctgttgaatctctaaccaattccatcagagaaatgaagaaaaagttgtccgacctggagttagtgatggaagagctggataacgtgaaaaagtcgatgaaggcagccatggttgagaaattgaggaaaacaagaaatcgatagctgcattgaaattgatggagaatgagatgcaaatgctgaaagggccaactaaagtgaaacctaggaatatggcactgtgttttctgcttttggcgttgattgggtggtttgtgatgggacagatgaattggggggaggaagcatccaatcgatttatgctgggaggctaatgaactttgggtggacttttgtatagctagatgtaatcagaactggttaggcaccctgggagtggaagctagatgtaagaagttgattgtgctgcgatttgatgctctggaggatgaagatgggctctgatcgaagcaaagttgtgccactaatatttttttcttattgaacttagtagttttctgtatgaacttctgtttatcagatacccagttgaacaagttcagtactctatttatgatattcaatattagcggttgactttaggaaatcagaaattatttggctcatgataatctcacgtgatcacgctgcatacagaaggtgaagcctgtttgttggcggagtgagaaaacttaagactaggggaaaatgaacttgtaaacaagaattcttgacaggaattatagttggattaagattctttttatgtacctcacttcggcaccaccgtgaaaccatagtgtccccatccatgttgtccggagtcgaataattgtatgcattttttaatcgaggacacaattcaataatcttggatgcagaggatgaactaacagaggacaaagctcacacaaccatggatacagacgtcaatccaaattctgcttcaatttgtaaaggctcttcaaattctacttcgttttgtgaaggtggcagtcgtgaaggtggccatgaacaaaaaaatccaaacacttttgtgagagaaagcaggtcaaaaaggagggctctgtataaagcttgcatagatttggcttgtacgaaaagtgaaaatgatacatacaaaaaaatcataggaaacagggctgctttggcagacttatcaagcaaatatctgcgtcacctaatgcctgtaaaagaggactatctgcttgtggaaattggagatgctcagttgactacagcttatttttgacatcaatgcaccgtgctggtgatatgagtaacacattgatgagtgttatcgtcgaatacttcaacagtatttctggggccctctttgacactgtttctagaccctctaccatttctaaatatgtcatctgtcctttcttgttgaagaaagttaaaaagggttgcaactttaaagttaaagatagtttactgaagactcttgaggaaacccagaaaagagatatgattatgctcctgattctggatggcagtcattggcaacttcttgctaatttcatcgaattactgaagatacataaatgcataaaatttgatgttaattctttcgaaaagatcaaagctagcgaaattgttgcatgcagaatgaaactcacacatatgctgatcaaatctaaacaaaatagtgctgatccatgttatgtggttaaaaaactagatgcgaatataaagaaatatggcattaattcccgaaaggtgatcacaagtaagaatttgacgatgctgatgggactaatagatcaagagattgaagagattaatgcagaaaagagaaagcgaagtggacatccagcaggaggacaaccagaactgaaggacgatgacggtcaactaagggcaaactcagtcaaggctcgcgacgctgaattgcgttgtgaaagggctgtaaagctacgacgactatagcactttgaaaccgctgttgctccccccgacagagaaagcagtttgaaactgctgtggctacctatagcttcaaagctagacaaggctaattcgtccttcagtagagctgattgacataaacgtagttgcagctcttgcgtgttctgctttttcgtgttgctcttccgcgttcgagttccatgcctgccacctccatcaatggcatgatacgtttggct

SEQ ID NO: 34148 - DNA, 1542 bp, Zea Mays
cgcttactgttacaatgcggcttcaatagcaggaaaagtattgctcctagcctcctacagctagttctttttatgattaagctccaatgaaggattctcaggatattcagagcacaacagagttgcagtcatcagcacagggtactaatgaagtgcaaagtcagcaaccaaacccgatgaccactgatgctcctgcaggaaattcgggttccttgtctatagctagtaatgacagtaagaaggtgtctcgcgaagacattgaacttgttcagaatttaatagagcgttgtcttcagctatacatgaacaaaggagaagttgttagaactctttctactcgtgctagaatagaacctggcttcactactttagtatggcagaaactcgaagaagagaactccgagttctttagggcttactatatccggttgaaattgaaacggcaaatcatcttgttcaatcatttattgcaacaccagtacaatttgatgaaatatccagcacctccaaatgttccattggctccaatacaaaatggaattcatcatatgccagttagcaatttaccaatggggtatccagtacttccgcagcctatcatgccggctcccggccagcctcacatggacccaatggcctgtggtctgtccaatggtcatgtggtcaatggaatacctgcaccaggtggttatcatccgatgcgcatgaactctggaaatgacatggttgtggacaacggagcgcccgaagcaccacatgctggtgctaccggcagcgtcatgtcatccgagatggccgtgagcccctcatcagcggcttcaagcaaccatgctccatttatgccgccggagatcccaggcatggccatggacgtgccaggcctagactcgacattcggatctgacgtagggaatggacctctgcaattaggaccagatggctcgtcgagagactccattagatccttggggcagctctggaacttcagcctctctgatctaacggcggatttgacgagtttgggagcagatttggacgtgctggagaactacaccggcacccctttcctgccttcggactcggacattctgctcgactccccggaccaagatgacatagtcgaatattttgctgacgccatcaacgggtctcagtcagacgaggagaggtcatagcgaagctagctcaaggtttttcaggcagggcgcagggatgtgtcttctcatggcctgctgcgagagatgctgcggctaatgtaatgtaactgtgccttgggcccgcgcccctgtgtgctgcggcaagtgtagctggtttaattagactttttttttaatttgtagctggttaattagaatcctaattctttggaataaaaaagtagtagctggagttatcggtaagaatcgctggatgtaatgcaaagctcgctctcacagtcacagctgggtgaccacaggaggacctcctttttgtttgttgtatatttgctgctacagaagtaaaacggtctcataggtctcaggcttactcggcgcagctcgc

SEQ ID NO: 34149 - DNA, 1266 bp, Zea Mays
gctgtcaagattcaaaaactgaaacaatgacaaacaacacagttccattttctgaatcttaataattacactgtttgcgctccccttggatctactcgtattcctttacatgattagttactactaattcatttctctcctagaaatttatgcacacttttgcaacaagacctttcttcccagcccttttctacagttttgttaggaagtggttgctgcctgaccctagtcgtgtattgcagccatcgcacggcaaattggccagcggcggcggcaggtggtggtgtgagcctgcgaggcttcctacctgcgctggaagtttaggtgcttgatggcgaggaagaagagaaagacgaagaggccaatgatggcaagatggaggcaggtcaccagcacaaagtagcgatcctgcaggcccaggtacccctctaggaactcacgcaccgtctgctccccgagccccggcaccaggatctgctccgtcctgtctgcgagctgtgagaacattagcccataaaccgtccatgccgccggatccgcccagtacacccaccgccaccacacaggcatcatctgcagcaaatttactcaactcgtcagccgattcagatggggggttacctctctcacgattatgaagccagagaagacgttccaaaagataaagatgaggaacgacagccccatggcgatctcgatgttgggggtcagggccaccgtcatcatcccgtatagagtgtagtacatgaagctcatcacctggtataggaagaaccagaagaatttgctcgctgtcacctggaacccaatcattgggtacacgattgatgagaagatcatcacttgcaccaacatgtaagggcacgggaaagcaacaggtcaagaagaagcactgaaggagcagcaggatggggcatcgggagaagctcacattcaaactcactaagtgcgaatcattatcattattatttatgttacatttcgtaaaccaaacagcacctaaagccagcctcatcatggtcatgtgttgtgtgctctgtggtctgcgctgcttcctgctcctgcgaggaaataggaatttgaaggtttaatgctggcctaacaagggtcctcactgactggctgctagtctcttctgtctttgtacatataagacgatatgtagcggttattcctaaatttctctccatatatcctacttttacgccacatcgtcaagattttgtctcctgtttttcatcttctgcagcggtttcctcaaaatac

SEQ ID NO: 34150 - DNA, 2500 bp, Zea Mays
cgaagacagagccaggccgccaaattaaacttgaccatttcctctctctctttctctctaactccgggtccctctctcttactctctctattctctccatccttgcttctgggaagctcatcagccatggacgatgccgctgcagaggaagaagcttccattcgcgcacaaaaaagctaggtgcttcggcttcctttcgcgcccaattggaggcgagacacaccccgaaataaaaaaaagatgagaattcgatgcgacaaacaagctcaaatgcttggtcggtgtccttttgaaggttcgagaccagccatgtcctcggcgccctgctggcctcctcgccgttgctggcgcgcgcctgggaccgctgcacagccgcctccgctgcagcgccgtggttcgttcacggcgaagacggcggcaaggtgtacgtggggttctctggggtgcaggctgcgcttacggcggcaggcgcggcggtggccggcggcggcgccgacatcttcgcgccggtgagtctcggcggggacgcggcggggcggatgttcgcgccgctggtcgccgccgagcccgacccggccgctaccggggagccggttgccgtgcaggcgctggcgctgcagtgcttcctgaaactctgctgcagtcctgatttccagatgcttctgaatcagatcaggggcaaggcagtcgtgttcacgggccactcccttggtggcgccgttgcggccctcacggcgctacactacctctgcatctcatcgtcaagctcgccacctgctcctcctgtcctgtgcgtcacctttggaagcccattacttggcaacgaggcgctgtccagggccatcctgcgtgagcactggggtggtaacttctgccacgtagtctcacagcacgatgtcgtcccaaggctcctcttctgctccccggacgccgtacccgcgcacatcattgttggaatgcaactgcagcaatggccggcgtggactcggcacacaggagctgtgagcacggtcaccgcgcacatggcggacactgacaaagacgtgctccggcagctgatacagacgcacgttggcgctgtggccgtggaacagaagcttgccgcttctgagacgacaggtgggagcccgtaccggccgtttgggacgtacgtgctgtgctccccagaaggcgcggcgtgcgtggacaacccgaccgccgcggtacagatgctgtacgccaccttcgcctctcagagctcagccggtgcagagtccccggaggccgcgcactcctgctacggcgagctcgtgctgaaaatgccgcaccacttgcttctcaagagatggctgcgtgtggacgacgacatgccggcgacgcccaactacgacgacggcgtctccctcgcgttggaggcctctggcatcgacgtcatggccatggaggcgtcgacggcgcggcattggctgaaaacatcaaagcgggcagggcggcggccgagcctgaactgcgctcgcctggcgacgcagctgggccgggtcacgccgtgccgtgcacagatagaatggtacaaggcgctgttcgacgcagagatggggtactacgacgcgttcaagcagcggcggtcgcccaggaagtacaccaaggtgaacttaaaccgcatcaagctgggccagttctgggaccgagtgctgagcatgctcgacgccggccagctcccccacgatttccaccgccgcgccaagtgggtcaacgcctcccgcttctaccagctcctcgtcgagcctctcgacattgccgactaccatcgacacggccaccacctgacgagcgggagctacatgactcacggccgggagaggaggtacgagctgttcgacaggtggtggcatgagaagggatgcactggcgctggcggtggcatcacgtcctccatgtcggcagcgtcggcgagcagccggagacgcagcaaatacgccgggctaacgcaggacccgtgcttctgggcgagagtggaggaggcgagggagcagacggagagcgcacgccgcgagcgcgacgtggccgaactggcgatgaagctggaggagctgcaagagttcgagcgctactcccgtgagctggtggcgaccaaggaggtgtccgtcgacgtgctcgcgccgcagtcgagctacacgctgtgggtggaggattggaaccagctcaagctcagggctcagggatgatgtgaggacaatgttgcttcggttttgagctgggctgcaaacagatgatgaattcgtaggtagctggtgggcgttctacaaatagttcaggtgtaaatgaatcattggatcatggtgctagtatatgtgatggtaaatatatccaaacctatagaagcgctgcagtggattacagtattgttgtggttctcgtcgaaattctgaaaaaacgataatatgacaataccaattagttttaaaatcctccttttcttcgaagagttctgaggaaaaaacgaataaaatgctattttcac

SEQ ID NO: 34151 - DNA, 923 bp, Zea Mays
tcataaaaaatgtggtgttaggccattttcaatggtagttttataggagtttcattctcattaaatgatgtgtcatgtcaccaatttggatggtgtggcaagcaattaataaagaaagagatgaaatgagtttcatggggatgaaactatgtctacgccgttacctagacatattgtgtattgcatgtcatctacaatactgcatcaaatgaaactttccgctgtgagagactgttttaaccaagatttcatttctttcatgtttacgtggcatcttggaaacacaaatatgaaacctaccactgtgaatgaccttatgacatgaaggtaccagttatcacctgtgaactggtagcacatatcaggagtctctgactgagaattgtattgttacgcaggaagctctttaaaggtcattaatatcttccaattaaagatttctgaggaccaacttatgtcgagattattcccacgtgcttgttcaaccgaaatctggagttctggaagtgcaccgattgcaaccaactctactgggaggggactcagtaccacaatgcagtccaaaggttcttgtcagtgtgcaacattagtgactaagcagcacgtacggccttggtactcatttgtaaaattgtaaggtactgagataccatcacctccgaaagatcgaaaataatctgatctttggcatccactcgtgcacgatgaggcatgccatccatttttagtggtttgctgttcgtcactgagatgctgttgtaaggaaaatagaccttgacttatttgattaatggactttgctccatgcacatccaagaggaaaggttctagatacgtagagttataggccaagtgctatgactgttgccctgcccccgaaaaggattcatgctatctattattaaactaaaccttacgttcct

SEQ ID NO: 34152 - DNA, 1507 bp, Zea Mays
tttaacaggtatgcaattgataatatgcaatctgctagcatggaggaagccaagaaaaatggtatccagcagctagctgaagaaacaactctggtgcagtttatatttgggggttatctgcgatctaagataaaatgtacgaagtgtcaggtcatttcaaaacacagtgagcgtattttggatttaactgttgaaatagatggggatatcagtacccttgatggtgcacttcgtcggtttacatcttcagaaattttagacggtgataataggtaccattgtagcagatgtaattcgtacgagcgtgcccaaaagaagttgactatattagaggccccaaatatattgacaattgcactgaaaagatatcagtctggtgttcttggcaagatcagcaaggctgtcaagttcccagagcacttaaatttgtcccagtatatgtgtagaacagatgattctagtcctgtgtacagcttatatgctgtggttgtccaccgcaatgttaggaatgcaactgtgtctggtcattatgtatgttatgtcaaggattcccaagggaagtggcacgagatggacgataacaaggtgaaacctgtgtctgtccaaaaagtcctgtcaagatgtgcatacatgctgctctatgcaagatgttcaccgcgtgccccaacctctgcacgcgctaagaaacccaagcagatggcacgttcaggatcattcccttcgggaggaggcaggtaccggagcaggcaccaagcaccctgctttagcggaagcaacagctcctcgctgttcagcagctctgatgcagggtcaagctgcactttcagcagcgacagcactgacagtgccgggaaatccagcatggagtatgaccgcatttttggaacctcgggctatatgtgcccggtggtaagctcagcggttgtgcccgagggagacaatcagagttacttgcggcaagggtctagctggaaccctagctcttcgggtcatgacatggatgaggcaggtaagtttgcgcggcagtaccagggagggtatcaggctggcggaggggctcccgtaggcggttgggagaccccatccttctcttacgccgatcaaggtgggctttatccaatctgggaggagcagatggagagttatgaagcaatgtactagctagagagctggagcctggaggcctaccgtacgtcgtcagggtcgaacggttggttgaagaagaaaacttgaagagaactgaatccctcgataaacatacttacatatatatataccaaaaaactcaggtgcagaataatgctcagactgatgagcgcgagacgttttgatgacatgcccgtggtgctttctttttctctttgtttctctctctctctctgatggtgcatggcaagatactggttgctgttgctggctgtaaaactttttttgtggaggaagcggaagttaacttttgaccgtgacagcagctgaggtctgtgattctatgtcgtgaatgattcgt

SEQ ID NO: 34153 - DNA, 2438 bp, Zea Mays
tcccacctaacctcccaccgccgcactgagcctctccggcccctcgcctcccctcccgtcccgtctctcctgcctcctgcctcctgcctcctgcctcctcgtcctggtcctcgccttccccattcgcccggccgattcaccagcgccccaaacccccagccgaatccgcgtcgcctcgcctcgcctcccgatgtcgccggctgctggtggccccgcgcccacgcccgctcaatcggcgcccgccgtcccgcaggcgatcgcgccgccgccggggcccggccgtgcggcgcccgcggcgccccgccgggatccgccgggcgaccccgagggggccgatcccgccaatgcggcggcgaggaagacgccgtggagcatgctggtgcagccccccgccgcggcgtcggcggcggcggcgggggagaccccagagagtggcggcatcatcggtggggatgcttcgtggccggcgctcgcggggtcgacgcgcgcgggccccaagtcgggctcgtccgactccctcaaggcactctccgatgcgtccggcccgtcgcctcaggaggttccaattgccgctccatcggtacccccatatccagttgtgggggctaatccgattcccaccgcccaaaaccctacctccatacctcctcccatggccgcggcttcctctcagcagaacggtggcacaacccagacgattccagttcggcgcggtggcagcagcggtggaaacggtggaggtggcagtcgtgggtatggtagcattggtggtcgcagggctgccaatagtaatggaggtgatgggagcagcggcagcggtggtgatgataactggaataatggaagccttggtactggcagtggttgcaacagcaccaatggcgatggttctatcaacttggatgataatgcccctggcgctggtcatgctggtgggaatggcaatggcagcagcagagatgctcctgggaatagacactggaaccacaacatacgtggtggtatcagcagtaacggtgctggtagtggtgatgggaacaatagaaatagtagtggtagcagcaaccactggaataataatccccgaattagtagtggcagtagcaatggcgttggaggtcgtggtggttaccgtggtcgccgtgaccatgagagaggggctaacttccctaggaatttccccagagttccagtaatgccatatcaacagcagcagcagcctggcatctaccagcctggacctttttaccgaccgccgccacctgctgcccattttatggtgccacaacatttttatgctccaccatttccctaccctgcggatgtgcaaccctatcctttctatgtcccaccagtagagcagtttcagaacatgcatcttgttcgaccacccatgcagccttcatgggttcctcctcaggatctgccaaatctccaagatgatattaggaatcagatagagttctattttagcacaaataatctatgccatgacacattcttgagaagacatatgaacgatcaaggatgggtacctatcaacctaatcttagggttcaatcggctttattatatcattctcagatgagggcatttacgagcttggttgacaccaactacatattagatgctatccgtggttctgagttattggaagtgcagggagataatgttcggaggcgcaatgattggatggaatggctacttcattaacgctgtccactagcaaatcaggttaagatgccaaaatgcagccgcatgctatcttcggggaactgaatagaagtcttgtggaaaattatatggaggagtcctgcaaattgacgcatttacatgacaatctcgatgcatgctacacgtctctgcgtactaatgtgaaactagatcaaatcttggcacgtttaggagccagtgtccctgcccaggccatcgataggtcgactccatgttgtatattggctagctctgtagcttggctcactggctcttaaacgtgggaaggcttgatctagtttgagattggtgcacaagggcatgtggcatggatcaagatcgtactataaacgcgtcggtttgcaggatatagattttattttctaagtcttgggtgatttgatcatgggcaccgggtaccggatccgtggactgatgtacagtgggtctattggaagcgggaagattttgtttgtttagatcggacatgatggctgcacgtaaagccactattgaggggataaataacaggaaataaatttacttaaaagtactttttttgcggtgtgtatagttgttcgaaaagaagtgtgatcctaccttttcatcatggattattggtcctggtgaacgatttggtgctacctagggtttattcttggaatcttagttttgtggtttgagtagtataccctgtatttgactctccttatgagcgaattttt

SEQ ID NO: 34154 - DNA, 2531 bp, Zea Mays
ccacgctacgctatagttcgccgcctcctcgttaacgttcacacctcctacggcacacccacactgcctttgcctactcccgtcccgtcgcagccgtctcgctcctccgtctccattccccgcctcgtcccgccgcagccgcggccgcgaggagccttccccgcctctcttcccgctcgctgggccctgcggctcgcagccagcattccgggctcctggtcgccgtgagccttgggaggttttgcgcggatctgaggctgcccgggctggggaattcgggctgatacctcgcggcgggagtcgggctgagttgatttggcgagtttaggtgtgcggagggaggaattccgggaggaacagttggttggtctgcgagagtttggtgggcggtagggtggtcgggcgggcgggcgggcgacgtacttgcgccccggaggccgccgtcgctgcttcgggcaagcgatgatcgagcagttcgtcaacttcgtcatccggccgcctcgtgcagagtacaatccagatcagtatttatgggagccagagttcactcttgccggaaggaagtataaaaggctagatttggaggcaacttacgaatgaaagaagtcagaccttaaagtgcagccactatgttcctgctgtcatcccagaaaacacttcccttccatgtgtagtctactgccatgggaatagtggatgcagagcagatgcaaatgaagccgctgtcatacttcttccttcaaatatcaccctttttacacttgactttgcgggatcagggctatcaagtggagattatgtcagccttggttggcatgagaagcaggatctcaaatgtgctgtgtcctttctgcgtaagaataagcaagtttcttgtataggtctttggggacgctcaatgggtgctgttacaagtctgctatatggagcagaagacccctcaattgctggcatggttctggatagtgctttcgctaacttatatgacttaatgatggagcttgtagaagtttacaaaatacgagttcctaagttcacggttaagatggctgttcagtacatgcgatgcgtcattcagagaagagctaaatttgacataatggatcttaatgttgtccagtttgcacccaagacgtttattcctgcactatttggacatgcttcaaatgatatgtttattcagcctcatcacacagaccatattcatcaggcttatgcgggggataaaaatctaatcaaatttgagggtgatcacaattcgccaagaccccagttttattacgactctgtttcaatattcttctacaacgttcttcacccacctcagtttccttcaacctgcacacataaacttgataagtattataaccttggtgcttttaagggtgctgctggtactaatgagagcttattgtatgagatcatcaatggtctacgggcagctggcactgatgcaggaagttcatcagctgctacagctagtttcacgaatgctacaaaatcagtagttgaattgctgacagagagggtaaatcagctatctgttaaaaatgataatgacttggattttcttttggatgaaaaccataaccttactgagatggacggtaacacaggagagtgtcatttagaggataaatcaaacagacaaacagatgaatgctgttcgtataccagctcaaaccgagagagctggggaagatgttcttccttgggtggagctagtgatggattgtcatcaggcgaacagcctgagatacctaatcataagcttaagagcttgacactaagggctctagcaaccccactgagacgggtacaaaggaaacctctcgcgatcccgaaggagaagaatcgatcactgtggaagaggttgaaaaaggagaggcaacagatgggggaaaacatatcccagcgtctgcggttgtgtctccaaggccaggctcgacacaagagaaccaaatcgtcttgacaactgtggatacatatttagctcttggacaaatctgctaggaactcactgatgattcagcaaccgagccgcgccgcaatttggagcttctggcactcagcgccaatcgtgccgtgtacattggttgaacattacctagaaatcttagatcatggattgtcccggacccaatgtgttaactgtcagtctttaatgttcgtttcttatgtttttttccccaatgtaatcctgtaaatttgaaggctagaactgcccatgtacttgtggttgagggagggacaccggttcgttgcttttttcaggatttgtgtagggtttggaggtcgagctgtatcgacagaatctcattttctatgttgctcggtaacgtctctgatttgctatgctggcgtgacatggttgattggttggtgaattgcacacgtgcatcgcatattcacattggttcctgtcctgagccattctctgattttgtgtgggtttgacttcgccatatggcaatcatacgtgttctgcaaatgcgaatccagaatcttatcaccacagcacattccactaa

SEQ ID NO: 34155 - DNA, 2137 bp, Zea Mays
gcagacatcagccggcgcctgtgttcctctccccgagccggtgcacgcaccacttcccccacttcgatctagcataatccgactccgccgactcgcctgaaccctagccagccgccgccatgccgccgcgacgcggtaggggaaagggtaagggtagggcaaagccaagagcgaagcccaccgagcccgagcccgagtccgatcccgaactagacgaagccgccaagtccgaaatcgaggcgggggacgcggaggctggggaggagtccagcgccgagagcgaggactcgaaggaagacgaatcggagagcgacaccgagtccatggatgcagaggccagcgaagaagctggcgagaacggaacggaggagatggatgcagagcctgaagccaaagccgtcgaggccaaggctgaaacggtggccacggaggcggaggcgaagcctgacgcctcggatgaagaagctggtgagactggctcagaccgcgaagcagatggcaagggtgctgatccgaaggcgaaagcggaggagtccgacggcgaggatgaggagggagccaccgccgtgaccgacggcgatagtgaagaggaagccgctgagacgggcggcgagagcgaagaggatggtggcgactccgacaccgaaggtgatgccgaggaatctcctccatcccctcctcgccgcagtcgccgccgtaagcgagcggccactcccgatgacgaagcagaggagacccctacgccgtcgcgtcgccggcgccgtcggaagtcaggggagcgtggtgactccccgccgccacttcctgaccacctccgctgccgtcgcagcgacgggaagaagtggcgctgctcgggccgtgcactcccaaccgttagcttttgcgagtaccactacgcgagggctaacaagggtaagaagttaccagcggatgaggaggtccttgctgttgttcttcagaggcagaagaacaagaggaagggcaggaggagcatcaatcctccgacgtcccctcaggcagccacgagtgacccccagaccagggatctcccaaatggactgatgacgatctcgccaggtagcagtggacctgcggcattgtcaactcctgtgaagattggtgtagaaattcctgcacccatacagcggtgctatcgttccaagaatgctgagccattgcctgttggtcctgtgaaggttgttcctcgtgcgatgagtgtgacaaaaacagcaagaacatgtcactgctgtggaatgaagaaggctgcacgtgtggccaattgcaagaactgtgataagaacttctgtaacagctgcattaataaatggtattctaagttgtccaggaaagatataaaggctcgttgtccagcttgccgtggtctctgcaattgtaaaccatgcagccttggtaattccaagggttctacgcctaaggaaccgccaaaagttgaaaggaagatacttagcataaaaatttccaaccatcaattttacaagcttttacctgtaagacttgaccaggaacagctagatgagttggaactggaagctaaaatacaaggaacaaaaatatctaatgtctgcgtccaggttgctgaaactggtcagagtgagtcactctactgtgctattccgatcgattcatcaacgcatgaagcaggtgcatccgccgcgatcgtcccctgctccgcagggcgccatgaacacgcccgtccgtggccttgggatggagcacttccacctgccgtgcccacagcttgacgatccacgatgcagccagccctcgaaacacccgcggagggagagagcgtgccgcgatggagttcttgaagaacggcagtgggagggtgagcagtgaatggataaacgatagggataggtgagaataggaacacacgggtgagcagtgaatgggttaaaaaatgttcttattttacactagtgttgttaaccattttttctattttatgaattatgactttctatctccatattccaaacagcacatttttctataacttccccatgctttgcatttatcggttttctcccttcattaccattttatccgtatggttcttactttaatacatcagtttttagacctattattttttaaaaagtttaacccaagt

SEQ ID NO: 34156 - DNA, 2804 bp, Zea Mays
gtgctctattgctagagacatatacggtgctttaggttcttcgcacgtggagtagcgtgcacagattagatcatctcaagatggattgtactcgtgttgtcgtgtgattatttgtagcttatgttgctttgtcccatgtaaagcggtactgagttttacagctgactttacgctaaactgaaaacatatgtccagagagagaaccttgctcgatcagtatttaaaaatcaagatggttaacttcgggaagaaattgatggcagatcaaattccagaatggaaaggatattatatcaattacaagttgatgaagaagaaagttaaacagtatggccagcagctccagcagggggaaaaagatcgtcgtcgggttctgaaggatttctcgaagatgcttgatgatcagatagagaagatcgtcctgtttctgttggaacaacaaggactattggcaagcaggattgagaagttaggaaagcaaagggcaatactacaagagcagccagatatatctggcattgctgagttacgagaagcttatagggaagttggtatcaatctcatcaaacttctcaagttcgttgaccttaatgcaactggcattcggaaaatcttgaagaagtttgataagcgttttggctatagatttactgattactatgtgacaagtagatcgaatcacccttactctcagctgcaacaggtctttaagcatgtgggtgtaggagctgttgtaggagctttgtcacgtaaccttgctgaactccaagaacgtcaaggaagctacttatctatttatgatcagccatcttctgctcttaagctgaccgtttttggttttgatcccctgcaggaccccatcattgatatgataaattcttcagttgataagttgacaaggtcaactaattttcttcgctttttggggcaacatgccatgattgtggatgaggagtctcctagcactgcaggagaggaagaaatagaagatcagaaataccatttcatgtcccttatgctgaacctggtgaacacattcctttacatggtcaacacgtacatcattgtgccaactgcagatgactattcagtgagccttggggcagcttctactgtttgtggtgtggtcattggttcaatggctgttgcgcaaatattttcctctatttacttcagtgcatggtccaacaagtcatatttcaaaccgcttgttttcagtagcattgttttgttcttggggaatatatgctatgctatggcatatgatatgaagtctctaacggtccttattatcggccgtttactctgtgggatgggttctgcaagagctgtcaatcgccgatatattagtgattgtgtccctgcaaggatacgcatgcaagcttcggctggatttgttagcgcaagtgcacttggcatggcctgtgggccagcgctagctggtttacttcagtggaaattcaaggtctacatggttacattcaatcaatcgactctaccgggttgggtgatggcagttgcatggctattgtatttgatttggctatggttctcattcaaagaaccgaaccgtgctaccgaggtgaatgaagccccacaaaatcctgcttctggacaaactgttgatattggacgactagagaatggaattgcacagcctctgctcaaggattccgtggataaacaaaatgaagatgaagacgaagttgatgatattgaagaaactgcagatgattctcgcaaacctgcaacatcaattggctcagcataccgattgcttaccccgtcagtgaaggtccagttgttgatatacttcatgctcaaatacgcaatggagattttgctttcggagtcgagtgttatcaccaatcactatttcagttggaatacaagcgcagtggcaatatttctagcaatcctagggttgacagtccttcctgtaaacgctgttgttggaacatacatcagcaatatgtttgaggacaggcaactcctcatggtgtctcaaattacgttgctagtaggcattatcttcagcttcaaagtcacgagcacatactatgtcgtccagtatgttgtctcagcactggtcacatttgtttctgccgaagttcttgaaggcgtcaacctttccctcctatcgagcgtgatgtcgtcccgcctctcccgtggcacgtacaacggtggtctcctctcgacggaggctgggaccctggccagggtggtcgccgactgcaccatcaccgcggcggggtacctgggcgtggggaagctcctcaacgtcaccctgctaccgtcgctggtgatatgtgttgcgtccatcgcctgcaccttcctgacgtacaactcgcttttctgatggagcttcgcgacgtatttgtgtcgtcatgattcgttccaaatcaaggcagctgggagaccgccgttgccattgcccgaaggggctgttgtgttattatattatatatgtgcgtcgatttgattgctgtaaattgacaaaatgatggcagccactggccttgccctgcaaaattttgatcgcttatgtccgtgacgttgtcaatgctatgttgtgttgacgtgttggtccaaactgtaattatgctactctcgactgatctgatctccgctgcgatgcggttttgagagtggagtcgtacgagagtggatcggcgtttttgtccattgggcttgattggatttatgagataaatagtttgtcggctaattttagtaccttttcgattattagctgaagggctactaaattgtttgttcattagtcatttgagattactgatagg

SEQ ID NO: 34157 - DNA, 2807 bp, Zea Mays
cgcgacaccccgtgcagccgtgctcttccgcttgaactagggcgcctccgcctccgcgcccgcgccgccgccggctgtagccatgtccgacgaatacgtggacttgcccgtctcggacgaggatgaagaagagctcgaagatgagatggatgatggtgatggggagagtggtggtggaagctcgaagaaaaaggccaagcagcacgtggagcagctcaagcggctgcagcaaaaggatcctgatttctataaatatttagaagagtttgataaagatttgttgggatttgatgatgatgatgatgaaatcgagaacgaccgggagactggggttgaggagaaagagcaatatgtatctaaagaggaactgaagcatgtgaaaccgattacaatggaaatggttgattcctggtgcaacggagtagagaatgaaaagataggttctatccgttctattcttcaagcttttcgcagagcctgccattatggtgaagatcatggggacaattcaactccgaagctcagtgtcatgtctggcagcgtacttgataaagttatgcactttgttttgaaacacatggataaagtcctccgtcaattacttggtgccccaagctatggagggaagaaagaggtaatcagtgagctgatgctgagtaagtcatggaagaggcatggtaatcttatgaggatctatcttgccaatgcgcttcatatgataacagagatgaccgatgagcaaatgatagcatttactgtacaccgtgtcagagcatcagctgtttttctggcagctttcccatcgctcctgaggaagtatgttaaggctctgctccatacctgggctagaggacgaggtgcaatgcctcttgtttcttttatgttccttcgagacttgtgcattcaagtaggttcagattgccttgatacttgcctcaagggtatctataaggcttatttggtgaactgcaaactgtccaaatctatcagcggatcaaaacaacaacacattcaattccttggaaattgtgtcagagaattgtatagtctggatccacaaagtgcgtatcagcatgcttttgttttcatccgtcaactgggggttatcctaagaggagctcttactgaaagggggccaaagtgaaggacaaaaggcagaaagaaagtagcaaatcatcgaaaaaacaagcggagaaatcttaccaaaaaatttatgattggcaatacatattctgccttgagctttggaccagtgttgtgtgcggatgtagttctgaggaagaattccgacctctagcttatccgttgacacaaataatacatggtgtggcatgcctcgtacctagcgcacgttacttccctgtgcgctttaggtgtgtcagaatgcttaattgtattgccgaagccactggtaccttcattcccgtgtcctccctgctgcttgatatgcttgaaatgaaagaacttagaggacgtccagatggtgttggcaaagccgtgaatttgttcagtgttaaacaggttgacaagaaaacagtaaagacacgtgcctttcaggaagcttgcatttattctgtggtcgatgagctggctaaacatttgacccaatggagctactccattgccttctttgagatgtcctttattccacttgttcggctccgaagtttttgcaaaaccattaaagcggacagatttaggaaagagatgaaggatcttatctatcagatagaggccaatgtcgagttcattaagtcaaaacgagtggggattgcattttcacccaatgacccagctgtagagtcatttctgcagaccgaaaaggaagaacgttgcagccctctctcaaaatttgttgctactttacaccagagagcgcaagacaggatggatgctctggatgagaccagtgtgattgtgggtgccgagtcctcaaccttctcacggaggttatcagaagcgcagaagcaacaggatgagcaggacgatgatgaaggcactatcgctttcagtaagaactggctgtctgaaaataagaaacccaagtatgttctggcttacctctttttttttcccattacttggcgtggaaaacacaatcatactgttgttcggtgtgcagaaccccaaaggaggataaaaagcgaccccgggaggatgatgatgtcgcgactgaggaggatcgggttgaggatttggtcttgagctcagatgaagaggatggcaacaatgaggaagcagacgatggttttgttccggttgaaggtgatagtgatgaagactttgtagaccctgacagcgaatataagaaacaaaagaaggcgaagctgaagaagaggaacaagcgccagccatttctgcacaaggcgccctctagaacaaaaagtaattcagggcccaagaagaaggccagacattagttatgcctgatagggcttggcaaatatgctgccgttgtgatgtatgcttctgagttccgaccgataaaaacattgtcccttgagtggaaaaattattatattttttcaagaaaaatttcaagtctttttttgaccccaacaggactgagatagaatttccaatctgagttttcatttcagtgctcaagggtttacatgattcaaatgtaaagggtttacattgccatggaaaaaattgtacaccaaacatcacaaatatctacctgttcctggtagtgtttatatacgtctagcatgggcgaatgtccatattattgtctgatttgattcatggatcgtcctttcagttctaaatgaactgccaagggctttccacggtaacttgac

SEQ ID NO: 34158 - DNA, 3575 bp, Zea Mays
cagtttcccacaacaacctcgccccattccgtcccgtccccaccacactgctcggcggcggcggcgccagcgccagcgacgacgactagtaaaacgtaacgcgcgccctgacccagtcccgatacgggctataaagctcaccgcccctccgtcccctcctcgcaaacgcaacgtccgtccctgggcctcccgttccccgttcctcctccctgactccctcccacgctgcaccggcccccctccgcacaagcgtttcgttcgttccttcgtaacctccgtatcagcagctgacgcaaagagctagagctgccggtgtgccggtcgccatgcataaccccaggccgggcggcggggacatcgtcgagatgtcgtcgtccgccaccgccgaggggcgggtgatcccgcacagcggcccgctgagcaagaagtcgggcgcccggaagagcgcgcggttcgcggagtccgtgtcggcgccgctgtccgcgccgccgccgcgcgcctccgccaacaacaacaacaacaacgacgacgacgactacgtggagatcaccctcgacgtgcgcgacgactcggtggcggtgcacagcgtcaagcccgcccacggcggcggcgccggcgccggcgccggcgcgggcggcgacgacccggacgtgacgctgctggcgcgcacgctcgagagccggcgctcctcgtcctacggccactccgtcatccggaacgcctcgtcgcggatcaagcaggtgtcgcaggagctccgccgcatcgcctccatcaaccgccgcggcgccgcggggccccggatcgaccgctccaagtccgccgccgcgcacgcgctcaaggggctcaagttcatcagcaaggccgagggcgccgccggatgggaggccgtcgagaggcgcttcgacaagctcgccgagaacggcctcctccaccggtccaagttcggccagtgcatcgggatgaaggagccggagttcgccggcgagctgttcgacgcgctgtcgcggcgccgcaacatctccggcgacagcatcagcaaggcggagctgctcgagttctgggaccaaatctccgacaccagcttcgacggccggctgcagacgttcttcgacatggtggacaaggacgccgacggaaggatcaccgaggaggaggtcaaagagatcatcacgctgagcgcgtcggcgaacaagctttcgaagatcacggatcaggcggaggagtacgcccggctgatcatggaggagctggacccgggcaacctgggctacatcgagctgtacgcgtgcgagcgcctcaccagggcgctgcgctccagcgtcaggcccgtcaggatcctcaaggtggccgtgtacccgggcaacgtcctctcgctccacttctccaagccgcagggcttccgctacaagagcgggcagtacatcttcgtcaactgcgccgccgtgtcgccgttccagtggcacccgttctccatcacgtcggccccgcaggacgactacgtgagcgtccacatcaggacgctgggcgactggacccgcgagctcaagaacgtcttctcaagggtgtgccggccgccgacggagggcaagagcgggctgctccgcgccgagtacgaccgcgacggcagcgccgtggccaacccgagcttccccaaggtgctgatcgacgggccgtacggcgcgccggcgcaggactacaagcagtacgacatcgtgctgctggtggggctaggcatcggcgccacgcccatgatctccatcatcaaggacatcatcaacaacatgaggcagctggacggcggcggcgacctggaggcctcggacgcgtcggcgtcgtcgtcgtcgatggcctcgttccgcacccggcgtgcctacttctactgggtgacccgggagcaggggtccttcgagtggttccgcggcgtgatggacgaggtggcggagacggacaggaagggcgtcatcgagctgcacaactactgcaccagcgtgtacgaggaaggggacgcccggtccgcgctcatcgccatgctccagtcgctcaaccacgccaagcacggcgtcgacgtggtgtccggcacccgcgtcaagacccacttcgccaggcctaactggcgcaacgtctacaagcgcatcgcgctcaaccaccagaaccagcgcgtcggtgagttgttgttgttgttgttcttcttcttcttctttgttgtgcattcctcgaccggtcgccattctacttcggtccattcgtcgaacacgtggcatgcattactacttgcttctctcatgacccggcggtgaaagaagctttctaccaaacccgatatgcatgacaggccggtggtggacaggtgtgatgcgcgtgcggggagtagcagtagtagtgcaatgcggctggcctaactttcgttatagaagacagacagacacatgcattagaggatatagctaatcattgttgctgagacttgatattaattaattaattgcaggagtgttctactgcggcgccccggtgctgaccaaggagctgcgcgagctggcgcaggacttctcgcggaagaccaacaccaagttcgagttccacaaggagaacttctagctctctctctctctatatatatgtaaggatatggatgggtgtagagaggggatcggagtagcgcaaagtaggtatttgcttgaccagttgggttgggtgggtcaaaacccccaacagtttttttttttaattattattattattcttcttcttcttcatttgctctagagaagaactaatgatcgaaatgccattatttgtacagatcctctctctctctcacttagactatagctaggcagttcgatgagcatgcatgcaagcagagttgagggtttgatggccttagtcagatcagatcaaaagcgtcaaaatgcatgtctctggtcgttctcagccacagccagcagtgcgtgcatcacgcaaagaaagcgcacgcatcttgtgtggctgccatagctgaggtgctctaggccacacattctcctactctcatcatcatccctgatacacgtacggtgggcaacaaccatgcatgaacggcctcacccaatgaatgacatgtttcagggttctagagggcgatgagcatgcatgattgcatacgcatgactggcccacatagcaacccagcgtagtcggggttttttttgttttgttttgttgtcggtatatatgtatatattagctcttcgtttgtttattaattagtatgtgccttctgattgctttatcgcattgtacatacatcgatggtgcggagcaagaagagcactacataaagcacacaaaaaaaaaacttgtgcaatggtgggtggaggtcatgcacactcttgaataacaaaatgaggtgttccttcttccccatgtgcggttgcagtttctcttttcagtctctctttctctacaacctgaacatgcttcccagcatatatgacccagttaggagccaatttctaacacaataccttgatgatgatgatacttgaattctggaaaggcatgtaactaaatcttcctctgagtgtgacttcaag

SEQ ID NO: 34159 - DNA, 2110 bp, Zea Mays
ctccacctctcccgagtggagtccttcctgactcctgagacctgaggtggaggaacatggaagtggagaagccgcatactaggaaacccaaggggagggagttgtgaggtagagggacatggaagtggtggtgacaagtatactaggaacgccaaggggagggagctaggaggaaccgcaggaggtccggactttctacgacacaagcagacggctaggccggaaccgccagcaaggatccaggagtccgggtccgcttttctcgtcccgcccgcaaagatcgatcggaacaactagcctagccctaggccctagcccagagccctgccctgcgcaccaaagcggaggggagagacgggagactagagagagcaaatacggtacggtgcttgcgttgcggcggatggcgacctcgtcgtcgtcctctggccccggcgggccgtaccaccaccaccggtcgcggttcggcgacacgacgctgaccaaggtgttcgtgggcgggctggcgtgggagacgccgtccgaggggctgcgccaccacttcgaggcctacggcgacatactcgaggccgtcgtcatcaccgatcgcgagaccggccgctcaaagggctacggcttcgtgattttccgggaccccggtgcggcggcgctggcggtgcagaacccgaacccggtgatcgccggccgtcgcgccaactgcaacattgcggcgttcggcccgccgcggaccgcgcagccgagagggagaggaggaggaggaggtgccgtccgcgagccgcacgggccggatcagccgccgcaggggtcgccttacagctacaggttgccgtcgcagatgaccccgcctcaggccgccgcggtgttctacagtccccagtacggcgggtactggtacccacctgattattcataccaacagggccttttgtttattggccatcatgcgttttgtaccagaacgagacaccagaacaaactagcaatctaaccgaaaccatgaaacctgaaaattgatgagcagccattgtacaattctcaggtgctacaacattactaccctcagatgtatggtccagcctctcattcagtaccaccctaccaatacatggggtatatgcctagtggcccaagtccaagtgctggattctcaccgatgcagcaacccatgcgaccagcgttctttcagcagccaacggcacagatggatggttctttcccaccagggcattcgcttccgcctaatttcagactccagctgccctctcatgcagtctcaaaggaatctgacgatgcatctggctatcagtcagctcagccaacttcaactccagatacaatcgcaaacaaccaggaagattcgaggcctgtagtgtcagattcagatacaaacacaccaaattgactttctaaaaatcctggcaacacgatctgatgtcaatctgatgcagactattggtggtctgtaacagagtcctcatgatactctcacatcttgactgaaaaagtttcccaaatatttgttctttcattatttctaattccttttctaattcttgcactgcatttcttcaccgaatccattgtatcgctgactgaacttcaagttcaaacttcagtaattcgctagcataagttccggtggcatgttagtgttcaaagtactaccgtgctgttagttcgtgtctcaaatatgcagtacagtttttcattgaggagccacccagttttattgcagcaagaacattttttctcttcgatgtagagacggcaccaatttcaactgctgttctattgctcacagaatcataaaatggttcgcagttcgctctgtagcatggcaggtgaagccacagctgacaggcctacctgaaaatactgacagcaagcttgcatcttcactctgaattctgaaattgtcatgttcatgcgacaccatattttctactgtgaagctgaccgtcatgaaagaaacaaattcagtatttatacttatatattacaaatttgctggtaacattatacttcggttttcatatgcacgtactgttcatattattagcctgcagctgtaggaacgtttccttcaagcaggaactcgaccaaacgatca

SEQ ID NO: 34160 - DNA, 2238 bp, Zea Mays
tccaaaacgttccatatcgattatggctagattcagggcccgtttggagggctacggcacctgtaaaaatgggtccggctcctctcgtgtattatttgatttggagtaaaacggtctcgctgctagctgcatcttcttgcatcaggcatgaggtggcttggagagaggtgtctgctcggggagagacgcagcgcagcgcccatatgtggagccgtggagagccaaaaatctgggctcccgctcttagccgtattatggctcctgctcaggagctgttttgcgaggtaggagccggtgctggagccggacactcagtaggaagagtggggaaaaaaagacgagctatttacttcccatttgtaagggggaaacaaaagaaaagagcatctgtaagggatttaccctagatcgtgcggcaaaccagtccctcttcgatccgcgtagaaatcccatccgatgtatagggatcgatccgcgtagaaatccaagttccccagcttcgtcctcatcttcaccgagccctacccaacgccaacctcgctgctcgtggcgtccccaatctgacgccccggccccgcgcgcccctcccaaatctcctcccacggccggccgccccggcgtgcagggcgtcggcgcactccgccgcctccgacccaccgggccccaccggcgtgaggccaaccaaggaaccatggacgagaacggccactacgtcgtcgtcgccctgccctccgcgcgctgcggcggcgacgatgacgagcctacagtcaaggaggaggacgaggaagcggaggagcaggagcagtcgccgaccgaggcgccagcgctacccgccgcccgcgccgtgcggcggcggccgaaccagaagcggaccaagaacttcagcgacagggaggacgagatgctggcgctggcgtggctccgcgtcagcgcggaccccgccgccgggcgcgcgcccttctggagccggctgcacgaccacttccacgcgcaccgggacttcgcgtcggagcgcagcgagaactcgctcctgcaccgctggtccaccgtccaggacaacgtcaggcgcttcgaccgctgcgtcgccgacgtggcgggagcggccgcgggcgcggccgagggagggctcacgccgcaggacacggttgtgcgcgcgctggccctgttcaagtcccgggacaagaacaacaagccgttccagttcatgcactgctggatcctcctgaggtcgcagcggaagtggatggagaggtcgtcgcagtcgcagacctcttcgccgaagctggcgtggaccagtaggccgccgccgtcccagaagaagcagaagacggctccgagcccgagccccagtccgtgcgctccgccgcgtgctctcgacgacggtctagatgctgcagccgcccaagaacgcgaggaggaggaggaggaggctgtgcacgcgatgcagcagccagtggatgggaccgaggaggaggaggagttacagcagggcgggggcgtgggcgtgggcggggctagtctgtacctggaggcggcggacgatctgtggtggggaaagaggaaagcggctgacgacaatggcgaacagcaggccggcgcgaggacgatgcagcagctcagcaacggcgcgcgagagaagcgtgcgctggaacaacagcgcacggtcgcgctggcgctggaccaagccagggctgccaacgaggcgaggagcctcgagataaggaggagagaagtggagctcaggaccaaggaggtggatctgaaggtgatgctggaagaggagaggatcatggccaaggacaccagcgccatgtccgggatacagcagcagtactacaggatgctgcagaacaagatcatgactcggcggttcggtggctcatcttggatggaatgaacggctaggctttttgtgttaattactgtggtggctgcataacaaccgcttagacagcttagagcaggtttatggtctgtttggtttcctacctaaggtgctacaatctgcctaactttagacgtttgaattgaagaactaagcttacacaaaaaagttaggcacgttgtggcgctttaggcagcaaatcaaacagccctttaataatacacccgactgatggctgtaacagcgtaccttttactcatccgtacactagttagctcttcattatattaatataggacttcacatatctctctcacaaagtatacatctctaagaaggaggtgtttagtttc

SEQ ID NO: 34161 - DNA, 858 bp, Zea Mays
gtttcaccgctgggtcagccatggccgccacatccatcaaggtcgcgcacctcacaaccctcgcgctcttctctccgactccaaaccccttcggtccgaagtccagcaaacacagagctagagccccaccacccatctccatctccatggatccggccctcgtggaccctgcccacctgcaggcccttatgctcgcctgcggccactcttgcacgctccgcctctcgccggcgctatcagtttccgccgttgagccggtcgacctcagcaagctccggactgcccttgcgcacagcttcgtcgtcgtatctgtcttctgcggtgctaggttcttcacacatgacagggaaagggagggggagggacagagattcttgggcttggagatcggtctcgatcttcagggtgagcggcgccttgtcggattcgggcgcgccgtctccgacctcgggctcaccgcatccgtccatgacattgtggtacatccattactacagaggagaggaattggccaaaagatagtgaacaaaattacaaggcccttttttgaagcttgtggatttggtgatgatatgatgggttcaacaacaatgttgtatactagaaaaacacagaaatagagttcattaaaaagttctcaattggtataatgttatttgttgatatgataactcatctgttggtcttcactgctgatgtttcaaagcattactctcagaaaaggttgatcttcacagctgatgtttgaaatcattttactcagaaaaaggggggtgggttatgagatgtagcagttatctcaatgtgcgcacctattgggaaaaataatcacaatggagtcgtgacgattaagacaag

SEQ ID NO: 34162 - DNA, 4130 bp, Zea Mays
cgctctagcctctggcaacggcgggtggcggcattgcggcaatggccgcgctgcggttatcaagagcaccggccacggccggcctggccgccgcgggcgttccgcaccgcctcgcgaccccagagcatccgctgccggtgcgggttctacccaacagggcccacctcaacgcgctgctcacgtcctacggccgccgcggccgcatccaggacgcccagcagctgttcgaccggatgccccgccgcgacgtcatctcctggacggccctcctcaccgcctacgccgaaggcggcgacttcgcctccgcgcgcctcgtcttcgacgacatgccccgccgcaacgccgtctcctggaacgcgctgctctccctctacctcggcgcggggcggcccgcggctgcgcacgcgctgttctgcaagacgcccgccaagaacgccgtgtcctacggcgtcatcataacgggcctcgccagggcgggcatgctgcgggaggctcaggcggtttatggggagatgccaccgcggttgagggaccccgtggggtccaacgcgatgattttagggtacctcagggccggggagattgacatggcgctgagggtgttcgatacaatggctgcaagggacgtcatttcttggagttctatggttgatgggctatgtaagtatgggactgtgtccgaggccaggaggctgtttgaggcaatgccggagcggaacgtggtgtcctggacctcgatggtccgaggatatgtgaaatgcgggatgtacagagaaggtctcttgctgttcctggacatgagaagggaaggtgttcaggttaatgcgattacactctctgttgtactagatggttgtgctcaggccagtcttgtcggcgaagggatccaggttcactgcttgatgacgagaatgggctttgtaactgatatatttttggatggttcactgataataatgtattctagatttggctggatggttgatgctagaagggtttttgctttcatgaagcagaaagacatagtatcttggaactcattgatcactggttatgttcagaataacatgattgaagatgctcatgtgctgttcaagttgatgccagagagggatgctatttcttggacgtcagtggtggttgggtttgctaatagaggttggatgagagagtctgttgaactctttgagcaaatgcctgtaaaagacgatattgcctggactgcagttatttctagctttattgcaaatggaaaccatgtgagtgtggtgcgttggttttgtcagatgtcacaggaaggatgcagacctaataccgctgcttttagttgtttgctgagtgctttggctagcctggctatgctgaatcagggattgcaagctcatgcttatgcagtcaacatgggatggatatttgactcagctgtccatgcttctttggtgacaatgtatgcaaaatgtgaatgcaatatgatggccaaaggcctaatcatgtgacattcttgggaatactgactgcatgtgctcgagctggtttggttcaacaaggctataactactttgaatctatgagatcagtctatggcattcaaccaaaccctgaccactacacatgtatggttaatcttttaggccatgcaggcttccttgatgaagcattggaaatgattaattcgatgccccagaaagattatcctgatgcatgggcagctttgcttagctctagtagcctccattctaatcttgatttagcaaaactagcagcacagaggcttcttgagatagatccttatgacacaacagcttacagggtcctgacaaacatgttctcctcagcagggttgaagggagatgaagagatggtaaaagttgcacaattgtccaacatggctagtaagaggcctgggtatagcctcatcatacaggataagactacagaaaataactagcccaaaatgagcacttccatttacagataactggcatgtcataactcataagacagggatattgggttcacagaaaacaattctagcgccaagatgagatatcaatttgttgatgtatgctagtgcagagtcagttttagtacttaagaactgagaatgaggaatatctgataaggtgactagtgatttgaagaataaagagccaggtggtctggatcaaattttgagactggagagttgatgacacttctgcaaataattcatctgctactgttgttgaacaacaagaaaatcattggttgctgcatgctttcaagaatattttgctgcgtgatctatctattctcctcatcaattgatagagaagagtcgctgagagagtgtactggagaaggctgaacagcatgaggctaagacttccaccgggacctccaacatggccaattttcggcaatcttctccagttgagccctcttccccacaaagactttgcccaattttgcaccaaatatggccctctcgtctatcttcgcctgggaaccatcgatgccatcaccactgatgaccccgaagtgatccgtgaaatactcatccggcaagatgaggtctttgcttcgcggcctcggacactggctgccgtccatctcgcctatgggtgtggtgatgtggctctagctccactgggacccaactggaaaaggatgaggagagtttgcatggagcacttgctgacgaccaggcggctcgagtctttcgctgctcaccgagctcaggaggccgagcacctctgccagtttgtgtgggctaaatctcagtccgggaagcccgtgaacctcagagaggttctcggtgccttctcgatgaacaacgtcacgcggatgctgctggggaagcagtactttgggatccagtcggcaggccccggcgaggcaatggagttcatgcacatcacccacgagctgttcttcctgctgggcctgatctatctcggggactacttgccggcttggaggtgggtcgacccgtacgggtgtgagaagaggatgagggaggtggagaagaaggtggacgacttccaccagaagatcattgatgagcacaggagagctagggaggccaggaagagtcgttcctccgttgaggaagatggcggcaacggcaaagatgagatggacttcgtcgatgtgctgttatctttgcctggtgagaacgggaaggagcacatggacgacatggagatcaaagcgttgatgcaggacatgatcgctgctgctactgatacttcatcggtgacgaacgagtgggtgatggcggaggtaatcaagaacccgcgcgtgctccggcgcgtccaggaggagctggacgcggtggtggggcgcgaccggatggtggcggagtcggacctggcccacctcccctacctccggtgcgtggtgcgcgagtcattccggatgcacccggcggggccgttccttatcccgcacgagtcgctgaaggcgacgaccatcatggggtaccacgtgccggcgcgcacgcgcgtgttcatcaacacgcacgcgctggggcggaacccgcgcgtgtgggactccgtgggcgagttccggccggagcggcacctgccggcggaggagggggcgcgggtggagatcagccacctgccggacttcaagatcctgccgttcagcgccgggaagcgcaagtgccccggcgcgccgctgggcgtggcgctggtgctcatggcgctcgccaggctcttccactgcttcgactggtccccgcccgacggcctccgccccgaggacgtggacacccgggaggtgtacggcatgaccatgcccaaggccacgcccctcgtcgccgtcgccactccgcgcctgccgccgcacttgtacggcggcggcggcggcagctcggctccttagttcgatgacactttgacgcacgtgcgctgcactgccagtctcattagtcattatacgcatgatgtacttccctccatatacaatacaccgcataaaccaaacgatgaatgaaatgtagtcgttctatggtttcaatatgagaagatataattgatggttaacatcatttccctccgtttagtgataagccatatactctaggtatgtagtagtgtaacaatgcgatcccagcccaggtaacgaggtagcagagaggtgag

SEQ ID NO: 34163 - DNA, 2049 bp, Zea Mays
ctaggttcgttttgagtgtgagccgtccagctcaagattttttttagccctacttttcacaaagctgctgcactcgtttagattctctgaccctgctcccgagaactcatcgacgccgtccatgctgtcctcctctccggcgccgtcacaagagggcgccgccgttccctcctcctgggcggaagctgcgtcctcggcggcgctccggcactaccgctcactggccaagaaagggaagccgcaggggcgcgagtccacggtcctcgccgccatcctcctctctgccccgcaggactcgcacagcctcactgtgctctccatgggcaccggcaccaagtgcctcggtgcctcgatgctcagcgcacgtggggacctcgttcacgacgcgcacgctgaggtcatcgctcgccgcgcgctgctccgcctcgtctactccgagatcggccgtggcgccccgcctgattggctggttgcttccggggatgctgggagatggaggctgagggatgggcactgccttcatctttacatcacacaactcccatgtggagtcatgccagtaccaccatcgcagtctgatttgccaagaaaacagctgaacagtatgaatgtcgaaattggctttgttcaaaggaaaccagggcgtggtgatacaacatcgtccatgagctgctttgacaaaatcacccgctggagcgttgtaggaattcaaggtgcattgctgtcacatatactggaacccttgtatttgtccaccattactattggacaattacctgatggtactcctgaacggttctctattaaaaataatatcaagaaggccctggatgctcgtctgtcctctctacccaccgaattgccgcctcctttcaaaatgcagaagccaaaggtttttgaggcgcctgtcccaccaacagagtttcaacagattcctggagacgtacgcctcttgacatgcgggtagtatatggtttgttccatgagctggatccttttccccccattttgtctctttctttatgcatccgtttattgtgccattcttttttactgaagcgttagctttgtcgtttatcttttactaggtactcgatttgttggaataaatccggtttgcatgaagttgtcttaggcacaactggtaggaaacaaggaacctcatcaaaggcagcacacttaccctccaccgagtcactggtctgcaagagaagactactagaagcatttttgtcccttgagcatcctttggtgaggcaactaaaatgcgaggagctatcttaccgggcacttaaggatacggctcatgaataccatcacgcgcttgagctcctcaggaaggccccattttttggctgctggcgagctaagcctacatttgttgattcgtttgcagtttcacggtgatgtctcgtgaactggtgaatgccatctccctgtttctttttgtctgttgaaaaaacatactatctccgtcccaaaatatagttctttctagcctatttttttccgatccatattaataaacgtataaatagtgtagaatgaattatattttaggaccgagggagtaggtctgatccagctttgttctgtgtgaaattgtatatgttggtggtccatgaatgaatcaaactgaacttatgcgcgcgtgctgctgtcacttgattccaagcactccctcccggcctccccgcgccaggtccaggtcgtttttgaggttcatcggcgtcaagccgtcagccgctgccggtccatttgttctcgacggatggatcctggaatcccgcccgactcccgagactggaggacaagagactccggagaccggatcacaagcaagcaacatgttcgtttggtttggctttaatttgtaacgaattttattgtttttacaggattttgtatctatagtttacagctgactttaatctgaagcaaacagcataatacatagaggtcgaatggccaggcgaaagagaaagagagataaagttagacactaaaaaaatgaaataaaattattgatataatagaaagataattgtt

SEQ ID NO: 34164 - DNA, 993 bp, Zea Mays
actgcacctgctggctgctgttgccgtgccgtgccgcgcctgcgttgcgtaccatcgcgccgcggcaggcacctcaacccctggcgatggccatgcggtcccggcctcgccgctccgccggccacctataccacctccgcctcccccggctcctcttcctcctcccgttcgctctcctcctcatcctcctcgcgcgcctccccgcgctcctccgccgcgccaacgcacacggccgccagtgcatgccagccgccaccgaccgccccatccccttccctcaccccgtcccggacccccgcctcagccttgccatagtcaccctcgccgacgaggacgccggcgggccgggcgcgcgccggtccttccgcggcgtgctggcggcatccgcgcggaacaaacgcgcctacgcggcagcgcacgggtatagcctcgtcgcgctccccgcctctgccgtcgaccccagccgcccgcccagctggagcaaggtcctcgcgctccgcgcccacctccgccaccaccactggctcttctggaacgacgcggagagaattttattctcagtgatcggacataataattttgttgagtcacctgatcttgttctgacagaggatttcggtggtgtgaatgctggagttttcttcataaggaggtcaaaatggagtgagaagtttttggatacatggtggaaccagacatcatttatacagtttggttctacgagaagtggagataatgcagcactcaagcatctcatagatcacttatcagctgaagaaatgcaagagcatgttcggattgtaaaaatgcagtgcctcttcaattcctacccgtggatcctcacattgaaatcggtgcaccgcctgatcttccacctgcccactacgtggaaaggttccactttctctcgttcactctactagtctacattgcatatgtaatgagggtttacatttgaatgttatggctcattgcattgatcttgacttcttg

SEQ ID NO: 34165 - DNA, 1381 bp, Zea Mays
gccttatcttgtggccgcgcttcctttttcctcgcacagccagacaccgctcggctctctggtgcccagccgagctccccatggtgcgccctccctgcatccatggccactgcacagctccctgctcatccctcctccagccgtgcgcatccagattctcctccacgcacccctacttccatgctggcgaactctctctctctccggcgtcgcgcccctccccctcccctctgctcgctcgcgcccggccggagctccctggctcaccggtgtttctccctgtgcgccgcggcttccctttccccgagctccctcagccatggcgcgcccctctccctgagttccttccctagccgcgcgctctggagcacccctgcgcgcaggggcgggccccactaaattcaatgagagtactgtccggtttgttcacagaataagagcagatccctgcacgccaaatcaagcagcggtgagaaccctgcgagcaacctgaacatgaggcagatctcttgcaagcaatctgagaagcctctgtatccagcagagtactgtccgatataaagagaaaaatgacccaagagcaatgctaatgctaaaactacttggcctcatgcctctgtacccagcagaataaacgtaattggcctcatgcctctgtaaaaggagaaagaatgaacctgacaatgtacaatatcctttcaaattatcatttcaaaggagaaagaatgaccccatagaaaacaatggcttacagttccaagacatctgcatatgtaaaagacaatttcactaacagtttattgctgcactaacatctttctctaagtgtctttaaaaagtcaatttcacaactttctcttcgcctttcttggagtcatctttcttggagctgttgtcgtagtctctaaagcctgcgaagaagaagcctcatgtgttgtcacctctcccatcaaaattccaagacgtctgcatatgtaaccatatatttatcaaaattcacttgttttcaacacaatgtatgcatggtgacaaacatgaaatatgtaccttcttgtcattattccaggactctcttgcattagttgttctcttgtagtttctgctctctccggcgtagactctttaggaaaccattctttggtactatttttccttggctttcttggcctaacgtaaacaaacatgagaatgtaaacaatatgagaaagaaagaaacatgagaatgaattagaaaatttaaagcttgccttttcttagttccgttgagtgggcacttgtaactggctttcctgtgtcctaactctccacaattgggacaccgcactttgcctctaatcatttttttagtcttctcattctcattttcagcaaactttttagt

SEQ ID NO: 34166 - DNA, 2801 bp, Zea Mays
caagagggggagaagtggagaagaaaacaaaagttcttccctcttccaaatccgcgtattgcgcacttttcaatctctcatcacatcgccccgttgcaaggctgcttctgccttctggtgtctctctcgctttccctctctagattccaatactttcccctgttcctgggcaagcccatcgtgacgggagggcgggagacgctgcccagtctactctagcctgggtttggagagagatgggcagatgagggtgggagtgggagtaatacaacagagccaaaccgagggaggagagagagggccagagaacacaaagaggcaaggcaaggaagcagggacagactccaagattgggggcgactggtaggcaagaaaggaagctcttctttttcgagtatcactgggcgattgatttccgccgccatcctttccgctcaattcttagctgccgcagataagagcgaggagcagaggcgctgttttctctctccgattccctcagcttcctgtggcgtggtggggtgtgtggcgacgaagggaggctcgccggggcgcggacggacgcccgcgatggccggcgtcgacgttgccaggcacgcgcacagcccggcgcaccacgccgtggcggcgcgggaccacgtcgcgctgcgccgcgtgctggaagcgctcccgccggcccgccggcccgaggagatccggacggaggcggactccgtcgccgaggaggcccgcgccgaggccgtctcggcggtcatcgaccgccgcgacgtgccagggcgggagacgccgctccacctcgccgtgcgcctttgtgacgccacggcgaccgagatgctcatggcggccggcgccgactggagcctgcagaacgagcagggctggagcgcactgcaggaggccatctgcgcgcgcgaggaggctctggcgcgcgtcatcgtgcgccactaccagcccctcgcctgggccaagtggtgccgccgcctgccccgcgtcgtcgccgccatgcgccggatgcgggacttctacatggagatcaccttccacttcgagagctctgtcatcccattcatttcccgcgtcgccccctccgacacctacagggtatggaagcgcggcgccaacctccgcgccgacatgaccctcgccggtttcgatggcttcaagatccaacgctccgaccagaccatactcttcctcggggaagggtcggaggatggaaaggtgccgcctggttcactgtgcatgatcaaccacaaggacaaggagattatgaacgcgctcgagggggcaggcgccccggcctcggaggcagaggtccagcaggaggtcgctgcaatgtcacagaccaacatcttccgtccggggatcgacgtcacccaagcggtgctgctcccacagctcacatggcggcggcaggaacggacagaggccgttggcccgtggaaggccaaggtgtatgacatgaatcatgtgctggtcagtgtcaagtcaaggagggtcccgggagcgatgacggatgaggaattcttctcatctagcaacgacaatgatacagagagcgaggggtttgacgatgttctgacagaggaggagaagaaacagctggaggctgcgctaaaaatggattctccggatgccggtggagaagaccagtcggactcatttgctggccctcgacatagttgctttgagccaagggagagggagatacccatcgagggcatgagtgtttctggaaatgtggagagtaagcatgacaagaaaggttggttcagtaattggggaaagagagctcaagttagcaagccagaaagggtgaagaagatggcacctccaaggagctcgctctgtgtagatgagaaggtgagtgacctcctctttgaatcaccctcaaatgcacaaacaagaccaggaaggcattcagtagatgtagtcagagcagatgacaacagaaggatcagggaaagggatagtaggaggtatgttccttctgcagagaatgggcataggcgcaaagaaggttccaaagaaagtgaaggcaattcgtcgtttgagggatctacttacaacaaaactccctccagatacatttcctgtcaaggttgccatcccagtcgtgcctacgatcagagtgcttgtgacattcacgaaattcgaggagctacagccgctagaggagttcggcacaccaccttcaagccctgacaaaagcaagagcccagcagtgcagcctccttcgagctcctggattcaatggatcaaggcgccttattaccgccagatgaacttgtctacggcgccaggcccgagcagccgcgtggaggacatccaccaccaggacccgttcgccatcccttcggattacgtgtggaccacacccgaggagaagaaaaagaagacacaggaaaacaagaacaggtccaagaaaggcaggaacgggtgatagagcattggtgggatgggatctaacaggagggacgagtggaagggaaggtttggagatttcggctgtgctggtctgagtctgacgtcgaatattgggaagcgaccgcttgtcttcttttttatttgtgttaacggatttgctgccaacattctttcgtttaacccaaatcgtttcggtcctgattactgttgcaatctgttggtagattttgagatgtggtggcttctatacaaccagtgatgcacatccctatctcctccgtagtgtctaggtacatcgcatttctttgttcctgcatctccaatagttgccaaaatgcattctatatttcggtttagaagaatattaacaaaaa

SEQ ID NO: 34167 - DNA, 2468 bp, Zea Mays
caagagaaacgttcagatactagaccggtgtgcattgaagggcttcagctctctgcctgtaacacattgctgtggttctcagaataaaaccttattaaagaccacctcgtgtttcttgtcagccatactgctgtccactcatgtactacaccacagcagcgagctagatcccagaagaggcaacaaacaatatcacatggggctcataactgcttcgacgctatgggctatgctttatccaggaggccggctgggatgaagacctggtgaacaaatcatacccttgggtagaggacaagattgtccagtggcctaagatcgcgccttggcaggcggcgctacgggatgggctgctacaagcaggtgtagcccccttcaatgggtacacctacgatcatgtctctggaacaaaggtgggtggcaccatctttgacgagactgggtaccgccacacagctgccgacttactagcagctggagatgctagcaacctgaaggtgctgctccacgctagtgtgcacaagatagtgtttggctcgcgacaaggacgactgaaggcaagagccatcggagtcgaattcactgatgaggatgggagacaccaccaggcattcttgaacagcaacagagacagtgaagtaattgtatctgctggtgcgatcggcaccccccagctgctgctgctcagtgggatcgggcccaagaacgacctcaagaatcataacattccagtggttctccataacagatatgtgggtaaagggatggctgacaaccccatgaactccatattcataccaacaagaagccctcctcggcagtctctcattgaaactgttggaataactgaagaaggcgtgttcattgaggccagcagcgggtttggtcagtcgtcggagagtgtccactgccaccatggaatcatgtctgctgagattggacagctgtctaccattcctccgaagcaaagaaccctggaagcagcccagaaatacgcccataacaaacttaatctgcccaaagaggtattccacggcggttttatacttgaaaagattgatggtccgatgtccacaggccatctggtcctcacagacactgatgtccggaacaatccagcagttaccttcaactacttcagtcatccacaggatctcaatcgctgtatctatggtatcaagaccattgaaaggatactcaagacaaaccgtttctctgaactctctgctgatggtgctgggttatcgatggaaagggtgctcaatatgagcgtgcaggctaatgtgaacctgataccgaagcatacaaatgacacagaatccctggagcagttttgcaaggacactgtgatcaccatctggcattatcatggtgggtgccatgtagggaaggtggttgaccagcattaccgggtgcttggagtttcaggtctccgggtggttgacggctcaatattttctaaatcgccagggaccaaccctcaagctacagttatgatgatgggcagatatatgggagtgaagatcctaagggaaaggctgggacgagcagctggagtgtagtcgattcctggacattagctttttattatgtgtggcctaggaaagaaattactaattttttgtgggatccagaatgaatcgctgaagaaaaacaagccatgtgtttcatctgtacccagtaatcatttgtctaatatgatatcgcagactaaatggttgactgagcccctctttcttctttttttcttgtttattaagtggatttcaagaaacaaactcccatgaactgctccctcattaaaggaagattgagattgtttaacaatatcacaccaaagtaccagacgaaataaaatccatggaagagtgttgtatatcaacaaaagagaagaaaatccattcacaaaatcaaataatctgactttattacgtcagaaagtatttggtataactctgctacataagtttcctctctgagggggaaagaatgaaaagtaaaatcgcactgcatcgagagctcatcagattacatttacatctggtcatcattttactcagttcgaactaaagagactctgaaatcatcaattagcagcacccaatacataaatattttttccaaaaaataataataattctagagccttacaggtatcctgagaccgtcatagctaagctggatgtcaagaccgtctgttccaatcagcctggcaagatcactgtttactttctcatggtccatcaaatgcatcattcctgaagataccattcaatacaactcaatcattggcaagaccagacaaactgtataaacaatgaaatatgggacattagcctagtaatgaaatcgggtcaaataattataagcatcaatgtctataaacaagaaaagatatcgcttgatcttcgaatgctttaatgatggggaaaaggggggaatcattgaatgctaacaacagtaagctc

SEQ ID NO: 34168 - DNA, 3512 bp, Zea Mays
cacacatcagctgccgtagcaacgttcccgggaattccccaaaatgcccctcgaccccgactcctcgtcgccgccgccgccacaccgcgactggttcttcccgccggcgccgccgttcctcgcctcctccaggtcccggacccccagtgcgcccttcccctccacctaccgctcctccaagccctactcagcctaccccctcgccgaccgccgaccgcctcctaccccacgctcccgctcccgctctccgcacccaccgccggagcagcagcagaagacgccgacgccgcctactcctacgtccgcgccgcgccgccgtgaccctcggtacgccggcgtccgccgcgaagatgcccgtacggctgcctccgagcaagcggcggccccgatggccgcgccagtgcacgggaggaagcccgcagcgtcggcgatcgctccacggtggtcgggggtgctctccgtggcggttattttactgtgcctggcctcccttctccgcaggaacttctctttgcacgaccaggtttaccttctgcaggagcagctggctgtagctactgcaaaacttcagtcctgcactgtagattcttcattgaatacaagcatcattaatctgttctatcaggatgctgctaacagtaccacgcagagcagaagccttaagaacctttccttgcttatctcgctttcggtattatacgcaccactcctcattctcaagtacgtggaccttgtgtcaaagataaggaggtcacgtgactctgaacaagttccaataaacaagcggttcgcatacagggtcgatatatttttgtcacttcatccgtatgctaaaccattggtcctacttgttgctacgttgttactaattgctcttggtggactggctctgtatggtgtgacggatgatagcttatctgattgtctttggctgtcctggaccttcgtcgctgactcagggaaccatgccaatgctgtgggtcttggacccaagctggtttcagtttcaattagtattggtggaatgttggtttttgctatgatgcttggtcttgtcactgattcaatctctgagaagtttgattctttgaggaaaggaagaagtgaagtcatagaacagagccacactctaattcttgggtggagtgataaattgggatctttgctgaaccaaattgccattgctaatgaaagcttgagaggtgggaccattgtagtgatggctgagagagacaaagaagaaatggaagcagatattgctaaaatggagtttgacatgaaaggaacagctgtaatatgtagaagtggaagccctttgatacttgctgatttgaaaaagtttcaaaggcgcgggcaattgttgttttagctgaagaaggaaatgctgaccaggtaagtgtcgctgatcaagctatgctgttcttgaaatctgttccttacatcattgcacactttttgtagagtgatgcacgagcactgcgaacagtcctgagtttaactggagttaaagagggactaagtggtcacatagtagtggagcttagtgatcttgacaatgaagttctagtcaaacttgttggtggagatcttgtggaaacagttgtggcacatgatgtgattggacgattgatgatacagtgtgcacgtcaaccaggccttgcacagatatgggaagacattcttggttttgagaactgtgaattctacattaaaagatggcctaaattggatggaatgcgatttgaagatgtgctgattagctttcctgaagctgttccatgtggcataaaagtggcatcttatgggggcaagattattttaaaccctgatgattgttatgttttgcaagagggtgatgaggtgatagtaattgcagaggatgatgatacatatgctccagcaccattgcccaaggttaggagagggtatctgcctaaagattttgttgttccaaagtctccagaaagaatattgttttgtggttggcgccgtgatatagaagatatgataatggtacttgatgctttccttgcgccaggatcagagttgtggatgtttaatgacgtccctgaggttgacagagaaagaaagctaattgatggaggtttggacttcagtcgcctcgataatattactttggtgcatcgtgagggaaatgctgttattcgccgtcacttggagagccttcctttagaatcattcgattctatcctgattttggcagatgaatctgtagaagattcagcaatccaagctgactcaaggtcacttgcaactttgctgctgataagagatattcaggcaaaacgtcttccatgcaaggaatcattgatttcacatgttccccgagggaccttttctgaaggttcttggataggggagatgcaacaagcatctgataaatctgtcataatcagtgaaattttggaccccaggacaaaaaatttgttgtcagtgtcaaaaattagtgactacgttctttcaaatgaattagtgagcatggcattggcaatggtcgcagaagatcggcagataaataatgtcttggaggagctcttcgctgaacaaggaaatgaaatgcaaatacgaccttctgatatgtaccttagagaagaagaggaattaaatttctttgaggtcattctgcgagctaggcagaggaaagagattgtcattgggtaccgtcttgaggcagctgagcgtgccataatcaatccaatagacaaagtttcaaggcgaaggtggtcacccaaggatgtttttgttgttatatccgagaaagaatgaggtttatcagatcacagttgacacaaaagcaagctcctgaccagtgaccacacctaatgaagaacaggcagctgcgccgcagcacacacacacacaccgaccagcgcagagagctatttgattcagatgcgcatttggctgattcagatgcgcatttggcagaaggcaatcgctgagcgcgaaggagtaaaagcatgatcagatattcagatcttggatcagtctagactgacaccttaggtcgccctttacaaatatgacttaaaaaggatgtgaacagagtagtacagcacatgctttggaagtttggatattcttgtccgtgtaacttcccacatgaacaacgagcaaagcatcgcctgcatgcatcaattaatggcttaaagctattgagtgctgatactgagcagttttccagtgagcctgttacaccctcccatagagcgtagacgacagcgatagttcagcattctgtacattgcataggcgcattctgttgccagtccatgtaaacaacatgagatgtcggccagtccatgtaaatatgtaatctggaagatcatctgtaggtactgttgcggtgttggatcttgtgaagaatgcagagagcaatgccgaagcgtgtcaccttgcctcattgtacttgagcagatatatattatgtccaacaagtctatgcttcacaacgaatactcaaaatctttgattcataaactcaacaaaag

SEQ ID NO: 34169 - DNA, 1517 bp, Zea Mays
cttgtggagtggaggccaagcccctcgcgaaaatccccccactccaccaccacttctctcgctttcgctttatcacctgtcgcccccgcccccgagcctggtcgccgcttcacccgccgtcgccgtcgtcggtcgggacgcctccgggcggccgcgccctcgacggaggaatgtcttctgttgctcccgccctcgtccaccaccgcggggtctcaggcagagcaatcttacctttgcatcatggagaatgcagagtccctccaggtgcttgtttcatgggcacatcacctacgttggggccaatgagggtatccttggtatgtaatgcaagccccaaccaccataggccaaggaattcggatatatcgcgacaacaaaaaggggggtcctccagaggaaaaggcaagtcgtaccaggataaagatgactctgagaacattgatgaatttgatagtgatatcatgttctccaagaatgggccaccaatctctttggcaagcaattcccgtcctcaagccacatcggctcctggggaaagagagaaggagatcgtggaactctttaaaagggttcaagcacagctgcgagctagggggaaaagcagggaagacaagaagcctgaacatgcaaaagtgcagggtgaaaggggcagtgttgattcacttcttcagttgctcaggaaacactctgtggaccagagaagaaagaatggtgacgacaaagagcagaattccgatgtattgaggagaggcaacgattctggaaatagacaaggttcaaccgtctttggcacaaaaagtgacatccaggaagagaagaagaagccacctccggcacccttcataaggccagcctcaaatttcaggcgaaggtctcctgttcctggagtgaagttccagcctgttatcaatgcggatctggacactgatgacgatcgcaagtccatcggcagtaatgccgtggatgctgtacagaaagctaagacagctcttgatgagaggactgctacagatgagcctgactccatgtctccatatgaggcggattctgtaatagaaccaggaaacatttctttgaatgacctcgatgacattttacatgacgatgaagaattcgatgcggatgaaccagacgacgagtatccagaaccttctttgggtatctctgatgtcacagatacggatgagtcgcacgagaacgactccacccccacgggaagtgcggatctaagctctctgaaggttgcggagctgagagagctcgcaaagtctcgaggaatcaaagggtactcgaagaagaagaaaaacgagctggttgaagtgttgagcagcagcatggattgatgataaagtgggtgacctggcgctctgtttgaagtttgaacccactttgcttggccccctctagaaaattgtaaatgagcaaggctaactctgttccggtgactgaaggctggcaattattggtctgcgctgcgctctcgacgccgtgcagtagctgcggctttgctcatggaa

SEQ ID NO: 34170 - DNA, 1583 bp, Zea Mays
ccctctcctcgctgtcgtcttccttcccagggccagcgagagcttcgttgttccggcgggcagttgcaagcaaacaactgccgcgcgcataacgcgccattgaggtctagagaggtgtgggaagagctgcaggctgaggtggatcaactacctcaggccggacctcaagaggggagcgttctcgcaggaagaggaggacctcatcatccatctccattccatgatgggcaacaagtaggtggtgccacagtggcaggccatgcatacagcagatccccggcccggccagtttcttttatttattagctgtgtgcgatgatgatgatgaatgatccatccaatcggggatgtaattctgttcgttttgcacgtacgaatgacacaggtggtctcagattgcttcgcagctgccggggcggacggacaacgaggtgaagaacttctggaactcgtacgtcaagaagaagctccggcagcgcgggatcgacccggccacgcacaagccgctcccgctggccgccgagggcatcagcagccgcacggcggtgttcagcgacgccgagctcatcctgtcgtcgtcggcggcggcggcggcggcggggcggcacatgccgccaccgccagtggcggcatcggcggcggagagctacgtgtacagctacagccacagcagtggcggcgcgagcgacggctctctgcagtcgctgtcggggtacaacagcaacagcaagcaaacagctgcggatcacttgggtgccgcagccgcagcggggtacctgcagcaggagcaggacccagcagcagcagcagcagcagccgacgcgctgcactgcggaccctccggtgccccggcggtcgttctcccgtcggtgtccagctccagcacgctgaactcgatggctggcctaagccccgcggccaccaccaccgacgaacagtgcaccaacaactgtagcagctgcagcttccacagcgggttggagccgtggctggagctgggcagcacgagcggctactacggcgcggcgctggacgagctcaagtggtccgactacgtgttcgacggcggctacggtggccagccgggacagggcatctacggcgacagcaaggacgccgtgcagttcgtggacgccaacgcgctcagcagcagcagttggtgcttgaattgatccccgtcggtcgatcccaacgcgctcggcggcgagcaattaactaatcggccggccgccaattccaactccatctccagcacagcagagacacacactgatacacgtgtgcatgtgttcctacgtgcctacctacgaggctacgactacgattgattggttgattggtgatacataaagtagctcatacatgtttgcattggtgagcttcttgtttgtaaattcaattttcgtcttctttcggattggattacagggtttgttaattttccggcgcggtcggtcgacatgtagagagtgcatatggtgacggtgattggggagtgacgagacatacatgtaatggaacatatatatagagagagagattacatatataataataatacatatttattatatttatacaaa

SEQ ID NO: 34171 - DNA, 1458 bp, Zea Mays
cgactagcaaagtggaaaattgatttgtccacatttcaggcggacaccaccgtgtcgcccccgcgtcctaaacttctcacctcgccggggtccggtagccgcgaacgatgctccgccgcgcgctcctctcctccgtctccccactccacggaacggtacgaatcccgagccccagctactctcctatccaagcccttctcgctcaatggagcaggtacgcctccgtggtctcatcctcggccccgccgccgctgccgccgccccctccatctccgcctcgaggtccatcgaggtcgagcggtggaggtcccacttcctcgtcgctgaaccctgcagaggtcgccaagttcgcctccatcgccgagacctggtgggattctagtggcccattcaaacctttgcatgtgatgaatccaacccgactgtcttttatctgctccactctctgtagacatttcaggagggatccaaattcatctaagccacttgaaggtctcaaagttattgatgttggatgtggaggtggcattctgtcagagcctcttgctcgaatgggtgctacggttactgcaattgatgttgttgacaagaatataaagattgcaagtattcatgcggcatctgatccaacaactgcttcgattgagtattgttgtgcaacagctgagggactggtaaaagagaaaaggttgtttgatgctgtaatttctcttgaggtgattgagcatgtcgccaatcctttggagttctgtgaatccctctcggctttgacaattcctaatggtgccactgtgatttccacaatcaaccgatcaatgcgagcatatgccactgcaatagttgctactgagtatatcctcagatggcttcctagaggcacacatgagtggtccaaactggttaccccggaggagcttgtcctaatgctgcaaaaggcttccgtctccgtcgaagagatggcagggttcgtttacaatccgttgagcggagaatggtccctgtcagatgatatcagtgtgaactacattgcttttggcgtcaagaagggcgaggcatcatcgacaaatgacagagaagcaaatttatcatagctgaagaaaaacacgtgaccttgaattgtcgggcatcattttcagaggaccaattcatgtcactgaaatcttactgctaaggatgcaaccaagtagcagaagataattctcttgctctttttagtcttggaaactggagcttgtggagtgatgcttcctggaagcgccattgagaagtcaagttgacaacacgtgactgctaacaagtagagctatctgccttttttgggtaatgtttcaggcagtttttctcaattttgtggcaatcactgatctaaataaaaatactactacactgctgtacgtgaaaactgaacagatttgctgtctggaaatgtaactatttttaacagttaagaggtgtttg

SEQ ID NO: 34172 - DNA, 3810 bp, Zea Mays
catagcttctctctctcccccaaccttctcttccacatctccgcttctctctcgcctccgcttcgcttcgcgagagacgggccgacgacggaaccctaggattcgcgcccgcctgagcggccaagccaccaggaccgcgccctccggacccgggggcgccagacaagctccggggcgcgcggatcgaccactggccggcttaccgccgccgctgccatgtcgtcgctcagccgcgagctcgtcttcctcatcctgcagttcctcgacgaggagaagttcaaggagaccgtgcacaagcttgagcaagagtcagggttcttcttcaatatgaagtacttcgaggagaaggtccatgctggggagtgggatgaggtggagagatacttgtcaggattcaccaaggtagatgacaataggtattcgatgaagatcttctttgagatcaggaagcagaagtatttggaagcgcttgataggcatgatagagcaaaggctgtagatattcttgtcaaggatcttaaagtcttctcgacattcaatgaggagttgtataaggagataacacaacttctcactcttgagaattttagggaaaatgaacagttgtctaagtatggggatactaaatcagctcgaagtattatgctggttgagctaaaaaaacttattgaagcaaacccccttttccgggaaaaacttgtcttccctactcttaaggcatcacgcctccgaactctaatcaatcaaagcttgaattggcagcatcagctttgtaagaaccctcgtccaaatccagatatcaaaactttattcaccgaccatacatgttctccacccaatggagctcgtgcatcgccggtatctgtaccactggcagctgttccaaaggctggtgctgcatatccaccactcacagctcatactccgttccaacctccacctggtccatctttagctggttggatggcaaatgcagccgcctcttcatctgttcagtctgctgttgtagcagcagcatcaatacctgttccacccaatcaagctgtctccatgttgaaacgcccagctctaacagactatcaaagtgcagagtctgagcaactaatgaagcgcttgaggcctggtggacatggcattgatgaggccacatatcctgctcccacccctcaacctgcatggtcagtggatgatcttccaaggacagttgcttgttcattgtcacatggatctaatgtaactagcatggattttcatccaactcggcatacactgcttctagtgggatctgctaatggtgaatttacactttatgagatcggtctgcgtgaaacattactttcaaagcccttcaaaattcgggatataaatgcatgttcaccacaatttcagaatgctgttgtcaaagattcctccatatccattaatcaagttacctggagccctgatggagaaatgattggcgttgcattcacgaaacatttgatccatctgcatggataccaaccaccaaatgagacacgacaccttctagagattgaggctcattctggaggtgtaaatgatatagcattctcccgaccaaataagcaactttgtgtggtcacttgtggagatgataaactaataaaggtatgggatatgcatggacataaattattcacatttgaagggcatgaggcacctgtgtattctatatgtccgcatcacaaagagagtattcagttcatcttctcaacttcccttgatggaaaaattaaggcctggctttatgacaatatgggatctagggtggactacgatgctcctggcaagtggtgtactactatgctatatagtgctgatggaactaggttgttctcatgtggaactagcaaagagggagactcctatttggttgagtggaatgaaagtgaaggatctatcaagaggacatattctggattccgtaaaaggtcagctggtgttgctggtgtagtgcagtttgatacagctcagaatcacattctggctgctggtgaagataaccatattaaattttgggatgttgacaataataacatgctgatctgcaccgatgctgaaggaggcctcccagctcttcctcgcttgaggtttaataaagaaggcaatcttcttgctgttactacagcagacaatggttttaagatacttgcaaatgctgatggacttagaactctacgcgcattagggagccggcctccttttgaagcatttaggccgcaatacgaagcttcttctatgaaggtctcaggtgctcctgttgttgctagcatctctcctaacataggccgaatggatcacttggataggaattctcctgcaaagccatctcctatactgaatggtggggatacagcatcaaggagcatagatataaagccaagaatctcagaagaaaagcctgataaagcaaaaccttgggaactaatggaagttctaaatccccagcaatgccatgtagcaacaatgccagaaactccagaccaagccagaaaggttgtccgacttctgtacacaaattctggtgttgggttgctagcactagggtctaacgccattcaaaggctatggaaatggagtcgaaacgaacaaaatccgagtggaaaagccacagctagtgttgtgccacaccattggcagccaaatagtggtcttgtcatgacaaatgatacagcagataccaatccagaggaggcagttccatgcattgcactctcaaagaatgattcctatgtgatgtctgcttgtggtgggaaggtttctttgtttaacatgatgacattcaaggtgatgacaacattcatgccacctccaccagcatcaacatttttagcatttcaccctcaagacaataacatcatagcaataggaatggaagattcaaccatccacatatacaatgtcagggtagatgaggtaaaaactagactcaaaggacatcaaaggaggataactgggttggcattctccaccaaccttggcatacttgtttcttcaggcgctgatgcacagtggataccccaggacacattgtcagcttccatatcgcatgcatcatactcatgtaacagccagctagtttttgctgccttcactgatggtaacttaggtgtttttgatgcggagaacttgagattaagatgtcgaattgcaccatcggtgataaacagcaatccacctgttcaccctcttgtcgtcgccgcacatccccacgagccaaaccaatttgcggtcgggctgtcagatgggtccgtcaaagtgctggagccattggagtccgaagggaaatggggagcgcccgctccggcagacaatggcatcattcccaatggcaagacgccagcttcgtcggctactagcaaccctgctgcggatcaaatccaaagatagattgtattccctaagcttttctttttctgcaaactttctaattacactgacttatttgtatgtggatgccgttaggatattatcgtcatttgttgtaaaaaggacagaataggttttatgttcaggtgtggttaactttcaggtactaccctagttatcctgttcatggaagattatgtttgcgatacggggtaatagtgtctataaagtatgtcgcctaaggttttctcaggtttagctcgatagctcaaatgatgtaagctatatatttcttcatgaatgtaaagcaatacatagtttttgctcaagatctatttttacctggttttacatagtttttgctcaagatctattttacctggttttttaatatagcgtgtgttcatcgaaaaagaggaa

SEQ ID NO: 34173 - DNA, 6083 bp, Zea Mays
acataatcttttattttcattgccaacattgttttcttgattttctgcctttatatcttcttgattaaaactttttgatcgataattctagttctagacaaaatatgaagctagttattttcctatgaactgaatgtttattctgatacccaaagacctcccttcaaacatagtctgtcttaaactattccactttattcatgcatgttgcttgtgctcagacagtactattgccatgaagcaaagtctgtcttaaattattccactttattcatgcatgttgcttgtgctcagacagtactattggtatagtgactagccgtctagcactatattaatttattcttttctgaagacaatctaagcacacgggtgccctacccggtgctacattcggtacatggcatccggtgtacaccgtagtatccactatccagtgctatctgctgtgatgtttttccttacaatatcaaggatatcatttctattattttgttttcattcagctctctaatgagacaaaaatagttcaggggcagatatgtcattttacatgccaagacagagaatccatttaaaaaatcaggattgccaaacattcagcttttctagacaacaaattctctggaaagcgtcttctcaggaaatcaggcttttcagataagcgtttctcagaaaagtggatccaaacagggcctaaattagtgtatctacatgcagctcaatcaaaaactggatcttggatttaaaatccattattcacttctcaaaattagcaaatttaactaagttttactatagatggttcagtgacagtaagctaattgatgcaaataagtgagtctagatgtatgtgcggacccatgttcaaaccgcgcacctgcaactaaacatcacattcccacaatgtgctgttgaatggaatcccagaagaagccacatttcataggtgtgacctttggcagggtgatcccttatcacctatgttatttattctgattatagacgctttggtttatttggttaaaaaggctgaagaggatgggctgcttcagcccctgtcttcaaaggttcttcaacaccagatttctctatatgcagatgatgttgttatcttcctcaagccggctactagtgatatgctttcatcatggatgtgcttcacttgtttgggggaggcttctggtcttaaaaacaatgtgcaaaaaactagtgattttcctataaggtgtgaagattaatacttgatggtcattcaaggccttctgccatgcaacatcttgagcttgataggattgccaattagctacagaggtggaaggctaacttaataacaagggctagcaggagggtttgagtttagtttgtgctcataggaatgttgatctactttgctatgactactgacattcctccttgggttttcaaagcaattgataaaatcagacaaagatttctatggaggagaaggaaggatgccaaaggcgggcactgcctcgtggcgtggggaaaggtttgtcacccccttgagcttggcggccttggtatttcaagtcttctagagctatcttgggcactccgcatgagatggctttggctccaaaaaactgagtcaaataaaccatgggctgatttacctatccaagtcctagccaaagcctaggtgcttttttctattgctctgatttctaaggttggggacggcacatccaccctattctggactaatcgttggttgatggggcaaaatatcatggaagtggcaccaaggttgtttgctgcttgttcctaagagaattacaagaaggagaattgttcttgaagccctcactaatcatcactggattttggatgttcaagttgctttaacaattcaagtaattgtggattatatctagattcgggactgtctcagtcaggtggagttacagcagggggtggctgattctcacatccagttctcgcgtaatggaagatattcagccaaaatggcatatgcgggtttttttgttggctcggttccttttgaaccttatgagaagatttgatgttcatggccccttcctaaatataaatgttttctgtggttggtgacgcacaacagatactggatggcaggcaggctggcttgtagaggcctcccggtgcctgctgtgtgactaggaagatgaaacagtcagccatgtgcttctttcttgtatgtttgcgtgagaattttggttcaaaatcctaaggccttatggcctgcagacccttgcaccataatctgaaggtaggagtttctttctctggtggacgcaggctgaagagagaactaaggggttgacaagaaaaggtttcaactccctcgtcatcctgggagcttgaactctgtggaagatacgaaatggatgtctttgaaggcctctccccatcatatgatttcagcttctgctcactttggtgaagaaatagatttatggatgatggctcacgccaaaggattggtgttcctttcagccgtggctgaggattagtggtagttggtctgctataatctatgcctatgaataatcctttcttgtataagaggttttggccaccatgagctagccatttgagttttgtaaggcctttatacgtttcttcttagtataatgatacgtagttctcctgcgtctttgagaaaaaaagttctaacgaaattcactagaatttatttgatgtggcacattttgatatcaggtacttcttgaagattatatatagctcatttaaatgtgtgatccatgtcaaaaggtggacctgattaactgattttgaaaacattatattcacaccttaaattattaaatttgtttcaaggccaagtagcaatgtatatacacccaaatgcgtctctaccaaatttgaaatgtcttatcataaaattcaagctctaggtccatatagatctcattctctaaaaattgatccatatagatctatccctacatgtaaacaaaacctagtcatgcatacctatgatttattccaacaaggcgcccacaaaaataaatgatcaaatattttatcagaatttacatatcatttcttttttctagtcattgtaatctgtactattcaatagacacatgtttgtgaaaattatagagatgcaaggcaggttatccgtaaacccgtaaatagactaaatttttacgagttacccacaaatttgcaaaagattagcctatttgtgggtttatggacaacccgacttgcatccctcaaatattacataaaaaaactgagggtggttgaaaacatacagggagtgcttgaagatggctttgttgccgtcaagaagttatactcgtatattgcaattgaagacgaaccatttcatcgtgaggttgattgtctaatgaatattaggcaccacaacatagtcttgtttgttggttactgtgctgaaacacaggaagtggttgtgcgtcaagaagggaaacatatttttgcggaaaaacgagaaagattactttgcttcgagtatttgcataatggaagccttcacaagcatctgacagccgaaccatgtgggcttccatggcacatttgttaccaaataataaaagggatttgcctgggcttgcactacctacatgacaagaacataattcatctagatctgaaaccggacaatatattgcttgatgatgacatggtgcccaaaatcacggacttcggtttgtcaagactcttgggtaatggaaaaagccacaccattacacaaacaagaataggaacatggggttacatggcacccgagtacttggatgatggagtgatcacaatgaagacagacatctatagcttgggtgtgataatcagacacatggtgaagggacgtaactcggcagacaccactgatgaagaagtactggcaaactggttgattaggctggaaaaggatccatcacagatgatgaggcagcagacgacccgattattatttgaaacagagtacaaagagcaaataaaagcgtgcatggatatatcatggaggtgcacgctgcgtaaaccaatggacaggccaacgacgcagcacatcctacttacactggaggaaacagaagcaaagatcaaatcggtcgttgggcctactccaccaaatgccgggcagcttcagattgccaaatttgggccgtggggtggagatggagggaagacgcgagacataagaatgacgccttgccatttgcatagcgtaacaattagcagtggaactattatcgattctatcgggttttcattcactgatcactatggtcagcaccacacaacagggccttggggcggtaaggagggtacgaataagattgaactaggcccttcggagtttcttacaggagtatctggaacaagcggcccattcaaaaatctaacaaatgttgtaacgtcacttacgtttgtcaccaatactcgtagttacggaccctttggaaaagggcgaggaacaccgttccacatccaaacgcagaacaacggcaggatcgttggcttctttggccgttctggccagtatctctatgcgattggggtctacacgaaccaagatgctagggtcgcaaggatcgggcgacctttgggtggagatgaaggggttcttcatggcatcacagacctcagtgggcagcagcgcagcagaggtggaggtccatcgggagaatgtggagacagcgacgacgagcccaacggtgatttcgccaaattcggcccgtggggcggcgacggaggacagccgcaggacatcggaacactaccctgccgtctagacaggatcaagatcagcagtgggcttatcatcgactcgatcgagttctcgtacgctggccctgacagccagtaccgcaccgcaggcccttggggtggtcatggaggagacaacagctcttttcagctagctggttcagagttccttacaggtgtgtctgggtcaatcggcacattcaacggccatgcaaacgtcataacgtctctgacgttcgtcaccaacgctcgtagctacgggccgtttggaagagggcgaggcacatccttccacatcccagtgcagggcaatggctgcatcgtcggtttctttgggcgctccggacggtacctcaacgcgatcggtgtctacacggcgccgaaacccgaaccaaaagcagttgggaaacaagatggtggtgatgaggccgtcgtcgccaggattgggccttggggcggggttggaaatgctctccatgacatcgcagagaggccgcatcgcctgcacagagtgacgatcttcagcgggacgatcgtaaactcgctggagtatctgtacagcgatggcgacgggcagcagcacaccaccggtccgtggggcggctgcggaggaactggtcgaaagattcatcttgcccctgaagagttcatagtggaagttactgggacattccatccatgcgcgtgggacagaacaatacccagtgtcgtgtcctctctgacgctcgtgaccagcacgggcaaaacacacgggcctttcggaacgcagctgggagccgcgttccaggttccggtgcagagcgacagcaggatcgttggcttcttcgcccacggagacaattacatcgaagcaattggcgcctacgtgaagaaattgacagaatccagcaaccgttaactcttggaacaacttgcagctgttcacactgtttcttgggccattgctccttaaatttagtccagatggccaaggagcaaccaaacagaaatcgctatggcagggaagatggactaaactggactgtggcacctccagcatagcctgctcttagattagtgaccagacatcatcgagatatttcgatattataataaatgaggaacccatctcagatgtttatgttagctcctcagtttttgcttctgaatgattaatttagatcttccttatttttgcaataaatgaggattcttttctgtctcttctgaatggatacgaatcatgcatcacgtatcagtgcacctattgcagtgaggagatgaggacaaggtgctgacgaacttattgtcctgagctcccacttgagtttctg

SEQ ID NO: 34174 - DNA, 1931 bp, Zea Mays
gggcgtattcctctctctttcctcaacctcatccgagtggctctccgtgtgctgtggcggcggcggcgcccggctctgctcggacggactccaccgaaggctcggctcccctcggactccacctgcgacggccggccctctgcctgcaccgacggtgcccggctccctcggcatccaccagcggtgcccgactccaaggagctgtgccagaagcggcgatgggcgccgccgttgtacgagcctacccgagagggtcctgcccacgcgcccctcttccgcgccactgtcgtcgtgaatggcgagaggttcagttcccgggatgaaggggagaagtcactcaaggaggcgtacaacctcgcggcgatggccgccttcgacaacctcatcgcgctcccggccgcggcccttgcccctgccccggctgctccagcgccgccctcatccgagacccagcttccttacaagagtcagttacaaatttatgctcagaagcgaggcaaactcctgccttcatatcgtcccattcatggaggttctcttcatgcacctctatttaagtcagaagtaaccatagatggtcaaacatttgagagcccagagtactgtcacacaatgaaggaagctgaaacagttgctgcaaaagttgctctgatgtccttacctcaagaagcaaacccaacacagcaattactgcttccatctgtaaactataagaatcttctacaagaactagttcagaaggaaggctttcccttgcctatctataatacagcctcggatgtctcgaactattctgctgccttcgtatcaactgtggaaatccatggtgtaacttttcatggaaagccagggaacaccaaaaagcaagcagagatgaatgctgcaaagtctgcttttgaacatttcaaaaacataaatcatgatgctggatcatctggctctgctaacccacttcctgttgccgctacaaaacagtctgttgatggaaacactctacgtgcaaagctggaagttaacaaatcacaccttgcagagccaagcacagaagttgaagcaatatattcatctacagaagttgacaaactgccacttccagggccaagcatggatatcgaagtaatggactcaactcttgaagttgacaaactgccccttccagagcgaagcatggatgttaaagttgtgaattcgtctctgaaagttgacaaactgcactttgcagagccaatcacagaagctgaagtgatccactcatctctgcaagttgatgaaccgctcattccaaagccaggcatgagctcatctctagagaacacacctgctgtgaatggccactcagcccccatatccccaaccattactcctactctaataagcgtgccaacagcaaccatgcctgtcagcaatgacagatgcggttgctacatgtcaaccaacagaatccaagtctaccctcgccacactgatatggttatcccggaaggcgcggccgtgcttcccatcagcgataatcagtgggtagctgtcagcctaccttattccatggaacaaagggatttctgttgccgtaatccggactgccacttaggaagataaaagcagacaaaaggatggatgctttgtgatgattatatagcttgtgatgctgagcattgcccgtgatgtactaaaatctagtgtaacaagactgccttgcgctggactacgattagtgtccctaatgcggagacttgtgtgactcctattgtatctagattaagctgtacttgtttgactatgtgcggaagtcttgagttacactcctatagtagaggacttgaactctggatggaccatccgcaacatttatcatgatcagacttttttcatacttcctacttgagcttgttgtctttcggaatgcttctgtatgttgatatgcgcccgagttt

SEQ ID NO: 34175 - DNA, 234 bp, Zea Mays
caccaatcgtcatcttctaccactgaacatataatactactaataaatgtgcacaaacctaaaaacgagtggaaaacagtgattaccgagcagttatcaacgaatcttgtcgttagtgtgccgaatctcgtccgtgtctaaagctggcgcgccctcgcttgatatgtcagaatccggtgttttcttgtcaagaaacgatgaaatctgaccgaatctcgatgtattttgggcgag

SEQ ID NO: 34176 - DNA, 1866 bp, Zea Mays
ctgccaaagcgtagttctgcgacatctaaaggagtgtggaaggcggctgccttgtccgcccggcctcttccgtctcggagcgagaaatcagcggcatcgccgcgcgcatccgaagcgcacacgacaatgcagggcggatccagcggcatcgtctatggtggcctcaagtaccaggcacggtgtatcgccgacgtgcgcgcggacgccagctcgaccaccttcctcgccgggaccctcagcctcaaggaggagaacgagtaggtgcacctgatccggctttcgccggcggagagtgagctggtgtgcgatggagtcttctaccaccccaacgagatctgggatctcaaatcatgtcccttcgatcacagggtcttctccacagtctacacatctggtgagggctttggtgcgtcagtttggaagatcccagagcttaatgggcaatcaaactcaccgcagcttgagcagctctttgagcttagtgggcatacgggcaagattagacggtggactcctgtttcttgtgatctggtggccacttggaaagcatgataaactaattagcattgatgaccgaaatatttttctttggaacgtagacatgtcaaataaatcagctaaggtgatctcacagggatcagctgacatgcttccaaatttgagtggtggggcttgggatccacacaatcataattcaattgcttcaatatctgattcatcacttcatttgtgggatctacgttctatggaaaaatcatctgcaattgaacatgcacatatacgggatgtggattataaccccaagaagcaacacattattgcaacaacagaagatgactttggaatttgcttgtgggatctcagaatgcttaagcttcctctgaaagacctccctgggcactcacattggacatgggctattcagcacaatcctgagtatgatgagctgcttctgagtgctggaacagattcaactgtaaatttatggttggctaaagttagcaacaatgattctgaacctaatagcccttctggttcacccaatagacaagaagaaccattacttaactcatatactgactatgaagacagcatctatggtattgcatggagctcccatgatccatcattattcgcttctttgtcctatgatggaagggttgtcttggaatcagtcaagccctacttgcagagaaaatgaatcttgctggtctaacttttggattgtaaggtgtaggatatgattcctcatttcctttatcttgtccttattgccaaagttatctcatgtcctaataaactgttctctgtccctgcagcctacaggcttgcttgttgtttatatttgatgcgttatagttttgccttatattctgtaccctcttgacaaccatttatgtgatgatgtgttttactgttgtagcaatggcagaaaaaacataataaggatgttgcagaaatcatcctgcttgacatcaggtcttcaaccctcttgattgaagccagcaatggctccaaaacactcagatctagcttcagttgagatattacagcacagttgagattgtcagcagtttcctttcctgtatcttcaaattttgtccactaggatttcatgttcagttgctagaaatttggctgtgaagatctgatctgtatgttaataactgttgcccatctgtctgaaatagttttctatacttgattcttaggatgttgtatatttgaaaagtgttcacaaaaagatattgcggtatatgatgaggtggagttggactgaatttgtaaaaccattcagaatttcaaattcccaggattagcttgttttatgaaatattctgttgcgcattgaaaattcggttcttt

SEQ ID NO: 34177 - DNA, 4233 bp, Zea Mays
gcctgcaactctctcgtcccggcaaaggtcacaccttcctccctcgtccacatccgtgcctccagccaccggccgcctagggcggcgctcttgccaccggctgtcgagcccgccgaccttgccgccgtttccacgccgcctgacctgcccccacgacctgctgccgtcacgccatccgacctgccccaggacagcccaagcccccgcgaggccgcgacctgctggggaggagattgataggagaggtggtcggcggcgtggataccaacgacggagacatagtgattgccgcccgtcgtcccctgtttccgacacgctgaagcctcacgccacgagcgagcagagggccccaactgccagcagcaaccttaggcactggttgcttgaaggcaagcgcgtcgtatgttatccgttttctatcacattaccgtcgtaattatcatatccctctccccagttatccaagcattatgcagggacagaaactataaaacttctagcaatcttgttgacccaaacgatttgccttgtttcagttcttgatcttcttctttgccctcagctgaaaatgggagaagcaagggaaacattaggaaatcacaccaatcagcaaaacaattaaacccttgattgtgattttcagctgtgcaaatcttaattagatatctcagataatccatcaactagacaaacatacaaagtgaaccgaacaactctcaaacaatatgatatttcctaggcaactctcaaaggaaaaagtcacatagcaaatgacataatttagtacatgtaatgaattctgatgatgtatgccaagtttatcactagcgtacatgtctaaagctgactggcatccgcttgcttatacaaatccaaaatatgacattactacagtaaggcatcaccattcacaaacaagaaaatagtacctcgttgttgtggccacatttcttcttgcggcagttaacagccttggtgtgcaagcgagtatagcacctggatcagatatttgacatcaagcacttagactaccctaggttcatactgaatataagaatttccaatgcaaacacaatactatttacaaaactatctaggggggaaatcaaatggtcctttgtaataatgtttacgaacaaagcaaactaggtgcaagacagtaaacgtcaaaacacagacaaaacaagaaccagagaaacttgcagtgatcaaaagtctgaatgattggcaggccagacaaaatatatgcctcaaaagttaagctcgtaaggcgacttacacatctaattgattcatcattccagccaatcaactatgagcataggaaagcacaaatcccagaccaaactcaaaagatacttcaactgaacaaacaagttatactacctaattggttcatcacccctgccaatccactaaactgaatacaatgaaacaaagatagtggactgtcacaagtggttatatgttgcatattttaagacattcccggttgttgaaaatttaggagattagaccttcattagtatagatgcagatcattggtctcctcatacgagccaaattttcaagaaataccaacgaaggtgatggcacacaagttgatgcacacaatgataccacgcaagatgatgcacttgaaggcaaggaagatgattgtttgtgctactatgccgctccataattttattcgtgagcattctagtggtgatgtgggctttgcaaattgtggttgagatcctgattttgtgcctactatcccaatttcccaaatagatacaataaataactgaataatcagtgtcaccacatgcctcagatcaatccacttctaaatcaagttttactacaatggatgcatttcgtgatagtatagcaacgactctcacttgtgtggaattagcaccaaatatttatgcaatattttgcaacatctatttgtagtgacttgtgtgaagagtgaagacaatgattatgtaatatgttactagtttattattgctgcaaggttgaatatttgaatttatttgaaaaaatcatatagtgatttatctttgttgtattgttgaatagtcaagttcatagcaaaaatagttgcataaagatcattattctcaataaaacaattagctaaaacaaccaaatgataggaaggtcattgcagcctcaaacttcacttttctagagttggatgcacctttctggtcaaacacagtcaaaactccagaggagagcagctccagtctggagttatagagcaaagctactctgaagtggagtggagccatacaaacacaccttagttggcgtagatttttgtgaatccgcttttggctagcgataacgtcttctgggtttccaaaggcttctactcgactcctctaggccttttgggacgtgaccttcatcttgtgcgacttgccaaacgaatccgtcacaatactgccgaatgcaatggaagcttcctaccataacagtcgacccttttcacaccggtcaacgcagtaaccaaacattcggacgcgcataaaatcgccacgcacgcatcgctggttttgccgtcgcagagcagaaggcactccgggacggcagcgtgctctgcagacgctgaaggcaggatgtggctggaagaggtgaggcggagggagcgtggagagcttcgcgctcggcggtttgaggccgccgcccgagcgtgccgcacggcttcgctcgcgctctccaatcgcaaggagtttgtcaccccacatcacggcgccgtcaactcgctccaggttgatttgacagaggggaggtacctgctctccggggcatcggatgggtcggccgctgtgttcgatgtgtggaacgcgactgaatacgaaaccgggttcatagcaaagcacaggaacatactgcttgtggacaagcaacaccagaatggccacaagttcgccatctcggcggccgtttggtatcctgtggatacggggctgtttgtcacagcatcctttgaccagtttgtcaaagtttgggatacaaattcgactcaagtcgtcatggaatttaagatgcctggaaaagtgtacactgcagccatgtctccaatcgcaacaacgcacgtgctcattgctactgggagtgcagatgttcaggtccgtctatgtgacattgcttctggagcctttacccacacgttgtctggtcatcgtgatggtatcatgtctttggagtggtctgcctcaagtgagtggattttgatgagtggtggctgtgacggggcaatacgtttttgggacattagaagagctggatgctttcgggttctggaccaatcaaggtctcaacttggaaaaaggccccttgttaaaagtgctctatataaggatcacacagattccttaggaccttcaccttccgcaaggagaaggacaggcatttctaagaagagttcatcagctttgcgcaaaattcaaaacccgacacatggacacatgcaacagagattgcatcctggtttgtcatctagtcaaaaccgtgctactgctcattatggtgctgttactggtttacgaacaactgcagatgggatgtaccttcttagctcaggatctgattctcgcttaagactatgggacatcgattcaggctgcaatacgctggtcaattttgaagctatgcgattgcagacaggcaagccattacaattagctgtcactgaggatccttcacttgtatttgttccatgtatggcaagcatcaaggcatacaatttatggtctggtaaaacatttcaaacattccgggggcactatgaacttgtgagttgctgctactatagtgaacaggaccaagaactttatactggcagcaacgacaggcaaattcttgtgtggtctccatcaactccagcttttactaaaatgctgatgaggataactggagcgactgagaaaccctggagccgggaggagtgtgtcttgtatctactgacatcgatgttactgatgttaacaaataacatgtcgaggttgttaggtcttgttagcagcccctaaatgatgatattgtcttggtgtattttcaaaaatatgtacattaccatgtgaaaatttgacagatcattgaataatttgtagatttatctcaggaggatagagggatgtttgacgttcgccaaaatgttgtttagccctggagccttgttttcttcactgtgtattaatgctttacccaaaaataagaatttttctgagc

SEQ ID NO: 34178 - DNA, 252 bp, Zea Mays
ctccatcttgaaatcatagagctggttcgacacagaggctgctacgcgcttgaggttgtcgatgcgcaactcccaactaacattgtgtacctcgaaccttttgtccaattcggtgatgaacaccttggtctaggcgtctagggaaatattcaatttaggatccatggcaccctaagtcttcgcatgatgtgtgtagtaatgcggctctagatctatggaccgtcgtctctgatcctaattgttagcgccact

SEQ ID NO: 34179 - DNA, 307 bp, Zea Mays
gacgagcagcacagcaagggaaaggggcgagctgccgcagggaagccgcgcgccggaagctccacggctgggcatggcggccatgggcagggaactcgtggaagagggagcagcggcgtgcagaagctcagcgcacagggggatccgagctgaagctgagcacgcgccatggggaactcgccggcagggcagagagagctggaggcgtggcttgctgggagatggagagaaggaaacgagctcggctggctggggttggggctcggcaggggagccgccatgggagcaggcaaagggcgagcaggac

SEQ ID NO: 34180 - DNA, 2083 bp, Zea Mays
tccaaccctttcccttcctgccgtctcgttcctatgtgcaagtccaagtctttccgtttcacgtttccggccgcttcttcattcggtttttcttctttctgcagtactagtagtagcttgcatagttggacatctctctctctctctctctctctctctctagctagtacggcaccggtcgtcacaagctgtatatagccgtgtcttcctcgccattacccggcttgatttgatacctcctcgctccagcctacccatccatggacttggtgccgaaacaccagcagcagcagcagcagcgagggatcaaggaggaagaggagatgacggtctttgcggagcacggggaccagcaggcgacttccggggccggccacggcggcggcggcgggcgcaggagcgagatcaaggaggtggacttcttctcggccgccgccggcggtgccgtgtctcgccgcatcaccgacgaggacgacggcggggaagatggcggtcgagagcccgcaggagcagtagctcgtggctgccgtaacaccacggtcaacactgcactggacctgctgaccaggccggcagcgggcgacggcggcgaggggacggcggccagtggtcgtgacgacgatacagagatggacgtggcggcggtggagggggagctgcggcaggccggcgaggagaaccggcagctgcggcggatgctggaggagctgacccggagctacggcgcgctctaccaccagctcatccaagcccaggcggcccagcaccaccaccaccaggccagcggcgcagcgaagccgatgctaccgacgtcgggagtgcagttcatggaccccgccggccgcgtccctccgcctccggctccggcgatggcagcaggagcggcgttcagcggtgaacgggggggcgactcagaaggtggaagcggaagcggcggcgaagcgggcccgaacgatgggacggggacgcctgagcgcggcgagaacgccgataaccgggcgccggcgccggcggaggcgcctctgcggagggcaagggtgtccgtgcgcgcacggtccgaggccccaatgatcagcgatggatgccagtggaggaagtatgggcagaagatggccaagggtaacccatgccccagagcttactatcgctgcacaatggccacaggatgcccagtcagaaaacaggtgcaacggtgcgcggaggacaaggcggtgctgatcaccacgtacgagggcacccacagccaccagctgccgccgcaggccgccgcgatggccaagaccacctcagccgcggccgccatgctcctctccggcccggccgtcagccgcgacgcgggcgcgctcttcgccggccaccacgtcgcggcgccgctcttcgcccagtaccacccctacgcgtcggccgccacgctctccgcctccgcgccgttcccgacgatcaccctcgacctcacgcactcgccgccgccgccggccgcgggcctgctccagcaccgtctgcccacgccgcccgtcccggccatgccgttcccgatgccgtacggcttccctggtgctggtgggcacaggctggcggcggcgccggtgccagccccacacccaccggccggcgcgacgctgctgggtttggacggaaggaaccggtcggcactggacaccatgacggccgcgatcgccagcgaccccaactttaccacggcgctggcggccgcgctctcgacgatcatggccggagccggaggcgctgagccacaagctcctcacctaagcggcgccgctgacgcctccggagatggtggtaacggtagcgccggcactgggcccgccacggctgcggctgccggagcacgtgagactgcattgcatgcgcttttgcaaaggcttaatgacagcaggcaatgacattggaaccaaagctctcatgcaccgccatctgtgcataaatccgtatacacacatcggctttaatttgtacgcttaatgtataccatagagccctcttatatacttactacgttgtagagagttgtaaatggattataattgagcttttataaaggcaatttgaattttcacgtacg

SEQ ID NO: 34181 - DNA, 1917 bp, Zea Mays
ttgggtgggatatattcgccaacaaactcatttcccgtctccacttgttcctcctctgtgctctcgcctttccattcctccaccggcctcatcccccaactccgtcgagcattaccgtcagagggcggcggcgcggcgcggcgccgccggcgacggggaccgcgtgaggcaggctcccctcaaggctcgtcctcctcgtcgggaggcgtcgccgttgccccgccctctgggctggcgcggcgtggaggggacagctggagatccgcccgtctctgcttggattgcttccttctcccgcaggggcaactccaaaaggagttctgagaattatgggtgtacaaggattaacaatataccatgtaaaaagtcacttgcagaaatacagactagcaaagtatattcctgatgcttcaactgatgggaacaagaccgataacaaagacccaggagatttgcttgccggacttgagggatcctcgtatgaacacataattctaattcgtttaattttactgaagaaggatataattcaaagtctagttatttattcccttatgagccattttgggtgaaattttactgtcctagtggcatgatatcagatggaagtatgatgatttatgggattagttagctgtgaacgtatcgtaattgtagctactcctattttagagtgatttctgcaaaatgaacaaaaacatattgattccatctgctcattattttttacctttaatgtcataagatgcataactgttagacaggaaatacagagaactcaaaataatttcaaaatcgaacagtggtattttttatttcttctaatgaaaatggttaccatttcagtcccttttatttcttttctactagaaatatttttcttgtaaggacctttaattgtataagtttttgttcacagtggattgcagatatctgaagccctcaaactgcagatggaggtccaaaagcggctgcacgaacagttagaagtacaaaggcagctgcagttacgaattgaggctcagggaaagtacctccagaagatcatcgaagagcagcagcgcttaacaggtgtgaaatctgaaactcctgctggaggtgcttctgtcactgtatcaagtgatcaattcccagactcggagcggactgagccctccacacctgcaccagcatccgagtctccaactcaagttggtgcttccaatagggacactggagaccgaactgaagcaaccaagagcacctgtcatggtgattctctttcccgcaacgagccactaacccctgattccaactgccagaacggttctcctgtcgctagtccaaaccatgaaagggcagccaagaggcagcgaggcagtggtactgaattcttagattctgaggctgagttttcccttccgcgccacatcttcgagtcgagttcaggctcagagttccaacaatactcaatgtcctactcaggacagtagcttctgatgttcacatcatctctgcaccgttgctagcttgttcagcacgatgcgcatggtccgtaggtctgggtaggttgatgtctcaaggagcgtgttgttggtaaacaaagctgtaggtgttcagtgattgtctacatggtatacgtgaccagctatttaagttcctaggtttgtaacatgtatgtccgcctgcagttcagttgagatgcttcaaggctaaggttctgttgtgtgacctgtagacacgaggctgtcagcttgtattctcttggtaatgtgtgtcagcagagcgttagcattaagtctaattgaacagtgctgttatctgtaacgtctgagtttgatcagaaactgaagttaattgaggaagacatcaacaatgttctgatactattggttgcttgtgttattagattcgacctcatttatgtgggagtaggac

SEQ ID NO: 34182 - DNA, 3934 bp, Zea Mays
gtggaaggaggactagtctaatccactgccctgccgttaaacaagtacttgaagagcgaatgaagctcccggcgtggctcaccgccgtgccgccggaccctcgggcgtacggccacctcatccagctctgcgcggacaccggacacctcgctgctggccgccagctccacgctcgcctcgtcgcttcctccgttaccccgtccaacttcctcgcttccaagctcatttccctatactcccgcggagcccaccttgacgacgcacgcagggtgttcgacgccatcccgcggcccagcgtcttcgcctggaacgccatcctcatcgcactctcgcttcactcggccgatccctccgacgcggcccgcctcttcgccgcctccggcatctctcctgacgagatcacgctctccgcgctcctcaagtcgctcgccgactccggaccgaggttgtccgcactcgtcgcggaggtccacgccgtcgcggtccagcgcggctttggggacgacctgttcgtgtccaatggtctcatcaccgcgtacgcgaacgccggagattcacgctccgctcgcgcggtatttgacgaaatgccgcggcgagacgtggtgtcctggaactcgctgatatcgtcttacgctcgcgcagggtggtaccggcagtgcctagagctgtttcaggagttagcgagcgttcatggtgctggtggtgttagacccaacaacgtcaccgtggctagcgtattgcatgcttgtgcacaactcaaggctgtcgactttggggtaagagtgcaccgccttgctgccgagaatgggcttgattcggacattgcggtgtggaactcagcagttggattttatgccaaatgtggaaggctcaagtatgcaagagagttgtttgatgggatggctaagaaagatgcagtcagttacagtaccatgattgctggttacatgaaccatgggcatgtcgacatgggactggagcttttccagcgagcagatgttcaaggtatcagcatttggaacgcagtgattgctggattgattcaacatggtcgccagtccgatgtgcttggactactgaatgagatgattggttctggaatgctaccgaattcagccacactttcaatcctcattccttcagttcatttgttctccaccctactgggagtgaaacaagcacatgggtatgcgatcagaaacaactatgatcagagtatcggtgttgtgactgcattgattgatgcttactcaaaggctggatttcttgatgggtctcggagggtctttaaactgactgatgatagaagtgaaattgtatggacatcaatcatatctgccgttgcggctcatggagaagctgcagaggcattgcatctgttcaatgagatggtcaatgctggcatcagactggatactatagccttcactgctgtgcttacagcttgtgctcatactggcaaggttgctgatgctcgtaaaatttttaactccatgcaggctatgtttggtatcaatccagtgatggagcaatatgcctgcatggtttctgcattcagccgtgcagggatgctaaatgatgcacttgagcttgtcaacagtatgccatttgaaccaaatgcaatggtctggggtccattgcttaatggagcagcagaattttgtaatgtggagcttggtagatttgtattcgatcaactatttaaaattgagcctaagaacaccggtaattacattgtgatggctaatttgtactcaaatgctggcaaatgggaagaagctgatatcataaggaggaggatgtggggagttgggctcgagaaggttcctgggtgtagttggaattgagggttttcaatggtctgcatgctttgttgctgcatatacatcaagcaagcaagccgcgaaaactatgttgttgttggttgtagaaaatagtttgtcctcaaccactgctaggcgaagacaagttatattgatggactttaaaagatctaatagttgagatgtgattatcgtgcttaagagcacatctgacttttagagctgtttggaccacataagaattcaaaccaatgagagcaacattccagtcgtattgatttgattgattaactaatctaggcccaatacaaataaaaattcaaaccaatgagagccacatttcgtgatcttcttatctttgcaaggtgataggtacagaaacaacaggagattccgcaaatgtaaaaactttagaagcagtatcaatccaatttggattttcacgatcggaaggcatcagctatatccaaatcctggatggaacaccaaacaagctatgtgcagaatgttattcggtgcatcaacagaagttgctctagtgccagatgcgacaaagtttctaattcacaatgctaatctgctgttttcaatatctacattatagaaacaccatttgtgtaacgatgtagaatacgatgcgtttttctacagtctatcatgtgcttttctgaagatttgttctctctcatcaaatgcacacactgttctggtattagaatcagaactgcatggagctagcacaacaagatgtgtcttttagtgcccttgtgtgtctggatcatggttcacatgcttagatcattctacttcactacttcccaactcatgaactccaaagtggaaaagcaggttcacatgctcatcgcaggctgcgcagtcgcgcagatgtggtaatatgataatgtaaggtggcgtctttgatgagacaatgtgaatcattctggtggtccagctcgctctgtagtcttggagttcaagtggagctaaggtgatcggtggcggtggcatgcggacggtggagtgcctgaggggaaggcttctcgcggagcgggtggcatccaaggctgcaaaggaggatgccgaccaactgaccaaaaggctggacgagctagagaagaagctcgccggcgaggtcagggtgaggaacagggcggagaggaggctcaggagggccatcaagaagctggagtccctcaagatcctggacgtcgagctctcggaaggctccattgggtcgctgtcctccaacggccgttcggatcaccaggcgccggaggccgaggagaggaacggccctggctcgttgaccactcgtgggtctgtgctggcatccggtccttccggagaccccgacgccgacgccgacagggaatcgtcagagggatcatgcacccaggtgaattcgtcctcccgggacgggagctggtgctccgttgcgtcagagcaatcccggcctggttcttgcatggatcttgccggaaacaccaccaactgcggctcagaggggagttgcggtgaccatgattcagagagggaacaccttgatgcatccagtggctgtggctcagcaaaatcggaagaagcgttctacgaaagcgacgacaggctagcgctatcgcggggtctcgttgaaccaccaccagcagctgcaggcgaaggtccaagaacgcaggataacgacacgcatgcaggagaggtccgtgccatggatcacgaggaagaagaggagaccaacaagcttgcgatcgttctagccgacccccagccacagtcgcaaggcgacgtgtagtccgttctcctggcgctgcggcgggtgaaggagcagctgcgctacaccatgaaccaggaactcgccgcgccaaccaggagctctacgcccaccgagcgagcgtgccacactaggaaaccgtgtggctcacttctactacggtgtccaacattcggttccgtgaattattcgtagtgctgtttaggggagtggagtatctgtacagaatggaataaggtcgctcatgtggatgtggagtcactattttattaaaaagattgaatctctaggtgctttgcttgcttctgtttactgactagtttatcgcgcgcaatgtgatacg

SEQ ID NO: 34183 - DNA, 204 bp, Zea Mays
cgaaaataatttattttaacgaaaataaattatttcgacgatttttggtacaacaacactatcctcaaacatacagaatatctgacaatgtgaccatcccaatgagcagtacaccgaccatctagtccaacacacttgattcgtcaaccatatttcctatacttggaaggaatccggctcccacgtgcgtcctgatagtcgcct

SEQ ID NO: 34184 - DNA, 207 bp, Zea Mays
atcatcgacgataaggatagagaagagggccatctctgacgaccaggacactgccacaagattccacaacaccgccacggggccccttgatggaagcacattcacctagaggggagtgcgtatgccagcgagaggtcacatggtgctctcactagagatcgagaagaagagggaaagagtggagaccgcatggtcgaggcaaaatag

SEQ ID NO: 34185 - DNA, 954 bp, Zea Mays
gcgctttcttgactaacaatactgttcagattcacgggcgaggcaggcgacggcgggggggcgccgcagcagcagcagcagcagcacgtgtgggagaagtggtcgacggacggcacggagaagcaggtggcgaagctgatggaggaggacatcggggcggcaatgcagttcctccagtccaaggcgctgtgcatgatgccggtctcgctcgcgatggcgatctacgacacccagcaccccctggacggccacggccactcgctgaagcccgagcccaacgcgtcatcctagtacagtaacgtcgtccttagcgtgccttccaattccaacacccaccccccttctccctaaaaagtactgttaggcgccgatattatccggaagaaaaaaagaagtgtatgatataccgagcgtgcgtttccagtgtgctgacccgtgggataggaaaggaccgaaaattgttggtatatgatgattatgtagcctcctgtttgcctgttctgtttcaaatcaaagcaatgctcatgcatccaggtttcaatgtgcctatgagtgcaagtgatgggcagcagagagtctggcactgctctcatgctgcctgtttccctttgggcggtgtagtgcactggccatagacttgggtgggtggtggtagggccgcccgccggtcgccccttttggtagtgggtgtttggaccaatggaaagaggctgctgatgtatgtgctggtaattctgagcgagcaaacggttgacgaaatctgaaagaatgtggtggtggtggtggtgggtggtgatagcttgtctttttattttattttaaaaaaaatagagtgggagcggaggtctgggtcaatggaggcccgagcgtgcgatgatcggctgggcgctagtggggagcgtgctcctccgggtcttggcttttctgcctacaagtcgccgtcttgataagaac

SEQ ID NO: 34186 - DNA, 868 bp, Zea Mays
tgggtgttcatcagggacatgctcctccatcgcagcaagagcgagccaggcagcggcgcccgccgctagcaagcccgaacgagcctggtcgttctcctccccgtcctaataatcagggaaaggctcgccgcgaggctccgcccctatcgcgcgccgccagcgacagagaatgcttgcggtcccggtggcgaggatggccggccgcgggggcagggcaggggccggggcaggaacgccatcgatctggggcgcccccggcatcgcagcttctctcgcctcctaggaaatcacggagcttccgaacagcatttgttacaacccgatgcactggtctcctgaagatcccattgttcagtatctgtgtaaaaagaaataacagcagagccttttatcctaagaaagttgggctgtcccggtggcgaggatggccggccgcgggggcagggcaggggcaggaacgccatccatttggggcacccccggcatcgcaacttctctcgcctcctaggaaatcacggagcttccgaacagggctcctacacgatctacatgaagattgtcggggatgacaacgaggagctgagctgcatctcgtttgggttcagcatcagcttcgtcgcgtccgagcctgggcatgagaggcagccagcccatggatgattctgatgaggacgagactgatgattccgatgaggacgagacagatgaaaccaattgccttttaatggtctatgttatcattcaaaattgtcttatgttgacactatgtatatatgctattcacaataatagagccattcatactgttgggcgccttggatgaactatcttttcttcaacaaagatggagctcatgcagattgattta

SEQ ID NO: 34187 - DNA, 2550 bp, Zea Mays
gctgtcaatcgcctccccactgcggcagatccgcaatccgctcctccaccaccgcgctcctcacccacgccagggacaagactgtctacctccacgcccgcctcaccaactccgcggccaccgccaccgccacgcccctcccccatggtcgtcgagtccgagtggtggaaccagcgacgcatgcgcgtcgagggcgacgtgaaataggtgctccaccgcgggcacaacgggcacagtggaggtggaacgagcaccatcgagttctggttccaccgaatccaccgctcgcacaccggatccatcgctcccacatgcccgcacaccggatccaccgctccctcccccgcgatggcctggttccaccgagacaactgcggggctagggtttggattcgtgggtggagcccaaggctagatccagcagggggagggaggtagaggaggggagggaactgctggtggtcggcagtgggcgaaggcgcgacaatccaggatatggattcctgagcgtcacccacccgcccatccacgtcgcgcggtgtagtcatcccctatccgcagccgcctcgctccctctcccacaacaaatccattctcctcctcccactcgacgaggatcgcgaggatgctggaggacgtcgtcgctgtcacgcttgacgttagggcctccgatgcttgacgttagggcctctcgcttgaagaggaacacaaacagagctcatgttttttattttgctctgcattatctactgcttctctgtgggggcgttatttacagtatgtggcctgtttgttgtgttgttcctgcggaagggcgggcgggccgaaggtgtttaagaaaatgttgttgtcaacatcaacctcctggaagggccagaacgcaggcagcgcctcaactcgtcaccccatcagcacggatgattatcacgagtacttcaagcgctcattttaggaagacatcgctgcgcaagtgcctcaaggagtggaatgtaccggtttttggttgatggtgtctggaggtgtgatgagacaaaaccctttgtacgtgatgaatatggactgatcagcaatgaagtgcttgtggaaaacaatgtactacccgttgtgcagccagagccttctatcagaggaactaatatggataagggtaccattttgaaaacaatgcccctggagccatcatctcagaacccaagcatgcaaatagcagttatccgccatgtggtctctggaatattattacacaataccatatatgacgttgttcccctttctagcaagggtcttgctctggttcctttttgggatgaccgtcagggaaccataacaggcatgctcactgcatcagattttgttttaatcttgagaaagttgcagagaaacattcaagttattggcaacgaagagcccatttctgcttggaaagaagcaaagctacagttctatggtgggcctgatggtgctgtcatgcagagaacgccattaatccattttgtacagacaggcaacattgatctcagggccaagaaagaagctcaactcggcatgcttcctgtttgaagcaagggcaacaaacttaccccaccagatctctgtcgccaaagcagggctagtgaataagctgtgtttcctcccggattgtcactgcttttatatttgtgcatttattttgagggaaacattttgcccaaaaaaggcctgcagtgcacgttttaaacaagtcatttgaaccaactcttatgctgaaaactgtatgtgatactgcagaaggcaacacactagcttgataggaaagttggttggcaagcataggtggactctggtgccttcatatatctatatatatattttaagttgacgatcttcgtgatgctgaaactgatgaagacctccgatgaaaaaagagacatgctgcacatgcacgagggtacttgcagatcgatgtcggctctatggacgaacactcgaccaagtcagatgaggagtatgagggcctagccatgcgcgacgtgatggctactggtccgacgatgagcagcaagctgtgagttaaagatgaactcacctgccctggagagtaacatccataggagtgaggcaaaatggctggtaccaccacaacatggacccgttcctgaagatgtccaaggaggtggtagccgacaccataatgtcttgtgtcattgtgtcaccggtcggcaacacactgcgctggtaccggcgggtgttgtgtttcttaggcgtctgcttctgtgctttgagttgtgctatagagtggttgtgccaactactgattttaaaagaaaaaggtgagctgagaatcattgttgaaaacaaacatgtaattgttcgttctcatcagttgtgccaactaccaagcatttcattgatcagaatttatcgttgctcatgagaaccaaaagtaagacacttctcaataacattggatgcaaatttctgctagcttatcttcactatcttttctcgtatcaatataacacacatttatacataatttttgtgttattatatgttttcgttgcaacgcac

SEQ ID NO: 34188 - DNA, 2309 bp, Zea Mays
cgaatagtccagagaaaagccgaaaggtccgcgtcctcggtgcggagaacggcggcggaggagaggggtccgtcgctcagccagccggccccaaagtcgccctccctgctggccctctcgctcgcgttttttttcggtggcatccccctcgcccgacggagcattcagggactgcatgcgaacgcctgagtcaggcctgacccgcgctgattttaggctgccggctgccaagatataaaaaagatcgcttatcgccggcgccaagtgcagttaccaatacatcatgtcaagggacgcgtggtccgtgctggcggtttcggtctgcctcttggcttgccccgtgacgatcggcgggttctcgtggaacatcttctcctccccgtccccgtcgacggccgccacgggcggcgaccgcggtccggcgatggcgctcgacggcgcggtggccgacttcgccatggacggggccggtgggcccagagggctcaagctgctggagaacgcgcggggcaagctcgccgggccgcggaactgctggcaggatgcgtacggaaagctgttcgccagctgcggcgagatcatggccgacaaggagaggcagtcgcgcctggcgtggcacctcagcagctgcttccaggaggactcggggcgctcgcccttcccgtcctgcgccgagggatccgagatggtgcactgccgcaagcggctcggtgagtcccaagacaaggtcttcctcgagttcttcttggagaccaacaccctgtgccaccaattgcaggctgaagctttcaagcacaacaccgagagactcgtcaacgacctcacaaggacatccaagtatgccgaggagaagctcgaggtgatcgaggagagggctgaccacatcatcaaagagtcgagcaaagtccaggacacactgtcgtcgatcgagatgcagaccgacaacctggcagaggcgtcgaagcacgtcggggtgcagatcaacgacgtgctgctccactccaagtccatcttcgagcagtccaaggagatcgccaccgctcaggctgaactgggcagagggcaggcggagatgagggagaagatcgaggccggcatggcgcgcgttgaggagtcgtaccaaacgctaggaaacgggatggataagctgaaacaggagactggatatatccacaaggaaatccaaagtgtcggtgcgtcgatgtcttcgaagatgcagcatttgcagagcaccgctgatgacattgggagtgctgctggaaagtcgttggagaaccagatgcagctactgaatggacaggcccaggccatggatggactgaatgaactccacagctttcaagcacaagctcttgaagaaagcagggaaacagttcagagacttgcacagtttggccagcgtcagcaggaggagctgctgtcccgacaagaagagatccggcaagcccatgagcatctcatccagaattctcactccatactggaagcacaggaagagtttagagcaaagcaggctaacattttcgctgctctggacaagctgtacattctgcacaacgccattctagccgagtctcgcttcatcaaggcctttttcttctactgctgcattgtgttcctcgtctacatgctcaccagcgcaaagcagacgttcagcatcaggggccacctctactttggcctgtgcttcacgcttctgttggagatagggctgatcaaactcggtgctgacgacttcgacaggcagttctgggtcatgtccaaggtgttcttggtcagaatggcgttcctcggcgctgccactgttcagatcctgcactccatattcacctacagggactacgaagtgctgaactacgggctgctccagacgctggtggagaaggtccgggcgctggaggaaaacgccggtgggagggcaccgtcgtacgcctcggagtcggaggagagcctgagggactactcgtgggtcttcgacgagctggcagacgacgtggacagcaagatggacccaacctatgtcgtgccgccggagaggtcacctccaactcgacggcgcgaccaaatcgtcgtggcagaggagactggcgagaactccgtcaccacgtttgtctcccggaaatacaatctgcgggcacgaaaataggcagcggtctggtttttttttagttccgaaagagctattttgagtgccgcatcagatgttggtgaaattttaatttacacgttggtctaccgcattgtaaagaagctaccattcggaaataaaatcacgctggagaaatctcgtgtgctattcagcattttgc

SEQ ID NO: 34189 - DNA, 337 bp, Zea Mays
tatttgggtctactaacgaatctacatgtgaggaatttagtaggatcatgacacaaaaattcgagacgtcgatgatgggggagttgaagtacttcttgggatttcaagtgaagcaactcaaagagggcaccttcattagccaaacgaagtacattcaagacattctaaacaagtttggatgaaggatgccaagcccatcaagacactcatgggaaccaatgggcatctcgacctcgacacgggaggtaaatccgtcgatcaaaaggtatacaggtcgatgataggttctctactctatttatgtgcatctcgaccggacattatgctttccgtatgc

SEQ ID NO: 34190 - DNA, 1332 bp, Zea Mays
cctggataaaaatcgcaccgcgcgcttcttcttctccgcgagctcatcttctccctccccagctcctctctgctcgctctccccagccgagcggctctcgtccacgctgctctctctctctcctccctctagctcgctgaccgcgcgcccctgaagcctcctcgccgtgcgccctgctcgctagtgctgcaacttaagccgtgtcgtgccggcccggcacgagcacgctgagcttcgggcctaaattagtcgggccaagatagcacgaaaaatagtcggaccatgccttaccgggccagatgggttgaaataaagcctagcacggccctaaagcatgacgggcttccgtcgggccgtgctggcccaggcacggcacgcaaccagtacagtctccattgaagaatacatttgacagactctgctaacttccaactgcagccgagtatacatttgacagaagaatgtaggaagatgtgtcctttggatccaatgcacgaatgcgctttgcaacgctctcagccagcttgtcgttccagttaatctgacaaccccctaacaaagccttccagaacccaatgcctggctcgctacaagtcatcatcaactagaccaatgcctggctctcgctacggagtgcagccgtgcaggaaggaagccaggaagcggacgctgcggctgcgctcccgcagacccgcaaggtctcctcggttgcggacgctgcgaagcatgggcgactgggtgtgctgtgctctccttgaggcctcgactccggctccgagtccgacctccatgctgcgtcctccctgggaggccgagacagacgaggtcgagatccacagcgagatccgaatggatggcgacggccggcggagggaagtgggagaaaatgggtgcggtgcctgcgtgactacgtctgcggtgataagtgagacggcctgcatgagtgtgtgactgcgtctgtggctggaccgtcctgttttcgtgacgggccggcacgaactcggcccacagtgacgtgctgggccttgtagcacgacgggccgacattcagagcacggcccggcccgcaattcgtgtcgtgctaacccgaattaaatcagctgtgtcgggccgtgctttgttacattttttacgggccgtgctcgggccggcccattaggcacgccccagactttcaggactactgctcgctccagctcggctccctggcgagcgccgctgctctctctccctgtccccagctcgccgcgctcgcctgctctcggctcgccggtgttgctgtactccagctccctcctcgacctctcctcctcccacgctctgctccctgcg

SEQ ID NO: 34191 - DNA, 2224 bp, Zea Mays
agcctggttaccacggacaggagatggggtgctactcctgcaaggaaatctagtatgactgttctgggaaaagtcccaaaaccgattaatttaccaagtcagaggttggaaaacaatggtcttgatcccaatctggaactggttccaaagggcacccacacctggggcagcaaagcaccatctacaacaccaaacgcatggagttcctcatcaattctgtcttccaagaacgatggaagttccacttcatctagtcacttcaatgtccggcccacctctggcggaggctcaaggccatcaacagctggaagtgaatcacttggttcacccaatgcttggggtgcaaattctcgcccatcttcagcatcaggcacatttccatcatctcatctaccaatggccacaaatcgtccccaaagtgcggaaacaagacctggaagttcacaaatttctcgatttgcggataatgcttcagataatgtgaaagcatcgataaggactattgatagatcggaatcttcatcacgtgggcctgggttcacattaagtactggtgatttcccaacgcttggctctgaagcaaacagtcaacgagggcatagttcgaaagggcgcccaacttctagtttgggtaaagaggtgtcgcaaggtgaacaagtgaagagcctagcaactggaactggtgaagtaatttcaccatccaataatcaccctgttgatatcatgaagacagagcatcatgcacacactggaggtgctcctgtcccagccacaagtgtgccaaatgaaggcttgcaacaacagccatatccaccaaattttcctatgcctcctctgcagtttgattcatggcgtgcacctcctggtcacccccctgagggaatgtggcatagaggaccagtgccaggtgggccatacagacctgttggcccccctggtagtttccctgtcgaaccctttggttattatggccagttcccacccaactccgaagctgcaggaaggcagggctcagggcatggtggatatcacactaaaaatgatgtgtatcatcctatgcctcataattcctatattatgaatcagcctgttattccagtcagaccagtttatcagggtccagtgctgtatgatgggtattatggccctcaagcaaatttcaataacaccaatgttagagatcctcattttgttggaggtcctggaatactaaatcaattcccaaatcagaatgacaggtttcaccctggacatcctcaaaacagaccaggcaaacatgaaacggtcccaagggagcagctggaatctgataagctacatgtctttcaccaagaacaccctgggagtttgcatgataatccagatcgtctaggaggttcccgtgaatttgaaaggaatgtgcagccagcaccgccacttcttccacatcctgatggaaaacagactgatatgaacatgagggcagatacaagggacacctttagtgagactgaaagaaccgtggtacttacaaaatcggtgcctaaccagagaggttcggttggtatagaccatttgtctgtttatgaaaacacacgatcccatcacagagaaacttgtgatggcactctgcgcaagaagttcaaggaggatagctcagttgtacttgaccagcatcctgtcattaagaagaatgcagctttaatagagaaaattgagagtttgaacaacaaagccagaaatgtctatgcacagaatctcccagaaccagcttcatccaaggaattcaagaagcataaaaaaactactgatgtttcatctaatgatgtcatcagtacgacatgcacatctgatcaggcagtttctgtttcacatatttctgctgtggtgcagagacgaccaaatgtgaccattgagggtacaattcttggaccggcacattcacatttaactgaatttagcaaagctgagaagcttggtgattcaattaacaatcatttacataggagagttgattcttcgagaaacagttaccatggtccttgtaaagataggccagctaataaattcggaagttgtggacgtggagaaagttacataactaattcattaccagtagctgatttggggaatgatatccatcatggccaacaacctcagattgcctcacagctgcaacctgtgattgtacctgatgatatgccagcttcactcgattatgagtctcagctttaggtggggacat

SEQ ID NO: 34192 - DNA, 7367 bp, Zea Mays
gcaacatccgcctcccaacaccggccgcaagtgcctatggcggctcccccagcaacatccgcctccgaactccgaatcaactacgcccccgacgagcgattgagcgcgagtcaaaaaaaggaccgccaaggaagcgagcgcggaatcaggcgagatccccttcgcctacgacgccagtaggctcgagaatcgcgtccagctcgaggccgaccgagagcgcgtgcaggcagctgctgggcctgcagttccaccacacgtccggcgacctctactacggcgacgcgtacctggggctgatgggcggcgggcgccgcgacgggctggcggaggcggtggcggtgcgccactcaacttcgtcaacagcgtggaggtcgacctggagaccggcgacgtctacttcaccgacagcaacaccacgtactagcggaggtacatacgatcccacgccacaactagagagtccaactccgcctcctactccacgtcgtgcgcggtgcgccgacgccgccactatcgctgacgccgaacgctgcatgtcctcctccccgctagcgcctctgaagccgagtccaactcatgtcgtgcgccgccgccactacggcgccgaccccagctctgcggtttctacgctatggctgcttctctgttttggtctattgatcagaacttcagaagaatattatctcttggagtaccataattgcagggcattaacagaacaaaatatatcatgtgggtgtcggtttgtttactgaaatggttgcttcaggcataaaactaaactctactaccctagcaagcatacttgctagctttttagagctgaggttattgaggtatgaaaaaaattcattgcttctccttaagaaatggaccggaacacagtgattttgtagtcagtgcactaggggatcagaaattttgtttttgaattcaagccgaagaatgatttggtaattttgaattcaatgatcagaggatatgctgtgaatgaggatttagagtctacattaggcctattaagggcactgctgaaagagacttagacttgatcatgtgactgttgttttagttcttcctctatgcaatcaaaactcgaggctcctccaggttaaggaactacatgattattccattaggcataacataagttcatgttgctcagttactaacgcacttataaatatctactgcaagtgtggctgcctagaaatagccagcaagatttttcttctgatgaccgagagaaatgtttttacatataccactctgatttgttctctaggaaagcatggccatgcagaacatgcattcgttctttttgtcctaatgaagagggatgtagtttctccagataaagtgacttcttagctctgttatcatgttgtagcaatgaagactttactagattgataatgtatgcgttccattgtcattcttgatatatgatttccctaattatgttgattacctatgctgcatagcagttctccatttatatttactatttttgaattgttgaattgtatatccgcaactaaaattctgccacttgcctctatgttcatagcacaccttatctgtttgaaaattgttgtttcttatgagtgcaacaactattgtacatttttggtccagttacttacgattagcagatttcttactagcagaggcagcatttttttgccattttctttaatttgtgacttgcgatatgtctgtagcacattgagctgttgtttgcaaaaacacaagggacaaacactatcacgctctaagttatcctgactagcactatgaatggaaacatcttccacattcattacatgctatatttatacctctaccaccaagacaaacacatcacttgtttttcacgatttttgagccatcgttacctgcatcagtgagatcttgcaatatccaaagcttctcttcactgtagatgaccgaatcatgcttcaatcttgatgcaataccaccaagaagatcaatagaaaagcaccgaacattagtgtccttagatttcaatccagcattgtgaaggagcaacacagagagaacctcaaggatagaagcagcagctggatgctccagcaagtttagtatcgttaggaaatcctgaacaagattatctattatttctttggtttccgacatatcttgagatttagcagcagtaactatagaaggagacaaagggatagtatttcacaatgcaatttttaccctatatatttgattcatatcagtttttgttaattccgtagcaacacatgggcactgtacgataatataatgcaacattttcgtgcacgaagccgtttcatgcgtcgcccgatccgtgcattcatgtgtcatccgctcgcatccgccccacacgcgacacaagatgcatgcttgttgtccaggtattgaagtttcttaaatattttcttctggagttacggagcataagttccattcttggtaataccatgtgtacattcttcataggtgcctagatggagtggactgtcgaacgcgcgagccaccatattcggcgatggttaccctttgccagatgaacaataggtttcttgtttactgtcttttgttgttagatacttcaatcaggtaggtagttagtgctccgtttatactggcatttcttgtcatatgatagtcacttcgggcttctgaatgctactatgaaactgttttttggtagtgaattttaatcatcttaaaataaatattcttactttgatttgggaagatttgtgttgacctatgaataagactttgactggaggtgcaattcactgtgcgcttccctgctatacagctgacatctgttttctgcctttcttttaccttctggcataagtcaattgttgccaaggcgcagaaataaattttattaggtatatcttgtttatgatcagatctcacggcttcggtggtgcctcaagtgtatgtcaggtagtagccctaagatttcatcagcattcttagcagtaattgctatagtatcaaatgggattgtggtacgagttgctcgattactaactgttgctatagagtgtgaagctaagtaggtaataacaaaaggggttaaggtttatgtgtggtgcttactgtatttgtttttattattttcttgtgctttatacatgtactgtcattcttttactctgatgttcttttactgcaaagttcgacacaatatatttttatatgaaagactgaagattacttagtattgttttctatttctgttatcctctttgcagatctatattaggatgatgaaaacagtgctacttgatgtgaagtccaccaatactatagatcagattaagtctaagatcggtgctttagaggggattgacaatagccctcaagcgctcttttttgctagaattatggtagcagtcaggtttcagatttctatgaattcggtgaataaaatgagcttattggcgttgtcaatctttttaaatttcctgaaattatgataaaagtatatagggtacctattcaaacaatatggctgttaactacatactatttttataagttacattgtattatgtagcagataaaaaggagaatatcttgtgtagttgttttcctaaattataataggcagtggttgtagctaaaatattattatcttgatataaagactactaaattatcacttttatgagaacaatgtgattatctggacagttcccttcaagttataaagtgtggtagcataattgcatttcagggaatcagtgcaaagcttgcagctgattctggtcggagaatggaccgttccctcctccctcctcccgccccttcccctcccgccccttcccctgccctccccgacggcgagtcccctgcccttcccggcgccatcctcccccacccatctctggcggccgccgtgcagccggcagtgcccttctccaccagccgcacgtcgtcccttaccccaagggcggcggccaccctccaggcgtcgggacgtcttcttcttcaccaggatctcgttcgctcgtcccactcttctggtcgcggcaaggctctcaggtggagagactccagcccttcgtcggattcgttggatgttgggagcccttcttcgttcaaggatatcctgctcgcgggaacggtctcggcctcagtctcggtgacgtctggggacatagtttcccatggcgcccaggctaggaccttgcaggcctccgtgcagaattcctctggtgatggtggacggtttgtccgtcggtcttccccactgcgctctttggttcagcccatgcgtcagaagcctctggtggatcgtgatggtttcacacttgtggagagtcgccgcacacagaagcagagacgccgcctggagaagtcgtttggtattcaagctctggagacctttaaaggacggtgcttcaagtgcctctcacctcatcaccgggttgccctctgccgttccatcatccgctgcctcctttgccatgcacctgggcatacatcctacacttgtccgcgtcgcctcccaccggtctgctcgcgcatggctggacgtctgcgtgctcctgttcatcggctgcctcctgtccatgcggcgcagtgctctgttgatgctgccgaggggccactcccagatgtgagtcgtggtagacggcgtcgcctggagtccgacatcgctgttgacgctggtgatggtgtctgcacggagccacattttgctcctacccggatcatcccatggtctccaagtttcaaccagaggactgaagtgcttgatcgtgccattgttctcacggtaactgtggccattaatgaagcagttgaggaagctattttggacagctttgcgcggcgactggcgcttgttcatgactcgctgtctatgtgtcgactgggtcctgcatgtcttcttcttattcttccaagtttagaaatggcggaccgtgcttttgatgggggcagaattgtgaatttatcccccacaactaaaatccatgttatgcggtggagcagaacccttaactcatctgcggcggcgtctctgcctttccaagttgagattgatgtgtctggcatccctgcacatgcttgggagttggaaactgtgcatgctctcctcaatgagtggtgctggattgctgatcttcacccagattgtgagcgtcagcgtgaggtgttcaaggttaccgcctggtgctccagcccgggctccatccccaaggagtttaaacttgaaattgttgatccggtcacaaccgatggtggcatgctgcgtcgttcattggtctaccctatccgggtgtcggtgaaggtccttgatcgaccggacatgttgcagtccctacagccgtcacctcctccggcggaggatgatcccgatcagggcaggcggcggaggcgacgtcgatctaggaggtcgtcttttggtattaatgctcccggaaaaggttcgactacagcggtcttgcctcgggtgtcggttcatcagcgacttgggccgcgcgtgcaagcctgtgggaaggaaggtgtcagggtgcctcgcctggcggtccataaacggctaggccctctggggatatttaacgctgataaaggtgcagtcaagaagatgaagcgagtttggattcccaagagaaagttggagtcatctgtgtctgtttggagtcctaagacatcgtctgctcttgtgtctccactcccggttgcggttgatgatgcatttttggaagctactagttctactgtcgttactgaagatactttggttggctctccagaggttattccagtggatggtggaatctgttcggaagctgctattatttctgatgctccagcccggtttcccatggttgaatctgttctgcaggacgtaaatgtcctctccgagggagtgggtcttcccttggttgaatctgatttccagaacattcaccttatggagtcttccttatcaaggaagcatcttatgtcaccaagtctgttagtttattccaggaaaagacatcaaaagctacagctgattgacagtattgatgagaatggcaatgtcggggctgctgcagatgctataatttctccagcttcggcgactggtttggctgctgatgggacatatcacgttggtcagggcccagtcattatcggggttgtggcagatgctattgtgtctccagccacggcaataacttttacaagttctgaacctatttcgagtttggttgagcctactgcggctgtggcagacattctgatgtctccagctggggtggctcccagtcttcttccttctccttctggcgagcaggagacttcccagtctttgcagagagaagagttcattaaatctgttactcggcaaccttctaaattgcttcctgctcctccagtcatcttgaagaagaaggacaacaaattgccctccagatcggtgccacgtcgcagccgcagagttgctggtgtaggcgttgaatttaatgcctctgaccttgacagacgtgctatcaagaaaatcatgaaggcagttggtataattgctgataatgtggggattgaccagagggctcaagaggagtatgctgatcttttcaagacatctttgtctgatattcatgtaaaagcccttgcagccttgtttggctggcagatgtttgagagggagattggtcatcttagtgcattgttcctgaccatggaggaaggcttcctcgccctcgtgtcaagcctgtgggagtcccagtcgaacatcaccacggctgggacgtgctgcctcgtcagtgtcatgcacgacaagacccttttcatcgctaacctcggtgactctggggcccttctcggcaagaaggtgggtcgcgctgaatagattaccgcagaacagttatccagtgagcacaacaccaatcaggagcctatcaggcaggagctcatgaggcaacacccagatgatgctcagtttgttgcagatgtatttcaacctagacgatttggcatcaaggctgtagcttgattgcaaagaaaaagaggaaaacaattttggaataaaataactcaaatgcacacccggtgattgttttggagctgcacaggatttgaatggacatcttcaggatgttaaggtaggttggctctgaagtagtgcatcctcagatgtgtcatttgtgcagaactgctctctgattatgtagtggaaaaatgcttgtggtcaatagttggtagttgccaaaactgacaattatggtagggttgagatggacagaaagaacgcagatgtaacaagccagccttgggaaacaaagataacctttctcatattgcctcttatattaactcgacattctctaatattcatgcacgcaacg

SEQ ID NO: 34193 - DNA, 1509 bp, Zea Mays
  misc_feature (1)..(1): n is a, c, g, or t
ncgcgactccatccgtgccaccatcaacggacgcctccgccccatccgcgccccttccaatccgagccaaatctgtgggggagcatcttcggtgccgagaggggagcgttcttcaatcccatccattggcaaatccgttgggagtatacccaatgcacccacccttgtgggagcatccgagccaaatccgtgggggagcatacccaatgcacccacccgtggctgctctacgctgatatgagtccgcgccaaatcctacaaatccgagccaaatctgcccttccaccttcagtgtctcccttccttacgccgcgaggtgaacgagatcccctaccatcgagaaaccccctatatatcaaggccaccacaccagcgtgatcctccttgggtgcatcaggcgcaacaaggcattgaggtgtgtttcagggcaaggcgcaacaagtgacgccctcgctggagttcctctccttcccgctactcctctggcgtccacaccccaatggtgcacgttctgccgctgccgcggccgcaccccgccccgcatcccgcaattcttggtcaggtgaggtacaaacagcggttgtcgtggaccagatttggagatctcttgaaagaaagaagatccacttcctgcttctttggattctgcgtctgcagaatgaaagccgatctgatgctgagaagatcttcaatgagttcaatgcacgaaaacccgaggaaaagaatgtcttcaaaggggtcacgaagaatcacctgttcatgggaataatcggtataacgatagtatttcaggtaacagacgaaattgtgagttattatttgtacaatcatgtcgcagtgttgcctggataaaaatgttagaagtgcaggtcctgcgtattttgctaatgttgctattaagatcaatgccaagtttggaggaagaaacttagaatttgctaatcccaaagaaagcttgccgggtgttacaattgaaccaacaattatatttggtgctgatgttactcaccctgccgctctagatgataccgccccttccattgcttctgttgttgcctcccaagactggcccaaggtggctaactataatgggattgtccgtgcacaaggtcatcgtaaagagctcatcaatggcctggaagacattgtcaaggaactcctacttgcattcgaggagaggtctaagcggagacccaagcagctgatcttccaattgcacccatatatacatgcaattgttttcatgtttcaatgaaaaatcaaacattaattcgtgttcgtgcttcctggttgtaatgtttctttctttttcttcttcttgcaaccttaatttcaacttcttatagttagaacttttctgtcatgttcctcttgtcggaaactctgaatgatgtggcatgtaaatcctcaacgttaaccacgagaagttattatattacccctatttgaatgcaattcgtatttgcagcactaaaattttatcttccaaacattcaactttgattaaat

SEQ ID NO: 34194 - DNA, 5310 bp, Zea Mays
gtataattgattactatttcgtttctgtttcatgtaattaatgtatgtaattaaattaattgctcccggccatagcaagcaccagcaagaagagagagacagagagagttggtgaagtcgggggacatggtttctttctccgcttcctaagattcctctttcttccccaaccccaccctacgccttttgccacgccgcacggccgctccctcccttcatgcgccgccgtatctcaggtcagcatcgccaaccgcagctccacctcccgatcccagccccaatctaggaggaggaggaggaggagaaggccactttcaggattctgacgaagccctccctccctcggccgcatcgcatgctaccacgactgaccaccaccagcagcagcagcagcagcagcaggaggaggagggcaggatgttcaagcttcaccgccaccgctcctccgaccgcgtcggcgagcgcttcgacttcagattctccaacttccgcgccgtccaggtccctgcagtgtcagacaggctcttcctttccatagtttcagtcgacagcggaaggacaattgcaaagtccagcaaagtagcttctcggagtgggatatgccagtggcctgacacaatcttggaacccatatggttctccaaggacgaagtctccaaagaattcgaagattgccagtacaagattattgtttccttgggatcgacaaaatctggcattcttggggagatttttctaaatctgtctaattttctgaatatagtcgatccaaccgcaatctctttgccactgaagagatgcaacgccggaacagttttacagcttaaggtccaatgtcttggcacaaagtctaagctgagtggtgtcagatcactgagggacatggctccccgtctcgatgaccgtagtccaacgccaaccaatgatgagatggacaataagtcagattgctctgatggtatgttcaacaggagtgttcgttcttcatccgaaaatcatctggttggaacttatcaagatgaatctggaaacaggctttttcttttttgcaggaaacaagtttctctgcaccagggtcccatcggagttctaattctggagatagtactgcggatagaacaaacttctctcctagagacaactctagtggaggactttatgtgggaaggcaggattctgctagttcctatgctagttatgttagtgctggtcgtggcgatgatgggcttagatccaataattcatcttttagttctcgggcttcaggcccaaatttgctgcaagggaatactccaaaaatattttcaaatggcctttctcaattatctatgggggcatctgactcatctaaagatcttcttgaagctgctgaagaaacaattgaggagctccgtgatgaggcaaaaatgtgggaacgccactctcgtaagttgaaggctgatctagagatgctaaaaaaggagtgttctgaaaaatcaaagcaacatgctgagctagcaggcgagctatctgctgcacaagctgaacgggattcctataggcatgaaatagaagaattgaagtcatccttacaagatgtaaacacacggcaaacaattacaggaacacctaaacgttcagactggatagacctgcagaaggaacttgaaggtgaggtgaagtttcttagagaatcgaatgcggacttaaccatacaactaaacaggactcaagagtcaaatatagagcttctttctattcttcaggaactggaggaaaccattgaagaacagagagttgaaatatctaagatttcgaaggtcaagcagactgctgatcctgagaatgggcttttagtaaaagaagacaaagaatgggctaagaaactgtcaatgaaagacgatgaaatcacagttctgagggagaaattggatcgggctctcaacattggaaatgcaggtggtgctggttccaatgccatttatcttgaattggagaaagaaaatgaaattttaagggctaaaatacaagagcttgagaaggactgctctgaactaacagatgaaaatttggagcttatatataagctgaaagaaaatgggctcacaaaaggtcaggttccacgtatttcaaacaacaatgagctgcaatttgaaaagcttacatcccggattcgtcaactggaggaggaacttaggaataaggaaatgttaagagacgacagtttttctgagtcatcaacgtctaatgcagatgagttacagagaaaatgtgctgaccttgagctgaagctgctaaattttaggtctcaaacctgtgagctggaagaaaagttccaaaaaagccaagaggaactggaacaaagaaatctcgagttatccgaactgagaagaaagctaaacggtttacattctactgaactggaagtttttgaatctggtgcgacatggaagtaccaatctagaacagcagatctagaggatactgaacctgagacagatacgctaaaggctagatttgaactgcaactacaggaaaatgatgaccttcgaagttccaaggttgagatggaaaattttatttctgagattcaggcagagaagagtcagcttgaggaacgcctgtccgtgtcgcttaaagaaagcagcatcacatctaaatgcttggatgaagtgcggaaagatatccttgtgctttccagcagtatagattcccatgtttcagctaataaggttcttgagaggaacataattgagctagagagctgcaaagctgaactagagttgcatgtatcagagctggaacaggaaaacatagagttgtcagaacggatatctggactggaagcacaattgacttatctgacaaatgaaaaggagtcaagcgagctacagattcatgactccagatcgctcatcattaatctcaaagataaagtagagcggcagcaatccgagatggaaactcaaaggctcgagtttaagcagaaacaacaagaatctcaaagaagattgtcagaaacacaggatgattctgaagttctgagaagatctaattctaaactacaatctactgttgagagccttattgaagagtgcagttctcttcagaatctaactgctgatctgaaaaggcagaagttggaaatgcatggtcatcttacgcaaaaagagcaggaactggatgagtcgaaaaaaaggaactttgagtttagcaaaacagtggaattccttgaggcaaagctttcgtcactacataaggacgtttcttctaaagagcaatctttattgtcagaattggagagtatattccaggagcacatggaacaagaagaaagaattaatcgcgcgcatttcatgctcaataagatcgagaaggaaaagactcttgaagtagagaacctcaagagggaggtcgtcagcctcactgcacaggtctcctccacacatgaggagcgagaaagtgccactctggatgctattagagaggtatctgtcctacgagcagacaaggctaaacttgaggctaatcttcaagatgtcagtacacaattgagacattacgagtctcaattggaagacctccgaaaggagtctaaaaataagattaaagggttggttgattcccttaatgcctccaaacaaagcgaggaaatgttgacatcagatgctgaacatatgaaaaagttgatggaagctgctagatccaatgaagacacgttaaggaagacttctaatgaactagaattgaagcttaaatccagtgattatgagaaacaacaaatgctggaagaaatatctggcctgaaactgcaggtccagaaaataatgaatcttcaagatgaggttttcaaacttcagagttctcttgatgaggccaagttcggaaaagggaaactggaggagattctacgctcggtgaccgaggaatgtgaagaactaaaagcacagaaggctatgctaacagataaagtttctgatatgcaggagactttgagaaatggtgaagaagaaaaacgaaacagaatagctatgcaggcaaagctcgtgaggctggagagtgatctgtcagcatcagaagcatcacatgtacatgaagcagaattaaagaacgaactcagcaggatcaagagatcaaacagtgagtaccagaggaagatacaatctcttgagcaggaaaatgaggatctcactagaagagttcaaactatggaaaagggatttgagcaaatgtcccacgttaaagagaaccttggaaagcaggagcttggaggagataaccaggcagccattcagtcaaaaattgagttattggaaacgaagctcgcagaggcattggaggaaaacaagatgtacagagctcaacagaagagtccgatgcctgaggggcaaccttctgcgggagcgggagacggcaaggagggcaataccgataggattttgcaattggaaggagagctaagagatatgaaggaacggttactgaacatgagcttgcagtatgcagaggtggaggctcagagggagcggttagtgatggagctcaaagccatgaagaaaggcaggtggttttagcaatgatggagaactgttgcctgacataaaacagacacaggctgactgacagcacagatgggcatgtcatgtgagagcaagcaaagcaaatgcaagtgatgcagagcctggacctgctaactggtgctggaagatgtgtatcccaagacgacactgaaggtccctgtgaccacccagcgcccctacatgacatgatgatccaattgttattggtatttatttttaatggcgtgccttttcatcttgtatataatatacgccggtttgtgaggagcttgactggtcagttgttgatatgattactgagatcgatgactccgatctctctattttacacccttaattgtcgataaatgtagttactctattctttctttctttcttttttgagacagcagtggagtggctgggttagtgggtagcagtcattatgttgcactcatacaatattgttttagtttgggtgtagaataatgtgacgaagggagacccatttgttcatgtaagtttgtttgtttgtttgtttgtttgtttttacagcgtagatcacggataataatgaagtttccgttgtgcggttgtggtacgtgcatcgcattattgatgaaacttttaacctcaggagggcaaagtgttgccagctgaattagggaccacacgattgcattggtttagaagtgttgtaactaaagatatactactaattagctagtgtttgtactacatctcctctcaccctggtaccagtgcacttgcg

SEQ ID NO: 34195 - DNA, 984 bp, Zea Mays
ggcatataggattgttatccagcataaagagacctcccattattttgtggagacaggcatgggttgtttggtgctgtgaatgacatcttctgcttgttccaagggcatattgagaacattgccaacctgaagcagcattatggcctgagcaagactgcaaatgaggtgactatcctcatagaggcctacaggaccctgagggacaggggccctgtcccagccagccaggttgtgagagaccttagtgggaagttcgcgttcatcctgtatgacaccctgtcgaagtctacctttgttgctgctgacgctgatggtagcatccctttcttctggggcgttgactacgaaaaccaccttgtgttctctgacgatgttgggatcctcaagacaggctgcggcaactcgtacgctccatttcctaaaggttgcttctacaccacctccggtgggctgcagagcttcgagcacccgttgcacgaggtcaaggcggtgccacgcgtggacagccaaggccagatgtgcggctccatcttcaaggtcgacagcgagagcaagaagaagcaggacgctagcatcccccgcgtcggcagtgctgccgactggtccaaccagttctgaccatcttcttgccatccattgtcccggctagtacgaggtgcagagctgtgtatctgatgaatccatgagacgatttctgctacgtttcttgcacgcttgtcgaacactgtgagactcacatcgcgctcatctacgctacgtgtaactgatactaatgatacggagtgttccaggtggtggtagatgtactgcagaatctatctcccatgtttcaataaacctgaataaggtgctcggtttggatctatgcatttatgattctagtacttctgaatcgaattttatcgcatcctttcctttttcttcttgttctcctgttctgcatttcagttctgtctggcggacggttacccgttaccgtggtag

SEQ ID NO: 34196 - DNA, 2109 bp, Zea Mays
ctacccacacgtttctttaccctaacgccgccgccgcttcttcgtctcccatcatctccctccctttatcgcgctcggcaccaggcaacacgaacgcatcgccggtgggatcccggattggccggtggacgagttcttccgcgacgttagtgacttcaatgggcgagagtgacaccaccaagcgggaagcctggggacaaggtgggtgactccgcgtactaccgctcgttggagaaggatctggatgccaacgagctgtttggccgagtacaggagatccgatctggacgccagcgctaccctctccagtccccacaaacggcctccggccttcactggcaacacggtagcctattatgtcccgccgtgagatcagttctcgcagaggttcttcaaggattcttcaaagttgctcgattttttttcaggttgcagagattaattcagcacgtgccaccaatattgagcttttatttcttgtttgtgtatttaaaaggctaaaatgtcattttcggaaggaataattcattcagtgatttaactggaatttcacgcttcacgtttagttatcaaaactaccaataaattttcattcagtgatttaaccgaaatttatttatgtgagaagtgatttagactagctttatgctgaaagaaaattcaagcatttgctgaaagttgatgtgcaacttgtccaaattttgtacaaagaatgttttttttgacatggttcctttgaaaatacacccttatagtacattctaaaaatcgtcacaaaattctatacaagaagttcatctagcatagtgcatattaaccagagttagaatttgttccacctccaggtgctcgacctcggggagaacctgctctccggcgtgctccacccgacgctgttcgacaacctcaccagccttttgaagtgtaagatttgttattctttagttatataatttctagtagagacaacttaagtattacagctatgtgttaggaagggttcatgaaaaagaatgaattttgtattcagcatatgtgcataatagggcttcgattctcaagtcatgtaatattggaagtatgcataagtgcataacaaagtttattaaagaaagaaaagtcctcacttgctggcagtttgtccattgtatttttgtaaattaaggttattaaagaaagaaatgtcctcacttctatgggttaatttatgatcttagcacttgctacgactataaagtttatataggttcacagcttcttactgtccactaggcttctccagctgcattgtttgtaaggaacagaaactagctaactgttgtgacttaattactcatcaactttcacctgccttaagccttttaggttcacttgtcttatatataccatggtaaaccacaccatgaatatgccataaataagtaacaagagtgactagcaactcagcacacacaggttgtcaggatccttcacgtacacctttcatgttcttgcaaccttgattctacatgcttcaggtagtctagaatatcagattgttgtatatatttaacaccttctgtaccatcaaattcaaaaatgcactcaagaaaaggcttttcaaaactcttagaatgtattccaagagcagtgcacatattcagaagctaattatgtaatttcttatatgttgctttgaggcaaattgaacagggatttgtttggcttccaaatggtttgttggtcctaaaatagtcagaatcacatgacatctgtgctatagatatggacctcggtggttttctccacattaggaaagctagaagagccttttgaactcagtttttttgctaacagtggtgttatggtgaaacagagttttgtgtgtatgtaccaacaactaaaatgtaaacacgacattatcatagttgagtacaggaataattatctcttatatcttattgcaaaatctgaaacagttctcctgtagatggttagcttgcattttacgctacaattacctcagatcacttgttgtatcttacaccaatttacaaaatttcttgatgcgttttatgacaacctcatgcgctgagagatacattcggtctacatttgttattatgaaac

SEQ ID NO: 34197 - DNA, 1972 bp, Zea Mays
tagacatcttccaacaaaaacctggaagaattctgcctcaatacactgcaaaagtaagcgttactgagattagaggccatatgtacaagatacttgcagataagaagctaaggcaggtgcccaaagaccacgccatggtaccatcatccggataaggatagaagtatccgggataggaatgagcgtgaagttctacacaaaacggaacaggtgcttggtgactctcgtcttgcgaaacacaatggagatcctcttgcatggacgacaaagataacattaaaaactacaagattgattaagctaaagtaaatgcttaacatacaaaaacaagtattgtagtgtagtgcactttaatacgcaaacgctcccactgctcacctccgcctgtagttcataacaccgcatgaaaattcatcccctatcaaaaaacatgctgaagtaaaaaagtctcgtatgattcatcatcattgactgatcagttttcataactacaatgaaattgtaggctcatgccacaccatctgcgatagcatcatcgcttggtcattcacacaagtgggaataggaattgtgagagcaataaaaatagaattgagcagccatccatttcattgaagacttcattttaccaaaaatggttcatgagataaggaaactaatgtgaccaacgaagccagcatggtgatagtagaactaatgtgaccaacgaagcaatcaaaatcattttaacaagctgcatatcctagagatcgtccacagtaaaaggacattagaacttaagccagaccaaacctacacaaaaagaacagacttctacacaaataaggacgtgattcttgatccatagtgtacacaaaacatttatagttcttgtttagatgaacaagttaacacaagcatgcctcacaccacaaacatcagccaccaacaactaatttgatgcacccctgcaatctctatatcataaaaaggtaaatatatatgaatttatgtatcaaataatatgattgattgaattttagattttcatgtcctatatgttgtacatggacttctctgtgtgtaatttcatattttttcatttacatacaacaagacatggacactccttgggcaaattttacattcccagttctagatcagaaaagcatccaaccagcaggtgcaacatcagttcttgctaagcaggcggcatctcctgatcaacattctcttcccaccaagtagcattctacagcacagaaaattgattattgtaactcgtattgtctctatgatgtgctataatgaaatgtagtttatgcaagcaggcgctttgacattctcttcccaccaagtagcattctgcagcacagaaaattgattattgtaactcgtactgtctctatgatgtgctataatgaaatgtagtttatgcaagcaggcactttgaagctgcaaccggctgtttagctaggataagatgagccatgtatcctcttctaagaaattcaaggcagcttccttgttcttcttgtaaaccaataactctcgattcacctctaactgaataagcccgtacatggactacatcatggattggatagaaacccagctggacgacgaagccattttccctcaacggcttggggctgctttccctcccaacttccacgacgttgtcaagacggtcctgaagcgcctcttcggggtgtacgcgcacatctaccactcccacttccatatgatcgtcaagctcaaggaagaggtgcatctcaacatttgcttcaagcactttgtgctcttcacgctggaattcaagctgatcgagagcgcagagctggctcctctcagtgagctgtcagtactaaactgcccatacagctccgagctgcacaacaacaaagacgaccaacaatcggacacattcgttgttcgacaccctcgacgggacgaaaggagtgggacgtctgcacaattaaacctcttatag

SEQ ID NO: 34198 - DNA, 348 bp, Zea Mays
gaaacacttaaaaccaagaatggagcaccatggatatcacagcagggcatcgactacatccattaaccaaattgacatattacactagaaaatctatttttattcctaggtttttattaactctttaaactatgtatcttaattacttgatttatcaatttatcaaaattgatcatcacaatatatgcatgctaaattaataacatttattgagaccaataattctatttactctatttacagacctagttaacggggatacgaattaacttaccctgactaattcgacgcgataatcgcaagcacgactacgggttccagttgacgtcatccaggggccttcttttc

SEQ ID NO: 34199 - DNA, 1503 bp, Zea Mays
caggacaatccaaccaaccctttccattcccaatcttcccgtctccaagtctccggtctcgaatccctcccttccagaacaagacacctgacgccgccgcccccccgccggccgcacccgtccataccataccataccatacctccggccgctcgtctcctatctcgtcaccttcgcccggcgctcagatctccgccgcgcctctgcctgatccccccacccccattggagggagacacatcccgcgtgggcgcacgaggacctggtttttttatcaaatgcttgacaaaatgcttgcttggtgatgtctggctatgatttgggtcctgtttatcatgcagttggcttctcatggcactcaaacagaagagacgatgcagtttgtgccccattgtgatcatgcagaagtgtcagattcacagtcaacaagttcacaactaaacctgatagagagatcaacagagcatctagcctcatgtgaaatcaacccagtgagcgttgatgatgacaacgacaatgaacatatcgatgccaatgaagaaactcaccttgttattcaggacgttcctcaatgccggatttgccttgatagtgaaggtagttgctttcatgggtatggtgatttacagattttatggagatgaactgcgcgaaatgtttggttatgaagagcacccatatgctttctatgccatggcgatactggctattgttttggttggtttgctgtatgggttcttcattgctataatatgtggacagaggataactgaacggcattaccatgttcttgcaaagcaagagttaaccaaggagtatattgtagaagatcttgaaggagctgaccatgtgccagaccttgatcctagccatgttatagagttgaagatattaggactatattaaacatagctgcatattacatcagataaacattgttgatgaatggggaacagcataccggaaacaaatctcaggttgatgttgcaagaaatacgtacgtcattccacttcacctggagacagtgcaaaatgggcctttgtgtgactgtcgcccataaattcttgtgaagcaaaacacacttgctcattcgaagaacaccatttgaagattctttggttccaatgtaggcctgatagctctcaaacaagataataacattcatcgccgcacatctcaacgaatgaagattatcgtgaaagaagcgctaggatgatggtctcaatggacatttttgtaaagtagtagcatattatattcttttctcccttgcttcagatacacaacaaacatgcaacagccaagatgctaatgccccgtttgttgtacataccctgtaaaacattactgccaaactcgcagtactttgtccttttgattattttcatcgaatcgatgaactaaataatgtaacctggagctggagccgctcaaaagtctacacgcgcttcagaaaacgggattgatgtgaggcttgtgctggatcgcttcactttgctgcc

SEQ ID NO: 34200 - DNA, 6914 bp, Zea Mays
cgtcgctgctgcaggagctagggtttccggcgtgggcaaccggggtatgtgcagcagctgccgcactgcaggatctagggttccgacgactccgctcacggatggagggtggtagaagggcgagcgaatccctctcggcatacacccatggatcatgatgatactgattttcagagccaaaactttcaactagctggtgaaggcagtaacaaattctcatcaggtttgcgaccatttgcactaccaaaacttgatattgaggaccaattacaaggccatcttcgatttgataatttgatagatacagaagcatttttcagtgtacaagggcacgggaatagttggattgaggttctgtccactggaagcagtgttgttgattttagctctagcgcagctgaatcttgctcaatatctaaaactaataatgtctggtcagaggcaacatccactgaatctgtcgaaatgctattgaaatcggtgggagaaaatgagacaactggtgacatggataataatgcccaccttaagttaagtggtatggacagtcaaattgatcaatcgagtgtccatcctaaatctagtaactccctgccagatagtactgtagtgccaactgaggaagatcagtctttgagtactcattctagaatgacagacgatcttgatcgttctcagatatctcattctataatgactgccgacctttcaaacaccgagagtcagcttgaacattttcggcctttcttaatggacaagaaagctgagcaggcagtggattctgttggtgagaagtgcattgcaggtgagaagttgtcctcttcaaacaacgcaccaggaagctacccagccattgacaactattttggggcaggtcatgatgatcgttctttggacaaacttaatataccctcaactggagtagattcaaagaacttgaataatgaacctttcccagagttggctcccctgcagaacatatatactgattcatatcacttcaaggaagatactacagaatccgaggctggtgttactcctcaagattcaaagtttcgtcatatcaacgaaaataaagttgaaggtggactacaagaactgcaaagtttgtcatgtgctggtcagtccttgggcgctgtaaacttgtctagtcaagcaagcaatgaaactcttttgtcagaaagttctgatggattgctagaggccataacaaatccagttaagatgctgcacaggagtgatgatacttgcaataaagtgaacagcactcctcaaccatctttttcagcagtgcaacatggagctgaaggcctggaaaattcagttcacaggagcaatgagttcgttgttaaggagtttagtatcggttcaaattctcttttatctcaccaacctgaggcagacccaaaattttttaatccacatcctattagttctctgtctccgaaaagtaaaatttccgatgccacttgtgttcctgaagaaacaaagaatgttggatccaatagtataaacacctgctgtacaggtgatgaatcaaaacatgtagtgttggagaaccgacaatattctgttgacaacctaaaaagtggtgacatgggagaaaagatgtctggggaggaaatacccgcagtttcagggaacattgatcaaatgatagagaatgatcatgaagaaaaggctgccaatgctactggtacatccaaagataaggttgacccttctgacagtattgcacttgaaaactttgcagctgacactttcaatgcttcagaggattcagacattccgtcactaaatcataagaggtcatttgaggaacatgaatcttctgctttaggagtggagcctaaaaacacaaatttactccaatctacttctgggcttcaagagaaaatttcagcatcagtgatcagttctagtagtggcatcacacctaccattgttactgacaactttgatatttctgaggataaaaatggctgttcaataggtgtttcttctgttgattctcctgctttactagctgagaaggatttgaatatgtccacagtgaatactgaggagccattcaaggaaggggttaagtccgctttaggagatcaacacaatggtatttcttctggctctggacaaggaggggaaatgccagctgtcccaatggactcaaagattgccgtgtatagtggtactgtttctgctacagaaagggagaaattcaaggagcagcctaattctttgggttgtttgaccacaggagaaactcaggataaatcaggtaaccatccacatgctcattcactgaaatgccagactgatagatcttcaatacttgcagatagtatggatccaaccacagcatctacattgggtggaaaggtggctgtgaagattgtaaaaactccactgaatgcaagtgatgatttgaatgcacatatgcaagatatagtgttaaatcaaggtacagattgtagttctggtactgtgccatctcaaggaaacgaaggctcaagcttattggaacctggtaatggtgatggaatctgcactggggttacatgtgggtccccttcagtgattagttgtgctgaatcctgtccccaagaaggtggacatggcagcactgctttacttcatcacacactatgtgggcaatctgaggatcctgaagatcatggggcctcagttgatggtatccagagctcaaaacaatgcaataccagaaatatagaatctgcacctggttctcaggagactagtgcagcaggaggtgatagaagcttctcatttgaggtgggagctccaccaaatgttgctgagaaagcccatagccctgtttggagccctttccctaaatacattacttctcagagtagcaagatggccacagaaaatactcaagctggaggttctttgaaggatactagtgatgatagtaagaaaatatctactgtggagtctggtaaagaacagctatcagaaaggaaagtaactgaaagttctgggggtggcctctcagacaactgcaatatagacgacatcattaagggtagaagttcaccgccgcggcagcatccaatccctgagtgttctgtttcttctgcagatttagtgaattttccattcacagatccacagcatttgcagctacgtgcacagatatttgtttatggagctcttattcaaggaacaccaccaggagaggcttacatggtggcggcttttggagaacctgtaggtggtggcaaacctacatgggaggctgcttggcgagctgcttttgaaagatttcagtataaaaaatcacctcatgtcagtttagagactcccacaagttcacttataggtagttctgtgcctgagaaagctagcaaaggtacagcaattacaactgtgccagctagcaaaaaagttggtaaaactgtggcgccagcacatcctgctgtaaccctacactctccaacttctgattttccttttggtagttctacatttaatctgcaacgaggcactcatctggattttagccaggcagtatcaccatttgcgtataattcacacatgagacatccgtctcctggtgttgccccctggtatacgcagagccctggtccacgccctgcagcctggttaattccaccacaaaacttaatatttgattcatcaatgcaaccggttattcctacaaatgaaactgcgaagggtgcatcatccaaaaacatatccgtttcacatactgtttcatctggtgttcttcccagcctggcaccttctattgtttcttctccaatagcagttgtgagtgatggaaaacagaaggctgcttctagctctaagcgtggcacaacatcacaaaagtcaagaaaaaaaaagaaagcttcagcaagttcagaacagcaacctgtaattgcttctcctcatctcaaaatgaacatgccatcttttactcctgccattaagcacacagcaggattgaccttatgcggtagcaagcctgttcctaacatgggccagattgcctctgaacataactaccagatcactggtggtatggatagtgatcaaagaatcatcttttcagaacagatccgtggtgcagtagaacaatcagctgcacaagctaaaagtgcaagcattgactcagtggaggcagttaagcacaaggagggcatatggagccatctatctacaatctcaaggaataagttacctccaaaagttgaagagaaacttacctcagttgcagctgctgctgaagcagcagtttctgttgcaaaggcagctgcagaagctgccaagatggcgtcagaggctgcattgcaggcaaaaatgatggcagatgaagctcttagctcttctatatctgtaatgtccatgcatcacgaagctgatcaatataatgtcattagcagtccgcctatcttgtcaagttcaacgccagcatcatctctgaaaaccaagaacaagagtcatgccccaggttccatcatttctgtggcacgggaggctgctagaaagagggttgaagaggcatctgcagctgcaaaacgtgctgaaaacttggatgccatattgaaagctgcagagcttgctgcggaagctgtgttcagggcaggaaccattattggaatgggagaaccactaccttttaccctaagagagcttttggaagctgggccgaatggctactggaagtctgcgagtgcgagaaataaatctggaagttgtaatgataatccagtaacagaaacattggaggtagatgcacctgctaactttaacaaatctggcagaaagcgcggtcggaaacctaaatatgatcaagcactaccaaattcggagccatcttcaagctgcaaagaattacagtcatatggaatacactcaggagtaggacatggagttgttgaagatgttcccattactgtgtcacctaatggtaacaatgttacatcaccaataaacattatctggaatggcattgaaaagggatctgcagttgaggttttatctgacaaaggtgggtttggagtagcttggttttctgctaaggttattgatataaatggaaataatgtttttgtcaactatgacaaccacaatggatctggtcctcatgaagaatgggtgccattgcgacaagagggggataagccgcctcagatacgtcttgcgcaccctgctaccctctcaaaattcaaaactaggaaacgactcagggaaacagcaggaagttgtttatgggttatcggagatcatgtagacgcttgggtcaacaatagctgttggcgagagggagttatttctcagaattatgagactgatgagacgaaatatgatgtacatttttcagttggaggtggtggtgagtccttagtagttgatgcttggagccttcgtccatcgcgtgtttggaaagatggtcaatgggtagagtggtcccatgcaagagaaaggaaatccaaatctaataagggcgattcacctcctgagaaacgccaaagaatcgacttgcttcaaactggtggcaatctatctgttcttggcgaagtggggggttcttcgaaggacaataatataaacaatgcaaaaaacccggaggaattaaagccattgtctttgtctcagggggaaattgttttcaacattgggaaaagtgtagttgagaataaatctgattctcttgcattcagacgtcctggactacaaaaagaaggatcaaaggtcgtctatggtgttccaaaacatggaaagaagaagaagtttatggaagtaagcaaacattatgatgcaggccaatctgacaagatttctgagggcaattcatctaacagattcgtgaaacatctgatgccacaattgccaaggccacgtgaaaatgcttccaaagttgaccctattagaggaaggagagtaggtgaaacaaggtctagattacctaaacctacgaagtcccacaatgttggagctagcagtgttcctggaaaggattccttgcctatgcaaatgcatgttccaaattctggtgtttctgaaaggagttctagttttgcaggaagttcgacaagcacttccaacaatgagaagcccacttcagaaaataataatccggtgcttggtgtgggccttagaactgaagtttcttctggtcctgaactgcaaactgcatctactgttcctagttccaagccaaatgtatccactactaatcgagctaaaaggaaatatgttcccactgtcagtaacacaaacagaggtatactaaaaacctctgaaaagtcgagttctgattctgctgagccccgaaggactacttctgattctgctgaacctagacgatctaacaggcgaattcaaccaacttcaaggttactagagggcttgcaaagttccctcgtaatctcgaaagttcctggcgagaaggttcataggagcaattacaaaagtgcatcctcaagagggagaactcaagctcatgggtgagtgaaggcaccacatagctcatagctgcttttggtgggatagctctcgtgtacatagctgtagccgtccagtatggaaggaggatagggttggagtaggaagtctttattggagcgcaaggattcagatgtattataaactagcttaagtgcattgtgttaaccttttcttttacttgctcgaattatacttttccgtgttgtagaatacctggaaatatccttttagtatgtgtggatacaccgggaaagaaattgggtgccgtttaaattcatccgataatttaacgtgagtctgaacgtcaatttgactcgctactatcgtttgatcatatcattccttttctaagtcgtctacctgcagttgcagaagctggatggtgctctgcttctgtgccgttgtgtagtgaatgcttgttgtttgatcgtttt

SEQ ID NO: 34201 - DNA, 3134 bp, Zea Mays
atcccagagaaacatctaaaccctagcggcggaaccttccccgtcgctctgtcctcctgtccggacatggcgaagacgaagcccatggcggcggcgggcgagaagaagaagagcaaaggaaagaagaaaggcaagaatggcccggccaaggtggccatgaaggctcgtggcgcggcggcggaggagcggaacaacccgttcgaggccatctggtcgcgccgcaagttcgacgtgctcggcaagaagcgcaagggcgaggagcggcgcgtatcgcgctcacgttccgaggccatccgcaagagggagaacacgctgctcaaggagttcgttgagagcgccaagtcgtccgtgttccacgaccggcgtatcggcgagagggacgacacactgcccgagttcgacaaggccatccttcgccagcaacgcgagcgcttggccaagttgaaacgagaaagcaagtacaatctatcagatgatgatgaagacgaaatcaatattcataatgtgctgctatcggaaaatgatgattttgatgaggaagtgcctctcgatgatgggagcgacgaggaaggtaaaatggtcctctcaaagaagcgtttatctctccaaagtgatgaccatccttcaataactgatctaccacaagaaacacaccaggggcagaagagcaagaaggaagttatgacggagatcatttcaaagagtaaattttataaggcccaaagagccaaggagagggaagaggatgaacatcttgtcgacaagttagacagtgattttgcatcattggcccagacacgggcgttattgtccttaactgagtcagctaaggtcaaggtgaacaaaactgattcaagcactggcttgactgggaaggagttttctaacaaggcaaaggcagatacatatgaaaaactagtgaaagaaatggtgatggatcaacgtgctcggccttctgatagaactaaaactccagaggaaatagcacaagaagagaaagaacgtcttgagaagctggaggaggagcgccaaaaaagaatgcttggaactgctgatacgtctgatgaggacgatggcaacgaaaatgataaccacatgaagctaggaaactcaaaacctatatctggtgatgatcttggtgattccttctctttggatgagtcaacagtaaagaaaaagggctgggttgatgaaatttacgaaagggaaggtagaaagattggtgatgatgcagcagcatccgatgatggagaaagcgatgatgaaaatgctggtgatgatgaggctgatgatgaagattcggactccagtgacaatgactttggtaatatgtctgctagagattgggagcaaagtgatgatgatgaagttgatgtaggagacgatgaaatggaggatttcaaagagaaggggcaagagatcaatgacaaagtggtgaataaagatgcacacaatttgaaaggagaatctaatgtgaaacctcaagtaaaggatggcagtattccttttgttattgatgcaccaaatgacctgaaagatctatcttctttgttagatggtcgttcagaagccgaaataattgagattattagtcgaatacgtgcttgcaattcaataaggcttgcagctgaaaaccgaaggaaaatgcaagttttctatggtgttcttctgcagtactttgcagttttagctacccaaagtccagtgaagttcagaataattgacatacttgttaagcctttaattgagatgagtggagaaactccatattttgctgccatctgtgcaagagagcgacttattcatacacgtacccgtctatgcgaagacattaaggttccagggaagagcagctggccaaatttgaagacattacttctgctgagattatggtctcttatttttccctgctccgacttccgccatgttgttacaactccattgcttctacttatgtgcgaatatctgatgcggtgccctatacaatctggtcgagatgttgctgttggttctttcttgagttcaatggtgcttgtggttactaaagaatctaaaaagttctgccctgaagcaattggtttcctgcaatctcttttggtaacatcacttaaaggaaaagtggaaactcatctgcacaatcagggctggtgtacttttatctgtggcagaatgtttaagaggttttgttattatacatgaagggctatcttctttcccggaaatcttccttccaatatcctctttgctgcaagaaattttggatagatctgagttgcctggatcgttacaagacattttccatgaagtcattgacttgatcaaaaagagaagtgatgaacactatgcttcaagggagcccctccgaatgcggaagaagaagcccgaaccaattaagcaattgaatccaaaatttgaagagaactacatcaagggtcttgattatgatcctgatcgagaaagggcacaaatgaagaagctgcggaagcgtgtcaagagtgagatgaagggggcgaagcgtgagctgcaaaaggataattatttcctgtctgctgtgaaggagaaagagaggaggaagcgagatgaagagagagctgagatgtatggaaaagccatggcgttccttcaagaacaggaaagtgctttcaaatctggacagctggggaaaggaaagggtaggaaaaggatgcggtgatactctattgcaggggggcagctcggccagtgtaaatatacgggattgtgtttgctcaccctcttcccgcggtactggagggtggatccagctgattactgtatcgtgagctgctcagagtttgtcgtgcctacaagagcagggtgggcctagtcttatggaacatctccacctgcttactcctaaagctttgcctataaaattgtaacgccacaaacactttacaaggcttctccttggtgaactaccacacctgggaaatgctttatttcttttgtaccgtggagtggcttgcatctatgttatatactggtgccatagtaattttcagaagcacagtgaagagtttttattattttcatttttgttgtactctgacatgtgagccctataagtatggcaattttggcacggttttgcagtagaaaaataaatactatta

SEQ ID NO: 34202 - DNA, 1145 bp, Zea Mays
tctcaagggcgggaaactctcaaaatcatcttctccgcaccaattccgcaaaccctagaaaaatctcgctccgcaaaaccatgagcgcccctatggagatctccttctctgcgcccccaccccctccggacgcagcgtctaccgccgccgcttccccgctgctggaacctgccgccgcgcagatgctgccccctgtcgccgcggtctcctcctcgcagccgatgcagcagacagctgcggctgcggccgtggttgctccttccccggccgacgataaggtcctcgtgtcagttgaggtactgttgcacgccacgagcgtagctcgccacgaggacgtccaggtggcggtcgagaggatgctcgaagctcgaagcttaagctatgttgatgggcctgtgccaattcctgccgataattcttttcttcttgaaaatgtcaaaaggatacgaataagtgatactgatgagtgggttgagaatcacaaagttctcttattttggcaagtcaagcctgtcgtgcatgtgttccagctgagtgaagatggtccaggtgaggaaccaagcgaggatgatacactctctagctttaatgagtgggccttacctgccaaagaatttgatggtctgtgggaaagtttactatatgaagttggtctcaagcagaggttgctgagatatgctgccagtgctttgctttttactgaaagaggtgtggacacatgtctggtttcatggaaccggattgtacttttgcatggtccacctggaacaggaaagacttccttgtgtaaagcactagcacagaaactttctattcggttcaaatcaaggtattctatgtgtcaattgattgaagtcaatgctcattcattgttcagcaagtggttttctgaaagtggaaaactggttgccaaacttttccagaagatccaggagatggtggaggaagaaagcaacctagtatttgtattaatagatgaagttgaaagccttgctgctgccagacaagctgccatatctggctctgaaccttcagactccattagagttgtgaatgcactgctaacacaaatggacaaactgaagtcttggccaaatgttatcattttgacaacatcgaatattactacagcaatagtctactgg

SEQ ID NO: 34203 - DNA, 741 bp, Zea Mays
gaagaaccgaactagcgaagaaaaggacgcggggcaccatggcgacggcacaggcagcgtcggcgtccccaacccaccaccgcgcgtctccagggatgtcgccgccgcagccgccgtaccccagcgccgccaggatcgccgactccgcctgcttcccccagtacaccgcctcgctcaagtgtttggaggccaaccaggacaagaccaagtgccagcagcagttcgacgattacaaggaatgcaagaagaaagaggtttgcccttgtgtcatcccggttcctctgtaattttgtgtgacgagggaggctcggctggaacggaataaaaccagatcactctttgggtgaacaatggcgtcccacctgagcaatatgctggcggtgcaataagtctcctgctgatgtgagcgaaatcacggcttttttctttggtttcatgatgatcctctgcaacttgtgcaaggtagggaatagaaataccgatctcgagattgagggagatgtaagggcgtctgggaacagctcattaacacaatggctacggtgaatgaatcgaatgagcgaggatgtattttgagaacaaccaggcgtcatgaaacgacagtttgttcaataaatttgtattccacccctgtaacgattgtacttcaaaatatttccatgtgttcttagctgccttgcatccagctttttcgacctgccgtcctatgtggaagtggaagctcccctttcgaacttgttt

SEQ ID NO: 34204 - DNA, 519 bp, Zea Mays
aaaatattgtcgcggggttcgatttaggttacacgtatatatcgaatctctaaaatcatacacgtgtatcgccaaatcgcatcaaaattacaacgataaatcgcaagattcaaaacatgatttagaaaataaatcagtgggttgtcttcaacccttgtgttctcgctcatgtgcagggatgaacgtcgacgagtggggagggttcggcgggtttggcatcaagcagggaacgacacgatccacgtgctgcggagctctgacggggttccatggatggtgagcacgaactctggcgaggctccacggacggcgggcaagaaatgtgagaaagagaaagagagctcggagaggaagagagctcggctgtgggtggaagaagagaggagcttggtttgggttttatagagagagggagggagagcagaggtcgtcgggggtgtttcatggccatcaatggcattcccggagcttgaatggagggagggagtaacggatgcattgaagctccaataacgcgcc

SEQ ID NO: 34205 - DNA, 1490 bp, Zea Mays
gaaggccgcgggatttccacctctctcacgccggtctccggccacctcactttcccccccttcgcgctcggcctcgcgccgacccatctgggctggggcacgtggcgacattcactcgtcggcttagggaccccctggtctcgaaacgccgacacctagtcttgaccagatacccatgggatttattttgtcgagctggtgacgcgtggccagcacgagagcgtcttcacggcttgggacttggcgtagacgaggatggcgatcgatgacatcgacatgccagcgcaacgatttccatttgacgaagacgatggaagtcgactcgttcgaacctttttgttgagcacttggcaggtactatccaaactgcacgcacaccaccatccaacctttggacatcttctcttggggattcttttgtcagtgcgatcacaactcggaggcatcacgtaggtactggcgtcgaagcgaggcgacggaataacgacaacggggtggggcagtgttgaaggagctcgtcgtgataacgaataggagttcaacggagacgaaaccgattgtcgaataggaactgcgcagatcgataaccgaagcatggcgtgatagacgggggatatcgtgatggccggtgaactctgaggtccaagcacacagaataacgacacccacgagctgggggaaaaagaacacatggttgggcgttaacggccggatccgagcgcgagggagaagctcgaccggcgagctggagcgagctgggcacatggcaacttgaggaagctgcgcacgcgctgaggagaactaaagggagctcggctgaggaggcgcagtggccatggagtgaagcaggcagagagggtcttggcgagctccatggtcgtgagagtgagcagagggagctaggaaccgtggcagcagggagatgggcacagtccgagctgaagtcgggcgcgcagagaagcaaggcacgcgcggcaacagagagggaggaacgccggcgtgctcggtagtgcacggtggccatgggaaggggagggagcacgccgaggaagcccggccgacatggaggagccgagcgcgtagaagagaggaagaagccgaggaaggtggctggagggagatggagcagagggcgtgccatgggaacttcatggctggggaagaagcttagcagagaggagcacgcggctggaaaaggggctggggcgccatggcgagctggagcaggcgacccagggcacggagagcttgcggcaccagaaacgccgggctggaggtcaggcagagcgcggacggcgagtggaggggacgcagcaaccatggagcttggggccgtgcacgcagggtgcagggcgcgcgcagaagctccagggaagaagaagacgtgagggagagagagagagaagtgcggctggggataaggaggagatggctggagcggagcgatttttaccaggagcagcgacagatcttttttcacttgcgcgcag

SEQ ID NO: 34206 - DNA, 3488 bp, Zea Mays
ccaccgtccatacatgccttattgccttttgcacattcaagaccgctctagtccctgctctacagctctagtcgattacagaaatttggacaaagcagaaggttcaggtcgtaagatcgcctagtccctgctcttcctggtcagtggccgttaccactgccccctctcctctcctctcgctcgtgcagaggaggagacagactccccccgtcgccgccctcgcgcctcctccgcccgcagctcaagccgagcgtcaccccgtcggctaccttccattctcgccgcacttctcccactgggcacctcgcgccctcgtgacggtataaatagcccctagtcactcctcggcgctcctcaaacccaccaaaccctagcccacttagcggcggcggcgctagaggtggaacgagaccttggcggaggtagcgagggtagcgctgctcgctcgctcgttgggtttccatcccctactgcctagagcgagctctacgcgacgatgagcagccttgtcgagcggctgcgcgtgcggtcggagaggcggccgcggtacgcgctcgacgagtccgacgacgacctcccgctgcgcgttggggccggaaaggggaaggatcaacagaacgacgcgcccgccgagcggatcgagcgcgaggacgcgaaagaagaagcttgccagcgctgtggaaaaagtgataatctagtctcttgttcaacatgtacatacaaatttcacagaaaatgcttggttccttgcttaaacatcacatctgataaatggagctgcccagaatgtgtaagtccattaacagagatggagaggattctagatattgaagtgctggaagcacctcgtgaagattctagttccacagagcctcgatcaaagaagatggagcgatatcttatcaagtggaaaggattatcatacattcactgctcttgggtttcagaaaaagaatattcagaagccgcgaatatacaccctcgtctgaggactaggttgaataacttcagaaggcaaaaggaagccatgaaaatagaagcagaaagatctggtgaggacatcgttgcaattagaccggagtggacaactgttgacaggatccttgctagcagaaaaaacttagttggcgatcgggaatactatgttaaatggaatgaacttacatatgaggaatgtacatgggaaaatgagtctgacatcacggtgttccaacctgagattgaacgcttcaatgagatccagttcaggcgtaagaaatctggtgacaagggcaaggccactcgggagccacgccaattcaaggagagccctacgtttctttctggtggcacactacatccctatcagcttgaagggttaaactttttgcgatattcgtggtttcataacaaacgcgtaatccttggtgatgagatgggtcttgggaaaacgatacaaagtattgcttttcttgcctcactctttgaagacaagtttggtccgcatctggtcgttgctcccctctcaaccctgcggaattgggagcgtgaatttgcaacttgggcacctcaaatgaatgttgtaatgtattttggagctgctgcttctcgtgacattattaggaagtacgagttttactacccaaaagagaaactgaagaagctgaagaaaaagaaatcttctccatctaatgaagataagaagcagtcaaggataagatttgatgtcttattgacgtcttatgagatgatcaacatggactcgtctattctaaaaaatatagaatgggagtgcttggttgtggatgaggggcatcggttgaaaaacaaagattccaagttgtttggtcaacttaaagattataataccaaacatcgtgttctattaacggggaccccagtccagaataatcttgatgagcttttcatgcttatgcacttccttgagggtgaaagttttgggagtataactgatctccaagaagagttcaaggatataaaccaagacaagcaaattgagaagcttcatggaatgctgaagccacatcttcttcgaagattcaagaaggatgttatgaaagaacttcctccaaaaaaggaattgattctacgagttgaattgacaagaaaacagaaggagtactataaggcaattctcaccaagaattatgaagtgttagcccgtcgtaatggtggacatacatctctaataaacgttgtaatggagttgcgcaaactctgttgccatggattcatgattgatgaacctgatcttgaacctgccaatccagaagaaggtttaaggaggcttctagattcatcaggtaagatgcagctgctggacaagatgatggtgaaactgaaagagcagggtcatagagttctaatttattcacagttccagcacatgttggacttgctggaggactatttaagttacaggaaatggacttatgaacgcatcgatggcaagataagtggcgctgataggcagatacggatagatcgcttcaacgctaagaattcaactaggttttgctttcttctttctactagagctggtggtctgggaataaacttggcaactgcagatactgtaatcatctatgacagtgattggaacccacatgcggatttgcaagctatggcaagagctcatcgcttaggacagactagtaaggtgatgatatacaggcttgttagccgaggtacaattgaggagcgaatgatgcagcttacaaaaaagaagattttattggagcacttagttgttggtcgactcaccaaagctaataatgtcaatcaggaggagttggatgatattatacgctatggatcaaaggagctttttgaagacgagaatgatgaatctcgccaaattcattatgacgaagctgcaattgagaggttgttagaccgtgatcaagttgacggtgatgaatctgtggaagatgaagaagaagatggattcttaaaaggattcaaggttgcaaactttgaatatatcgatgaggcaaaggctcaggcagaaaaagaggaggcacggagaaaggctgcagctgaggctgaaaattctgaaagaaactactgggatgaactattgaaggatagatatgatgtacagaaagttgaagaacatactgctatgggaaaagggaaaagaagccgcaaacagatggctgccgctgatgaagatgacattcatgatttaagttccgaagatgaggattactcattggaggatgacatttcagataatgacacaagtttgcaaggaaatatttctgggaagaggggccaatattctaagagaaaatcacgtaatgttgattctattccattgatggagggcgaaggacgtaccttgagagttcttggattcaaccatgctcaacgagcaatgttcctacagacactcaatagattcggttttcagaattatgactggaaagagtatcttcctcgtcttaaaggaaaaagtgtcgaggaaatccagaggcgaagggcgg

SEQ ID NO: 34207 - DNA, 2084 bp, Zea Mays
  misc_feature (2083)..(2084): n is a, c, g, or t
acaaccgctctctctccctctcgaagcgacgcagaaccgctcgccagtgtcgcagtcgcctcctgtccctctcctctctctttgccgctgccctcctctaagcatctccctctcctactccctcctctcaaagcacttgttggccccccaccgccgcatctgcatcccataatcgcctacgccatcgccgccgccttcgggtccttctcgctcagcctcgactgctcgctcatcttcaccgaggcgctcctcacccccgccatcccctccgtgtcggcgtgcgccggcggcatcttgcccagtctcagccgatttatccttcggtctgttagggccttatcaaaccgccgccacggcgaactcgcgccgctgccatgttcgcctcgcgcacccaccatctcctcaacaacgttcaaaccgccaaccacgacatcctcctccacaacccgacctctcacgcatcccaacttggtgcggcgtaaacgcgcagcagcacttcgcctcggtcgaccacggcctgcccccaggcgttgacatccagatccatctcgctccgatctacattcgagaagtttgtctctggcatcgattccccaatccgaatcattgccgacgtcttctttgggtggacggtcgaagtcacgcgcacgcacatcccacacttgttcctccccggcggtgcattcagcaacaccgtcttcttctccgtgtcggagcacctcgggccataggggcagacccgtgaacgacattcttttggcgtgtcacgacctcctgtcgcaagctcgatgctctccccatcgacacgtgagccccttggagggagccccgacctagattttactgagagtttctcctcatcaacctagatctcagtttctctggactttactgagcactcaacattgtgttttttggttgctggtaaattgctcatttactgctatagttgattagtaaatataccggtattagtatttatatagttactggttacttgtaatacaaacatttttcattgaagcgcgtatatggtttgtaaaataccagaacaaggtcagtacttttatcattggcgagtatcttttatgtgagtaatatttttatttccatgtttatctacttagttctcgtggcatgctgccttttcagtattggacaatgctaatggagttacaactccaaggacaggaaggtatagtgcagatggagcaggtggtgatgcttctgtagagcttacacggccgtgcaggcacgcagctgccgcgcttggtgatttgatatttgtgtatgacggtttacgtggaggtcaaggaattccatccttgtgtttgcatggacctagaaaatgcagatttaagaatgatgcgagtgatggaggcctatcaggtcaaggaatttcatcctgatgtttgcaaggacccagaaattgcagatttaagaatgagcgagcgatggaggtctatcagggagtgttcttcgttgctatccattgtgaaacatgtcctacaagactacagtgttgtgttgtgttggttcactgtaccacaaacaatattgaagaggactgatgaagagcgcaaagtttatagcatagtcgaagattttgaattgcaattcaaggagaaagaggattgctaaagctttcttttcaatttaggatgaccttcaaaacaaaaaaaagctcattaaagaacatgggcattatgaaagcacaataggatccaaagaggtaggtccctttttgtcacttatttaatattcctgaataacctgtgttcggtctgaaagagcacataattgcactcctatttttaatccttacatgattactgcataactgtttatcagtttgtggtctacaggtatcaggctcgctcgcaccacagatatctttgagttattttttactgcattgcgactaattttaggcctccaatttgacaaacagaattaagtagcttatgtatcccttgtttcttgtttcctcagtatatatacacactttccaatatgacgcaggtagcattgttgtagaattgcggttcacggaaacacaaggctagcgcttttgtgcaacaann

SEQ ID NO: 34208 - DNA, 2083 bp, Zea Mays
agttcacctttctcttctaatggcttcaagccggcgacagcagcaacaatgcgacgttcatttcaccgtttgcttcccgagatacggtcatacggagccacagtttgtcgttactgctcccagccagcgtgaaccgatcccacggagctcatcccacaggccacagcactcctccggtactcccctcgcacgacttcacgagcgcggtcgactgccgccgccaccaccgccgatctgcaaggtcccgtcgaccaccgccactctgcaagtgaggggaaagaggcaagattgaggagggaagcatcgctggtgtatccgccgccacattcgtcgccgggagccagcccatattcgagacgaggtcgagctttgctgccttggcgagcttcagtcgaatcaaggttgagcctggcggcaggccagtaaacagagcaacgcaaaacccttcgaatcaatggagacctccgcagcaaccccgacccggccgccccacccggcggccgcttccccatcgccgtcgccctcgtcgtcgctgaggctgtggaggtcagcggcgcagcgcaacgtgcgcaatcagtggtcccgtctgagcgccgccaaggagcagtggctggccgccgttgctgatggccgcgcccacgcctccgcgctcgtcaacgcccacctctgccgcaggaacatgccagcgacggatttgggggtgctcaaggatatgccggggatccgcgataaggctaactccaagttggtgcttagagaggagcaatacagtgggatgcttctgtcggcctacaaggagatggtccgtcagctgtcctacttggttgaagcttcccattctatgcgctgtttttctaaagcagctccaaattgctccatcacacagttttctgaccgccaagataatttgaatgattcaggggatggtggaggagccccagtattcaaatggttctccatattagaatttggtgggtaaatcatctcttctatggattaagtcactactatgatctttcgtctgttgggtgtgacaatgatctccaaacccatctgattgccttttaaaagttcaaaaggtcaaatgagtttgatttaggaagactactcagagcactatatattctcatatttgaggatgccggtcaatatctgagacactgcacatattaatgtttacatgttttaaatccacatgataaaaagatattatgtttcctttaatcacctcagagactcttgcccaggagcttgttcagatgtttgtttcagagcaaaagttgaagaggctgctactcttggaatttctctcgattgctttaaaggaaggtgtagaactccagacatcattaaattggggtgatgaactatatgatggtgaatcaaatgaacttcagagtattggccttcagtcaggagatgcctactcaccgcctgaaaattggtgtgcagaacgtttagggagtcagcgacctggcaatctccctctgcatgaagttttacaggtttatttaaccacttggcatgctaatatgaacatcaaccggagtagaattggtgaaatatttgagcttgttgaggaggagatgaagattaaactgtcttgaagattccgattcattttgtttggctattcatcaaggaagaagaaatggaaaagaaagatcaatcagtttactattcaccaggtttctctatccagtgtctttatctgccttagtagaagtcttcagagcttacctatcatcttagaatatagtactggtctccttgtaacccataatatatttttttaatccaatgttcggttaccctggaatcatattgggaggagagcgttggaccaacatatgttattgaaatgagatttccaagttatcaggatcattcgcctagcttcaggtttgttctgtgctgttgtagatgtgtaatatttacttcattcgcctgctgtacagatcttggtgacatgctcgtggaaaatgcatattgcttttagtggtttttcattacgcttatggattgtagatcttctgattattattatgaacacggagaaaataaagctgtggattagtccatg

SEQ ID NO: 34209 - DNA, 3428 bp, Zea Mays
atgccccgcttcgcgttgtggcccaagtgcagagaggtggacgtggcggccctcgcggggcccgcaccgtcgctgcttccacgtgggcccccacctccccggtaccccacagttcaagatctgaattcgtcaggggagagtgagacgcaaggtctccggcagagcctagaggagcagacaggagaagcggaggcggaagcgatgctgcacggcggtgggtcgcgagcaccggcgaagccacggcgccccagctcccactctcactcccgccagcgggcgccgtccccgcccactccgtcgcgccgagcgagcggggctgtcgcttcggcttcccacgaatcgaaggagcagtcggcgttggaagctccggtgatgtcttccgtggaagagacatcgggcctctccaacaagccaagcgctgtccctgcgaagaaagacacgccgaagcaggtggagttcacccattgctcgcctggtattgttggcaggctgatgggcctagacaccgtgcctcgccccaagaaatctcttgaccgctgccagagtgacacccggggtaaccggcgacacttgtcaggagttgctcgaggcgtggacagcgcttcgtctggggatcaggcatgtaacaccagttctgatgagctgccagcatttaacgatgttttcgaggtaacagagatggagaacatggcgatgcatgggccgctgcagcctggaaatcaggagccatatctgacaaacattgaagctgatcttgaatttgtgaggcaaaagttcttggatgttaagcgccttgccactggcgaagggaatatgaactctaaggagttcagcgaagcactcgaggtactgcactccaaaagggatgttttccttgaaatccttcaggagaacaggactgcagtgtcaggattctcaggacacatccttagccacagtgggttgcagtgctcttcttataccagcaatgctgctgctgctgctgctgcacaaccgtttgagaaagaaatcccttgtggcatggaaggtgtgtgtgacgggatgcatgtcataccaaaagagtttgaggaacccgttcctagcatgccgcccagagaaacttcagttacaccagtggcgcccttggcaccaaatgagggcaagagtaaaggctcatgccgtcgctctgaaatcgttgttctgaagccaaaccttcagaggaaaagtttcacacctgttctctctcaaattgttgttctgaagccaaaccttcagaggaaaagtttcacacatgttctatcaagccaagaagcatcacaatataaacagaagagagatacacaacatttgaagcctccacaccatagtaaacaattttctgtggcacgaaacgatgaagttctcgaaggagaaaggggttttgcactacagaaggctagaaagcaagcacataggagtggtagcaggaggagatcatcccaggaagaatataaccttgaagcagatactgagaaggcaagagttagttctacttctacctctcatgaagacaccgtgcccatttattcaagcatccattcttcgggaccatcagtaagtagaaaggctagaaagcacctctcgaaaagatggcaaatgacctgccaatctgattcagaagattcaattcctaaaggcataaaaacactaggtgaaatgctcggactgtctgatagagatgcaccaagagaaaccacccacatggtaggatcagatccaaacttcagtccctataatgtgagagaggtgccagacagccctcttggcattagcagtaaagatgggtggaagacagggatttactgtgaagatgattcaagagctggtatatcaaggaattttctcaggtccaaatctcttccagcctcatctaccacttctacaaaattatcatgcaggagacagtctgcaccaacctgtaggttgcccattctgaaagatatattgaatgcacccactgatgaatctgaaaatgcacatatcaggaagagatcaccaatcagaaatgcaaaacagagaaatgaaaaagcaactgcccatctaggaagggaaaatatgctacctgaaaaagaaattcatgtaacctcggaaatagccaggcacagcatctgcgtttctgatatttctcgggcaagcaatatacatactgaaaagtgccctgatgatgctatcaaaactgaggatcaggaagagtctgattctgctcttcaacatgattacaagaaaaaaacacaaggttttatgggatgctaccagacaatagcaacatcatctccggagacaaaagaagttatatcaattcagaatcaggattgcatagaattgaaggaggaaaggaacccatcagtggagattgaagctgatcaagtctacactcgaacagcagaatcagcaagtattgcaagtgctgaatgttgtgactgctcaagtccatctgctttatcgcaacaaagttctggtgaagagacttattctggaatctttaaaagcatcaacgtcggtattcaagaactcaaagagcaactgaagatgctgaagatggaagaccaaaatgacatttgtggagactattctgatacattgtcaagcgacgagttcgataatatgaacatctcaatatatcgaaccatggaagagcagttgtctatgtttaaggatggggaggacagagatttctcttatgtacaggacatgcttgctagcgcgtgcgacttgccagagcacctagaagattggcaagtgagctcagatgtgttcctttgtcttgaaaacaagtacagcaagctggttctgtggtcaaaatccgacaggaaacttctgtttgatcttgtgaactcaattttggctgacatgaccattccagacattggcttgtgttcaaagctcatgatgaagcgctggcctgaaatagatcacggacagttaactgaaatcgtcaggcaaatggtgcagaagcgaagtaactgtgggcactttttcttggaggatgttcagcctttgccattggaccatggttctgaggtagagctggttggaacgaagattgccatgatgatccatgatgacattatgacagattttatcgtcggaatcatgtcccaggagaacctccttgttatcagctaatgtttagggctgtagtggtttagctagattgttaggcagatgagtcacaacctgcaaaccagtagtttgcgaatactagtctactatatataaaaggcttggttaagctgctgtctaattgacgttgctgcaaatcactggtttgctctctgattgtagtgctgaaatagtgacgggcggattgcattggcagggcaggtgtatgtatgtgtacatcctactacaattactgctgtgtcctaatcagcagtctgaacatgtttatcctactacactttttcacg

SEQ ID NO: 34210 - DNA, 3636 bp, Zea Mays
gcgtcgcgagataaaaaaagatcgggagcagaagagaagagagcaggagcagccgggcctaaacagaacagaacagaaaggaaaggagagacgcgtgtcctcccagccactgccaccctcccccacctctgcctctctcgaccccacccgacccggcgcggaaccggagccgcccgcccgcccgcagccccgccgcgccccgaacggtgccgacgagctccagcagcgcccaatggcggcggccttcctcgccctggagccccgcgtgacatgatccctggcttggctcccgagcaggggaatatccgcgcgagcacccccacccccacaccccagccatagggccccccaattctcgccttccccaccgcaaatccttctcgactcccgtatctcccctctcctcctccgccgcctcgcgcgccgcaattggcgttgtgctcgcgtggacccagatcgccgccaggaagtgtctaattggtggtgcgcataggactggctggatttcaatcgtgataatactgatatacggagactcattgctgatccagtgagcctattcgcgccaacttgattacagcctttctcacacaagtatggcgccctctgctgccgtcccgggtggctctgaggttgaggggtcaccacgcatggccaagttcctctgcagctttggaggcagtatccttccccgaccactcgatggctgtcttaggtatgttggcggcgagacaaggattgtcatgttgccgcgtgacatatcatatgccgacctggctgcacggatgagagagctctataaggatgctgatatcatcaaataccagcaacctgatgaggatttagatgcgctggtctcggttgtgaacgacgacgatgtggtgaacatgatggaggagtatgacaaggtcattgcgacaggggaggcgttcactcggctcaggatcttcttattttctcagcatttggatgatgatgctgcatcagtggatgtgcattacaatgtagacgagcgggaaacagagagaaggtatgtagatgcgcttaacagccttggtgatgttaagtcaccttcctcccctgtgtctgtggagcagctttttggcattggaggcaatgattcaggaattcctgattttgctggcttgagacatttgaatgtccctcgtccaacacatagtcagaggtatggagagatggattctccttggagccctgcctatgtctcaccaggccagtacggggtacatgacccaagggattttccaatttcaccatcatctgcaaggtttcaagtaggagcggaggattttgatgagaggactcctgacgactttgtaaggcagtcaccaaaatatcgtcattatgaggcgcattcaccatcacatatggataatttagtctggcttccacctggtgctgtaattcagcaaaatgcaggctttcctggtaatttgagccggtccaacaatttcttggatgggagcaatggatgtgatcactgccgttcaccattccataaggttcaaggttcagtgaatgatcctatctatatgaaccctcgttggactcggccagtccaacaacattttgaccaaccaagcatgattaatgattatcccggtcaccatgctaattcttgtccagattactgccgccctggtgatcattatgtgggaggtcaagatgttagattggaaaatggtgtttatgttaaagagcaaaatggtggtcatcctcccatgttctataatgagtcacatcctcacgatagagtctggcatgtgcataccaagcaaagtcatcagcgatacgaggatccaaggctgcatcatcctgctaatggtagagtgatcgagccatacattatggatgccaacaaagtatatgaagttcattcagcatctcttgctcgttctagccatgagagtcctcactattatcacggtagcagtgaggtcataaatgacacgtatcacaaccaacaagttggaggcagtgggtcgtatgtgcagccagcagggtttgaagaatcccctagccaccattacaaccactcttcggcctatggtgcagattccttttaccaaatgcagcagaatttgccacccattcaatctctgagaaggagagcgaacagccctgttcacactgcctcaccatatgattccccacacctgccaatatcaaatgggaccattaacacaaacttcgtaagaaatacaggtgatgtcagtccgaggataccagggctacctggatatgatcgaatgccaaacacatggactcctcccaacggcagcataccatatagagttgttgggcatgatgttcatgctgcctccatggaaaacactagtgcctttggtcctaggtctaatccaactgctgctcagtatgttcagcatttcattgctcctgaatcaatccagcatcaacctggagctccattgagggaggttcatcctgaaagatcataccctgaacccatgccgtcgtcatatgttgatggcaaagtagctgtttctgcattgcctctcactgatcaattatccaggttggatacaaacacaataaagaaacctgaaggtccagatgatgttaactcaactcaaaatgtgaatgaaacaactcctttgcatgctgtggatgaaccaagtaccttaccccaccatgttgtagttgtacatgaagttgatactaagcaggggaagccaaccgaacatgaaagcaggcaaaagcaacatgaagctggggctacagcactgcaggaatgtggggatatttcagaggatagattgaatttccttcctgaattgattgcctctgttaaaaaggcagcactggaagatgctgctgagacacggatagcccaatcagatgctaatggtgctgtttcacctgttcctgatgatgatgatgataatgaaaagaagttggatgcagcagctgctggtactacagatgcaaatcaggaccctgatttgcaaggaagcattgatcggcagaagagctccaagattgagtctacaactgctgaagctgaagctttgtctaaaggactacagattgcggatttctggaaagaagctctgatcctaagctcactccatcatccaaatgtggtttcattttatggtgtagttcgtgatggtccagatggaagcttagcaactgttactgagtttatgatcaatggatctctaaaacagtttctgaggaaaaaagacaggacaattgatcgccggaagagagtaatattagccatggatgctgcatttggcatggagtatttgcatgggaagaatatagtccattttgacctgaaatgtgagaatctactggtgaacatgagggatccgcagcgaccaatttgcaagatcggtgatcttggactgtcaaaggttaaacagcatactttggtatctggtggtgttagaggaaccttaccatggatggcaccagagcttctgagtgggaaaagtaatatggtgtcagacaagattgatgtctattcgtttggaattgtcatgtgggagttgcttactggggaagagccatactctggcatgcgtgctgctgaaattattgtaacattggacaaaccaatgacaagttggtagatgtggatttgcc

SEQ ID NO: 34211 - DNA, 1868 bp, Zea Mays
taatcattaagggcataaatatcttgaagaaatatatttttggaacacaggttaatcacttgaataaacaacataaaaatatgcccaactaatttgaactctcccgtgtttactgcatacagttgacattgacaggttgacaggtgcccctcaggccctcagcaaacatcactgccatgttcatggcagctaagcattaaatcttctaacgggggttggatttttcaatgtctggatttttctctgagaaaatgaaaagttgggacaagcaatacaaacaaggacatactctacttatcggtgacagaactattagaaaagacataacaccggctttcatccagagccattctgaattataaacaaatatgtggcaagtaaaagcgtagctgaggtttcagcaatcatgttaaacaaattattctcctctgatcacattgccaagtgaacacaacttccattccctactctacagccattcgacgccaaatttgttagaacaggacagcaattgattaaggcattcagttaagaaacggtaaatgaacactatcattgtccatttcgacgagagaatatatacgaccctacagttaaaaccacagaatattttcttctctgtgaagttcgaggatgaaggtctatccaacattgtgaccatcaattgctcccaaactaatacgtcataccagttcagttctcgcctaatcactagttagattagaaacgctgaactgatacagtaattgtaaaaacgccagctatcatttatctctgacactacaggagcacttaaaagcccctgaatgtccaccgtatgactaactaaaggtcatcaacaaccgactgcatttatgccttctgactagtgcaaaaaagagttgttgccagccaaaaaaagagagagagagagctgatattcgtctcatttctcgcaaaattcatcacacaacatccttctttccccttttcctttcctccctcgaggattgagctgataaaaattcaggcagacaaggatagctgtgaacaagaagataaaatgttcactaaccgtattccgtatccgtctacgaaatcgtcagaactcggaacgaataaaagaaatcacgatagagacattacgcctgcatcaatcaatcccacgcgaccgtccataacacctggaccatccctggcgttgttcttgccccctttgcgaaaatccactataagaaacaaggcaaaaagtgtcggccaaaaaaactacactcttactgaaataagtcgacattattaaaatggacgatcttattcgtcgattaagccccgacactctttaagtaaaaaacactcctccgacactctttaagtaaaaaacactccttcaacgttttcgtgtagtgatcgcgacacgacaaataaacccccaccatgaaacggcaatcatcacgcgtccacaccgcctcagagaacagaggcacgggcgaccaaaaccacatcaagaacaaagcacgtagcggcgcgatacacatgcagtgaatcgctctcgaaagaaagatcacggtttactgaaagctgaccccattcagggggggggggggggggggggggggagaaccagagcggacacttaccagtgagacggggagttagatgagggcagcagtgaaacttccgttgccgggagtggaggacgatgagagatagcgtatgtgtgtgtctcagtgtctgtggaggtgtgactcaggtgagacctgagaagaggagaggagaggagaggtcgagactcgagagaacgggaggcggcggtttggggctttgcgcggagaaggaaaaggagtggctttttcggtattgcttgccgggggcgaagattggaggacgcg

SEQ ID NO: 34212 - DNA, 218 bp, Zea Mays
tagaaaccacctaattaacaaagcagctttgaaagcaaaaaaaacaactcaagaatcgagggagctatcttccgaagaaatactatggcgtaccagactcaagaacacctcatggcgttggccatcattgaaagaacaagaaaacatacgcctctagaataacaaacctcagacttggggacgcgaaaaacaagattctttcatgccaaggtgaacgg

SEQ ID NO: 34213 - DNA, 1787 bp, Zea Mays
gtcggcctgcttccagtttaccgcagcggggcgactgacgcgcctccgacgacacgccaggtccggcatccatgggcgccgcggcggccgacctcgaggcgcgtcagctccgcatcctcggccgtatttctgacctcgagctcgccgcgcagcagcaccgcctcggggcgctctccatctccaccgcgccctcagagaaaggcgaggccgacgcgggggctaccgaggttcatctcgcagccctcctggccgcgcgcggcgtgcgggacttcgccttccgtcgcgttcccgccgactactacgaccgctccctcgaggagcggcgcgacctgctccgagccgactcagtcgcccagctctgcaagagtatcgtcatggtgaacacccaagctgctgcagatgttgttgattgcagtaatccaaagaattcaaaatactatgtcgttgttgttcagtatatggcacggcttaacgctgaaaacatcaagaacttcctgtatgaactaaatgagaagcaaataccgaaaaagagatttaacatgaggttggcaccagaagaggagtcacacaagcttactgggtttgtgcataacgctgtcacttgcatcgggatggaaacaaacataccggtcatcatagatgaagctatcaccaaattggatgaggatttcttctggttgggtggcggagaagttgacctcaagctcgggatgcgaacctcacaattcttaagtgtctttagtccattcgtggtgaaatgcagctgatgatagccgtgcagcctaagagaagcttctgattcatttatttctaccgagcctccatgcatccatcacatggagatcctctgttctgtgccactccgaacgccattcctgcgcagactgttttttgcgccgccgctaattccaggtggtgttccggcgctcatccagtagaagccgccattcctgcgcagactgttttttgcatcgaccaggattgctgccttcatttcaggatggtgtatggaagtaggagatcaaaaaggcaccaagaagatgatgagattgatgatgaccttcagcacattggtttttatgctaggtgaataccggaagaggaagaatgaagatcaacgtaaaaagcgtcgaggtttggtttttggacatgaggtatatgatcgtagtagaggagagcatgatttaaaattattcaatgactactttgctgagcgtccaacatatcctgggaagtatttccgacgacgctttcggatgagtcatcctcttttcttgcggatagctgaagctgttaaacaacatgatcactattttgctcagaaaaaaaaatgctgtcggtgctcttgggttttcttgtcttcaaaaggtgactgcagcttttagacagcttgcttatggtgttccagcagattacgttgacgagtatttgtggattggagaaagcacgactatcgagagcctacgaaaatttgtcagggcagtgtgtgaggtttttggaccagagtatttgagacctccaaatgaaaatgatatagctaggttgcttactattggtgaacaacgtggatttcctggaatgattggtagtgtcgattgtatgcattggaagtggaaaaattgtcctacaacttatcaaggcatgtattgtggtcatgtgaaagaaccaactattgtactagaggctgtggcgtctaccgatttatggatatggcatgcattctttggtctaccggggtctttcaatgatattaatgtcttgcacagattccatctttttgatagact

SEQ ID NO: 34214 - DNA, 2171 bp, Zea Mays
gtcatgtttgcaaaattctctgtgatgatgtgaacgaaggtctgaaaaaatcacagaactcactcgaacgacggtgccgccgcttgcctcgccggaccatggccgctgtgccgtcggggttcctcctcatcactggcccgccgggcgtggggaagacgacgctggtcatgcgggtgtttgaaaccctcagaggctcccacccgaacctcaacattcgcggattctatacccgagaggtgagagagggcggagaaaggatagggttcgaggttgtcacgctcgacggtagaactggaccactttcctcatgcaaggtttccagtgcaagtccatcgggatggaggctcaaaacgagggcaagcaatggacataaactttctaaagcctgccttctcaccaaacgcaaaaggaagttcatcttgtatgaccatttcattaaaagcttgtctaagcaactcaggatcataccttcatgcgctaacaccttgtccatcagtagcttgcaaagtaccttgcttattgtccttgttcagtttatggggattgcgcttacatgtattaaagtgctttcgcattctagatgtaccattggttgttgtatcagcccaaatattatggctgcaatacttgcactgtcccttctttaccatgttgtttgcatcctttattttgatgaaatgctaccacatttcggaacggggagccatcactttcctttcacttcctttgttttctccatcactaacttgaacaacctcaacagaaccacctgtatctcccacatttgaagcacaagcaccatcaacaacaggtttcagtgcagatgacatctacaaaagaataaaatgggcaacacatgatacacatcaacaatcatgtacatagaaccgaatccgaatttattatttcggttttctggattcattacctgtacctgatacccgtttttttggttctttcggtttcagtctcggttttttcggtatttggatctcggtttttatgcccagtcctaatagcagctagttaatatgtgagattaatacagtgttgcgtccacatattcttgcctttttgccattctaatattttttagctatcctagttctgcatggttgtcattgcttatttccacaatgctaccttgacataaaaaacgtggtcgggagggaatgaccgccctcccggtataatactaagaagagagcaaaacattagtcccgactaagaaaatctccaaagtctggcctcccatcactaacggcccgacgtcaaccgtccactgtgcaacggtccaaccggagggtggcgcataggacatcgtaaccagagagcggatgaggcataacgaggggattttttttaaccaagccggaaaattcgccgtgagggaatcgaacccggttcttggatgtttgatgaatttaagagtttttgtaacctagatatcctcacacataccattaccttttggttcttttgcagcccggagtctgttagatggcctaccgtcgggaaatacaaagtagacgtagcatccttggaatcattagcagtacctgagctgcaggttaaggaagaaacagatctcttcatcattgacgaagtgggtaaaatggagctgttcagttcagcatttttccctgcggtaatgagagttattgaatccaatataccagtgttggccaccatacccattcctaggcagggccgggacattccaggagttgcgaggttgcggaatcatcctggagcagctgttttcaccttagacactggtaacagagatacgatgagagatactatatgcagtcagctaaggagtttgttgcagaggtgatctgctaacctccctgtgtctatgtagccactgctttttttgacataagataacaagcaaacgatcaagagtagaagttttctctcagaacctcgagtatctgttttcaagtttagctctgaatggatgataagcatgtcgttcagtttgttcttagttccgtatgtggttattcaatcatgtatttgcattcggtgggggcaaggttttattgccacaataactctcgcttgtatggatgcggttagcatgtagtgactctacaacaggtatcacatgatttgcacaactaatttgctaataggccattattgcctgaatcctacgggcc

SEQ ID NO: 34215 - DNA, 2262 bp, Zea Mays
atgtgcactcgataagttttcctggtgtccggtccggctacccctgttccctctcgcagtcgcagacttctcttctcgccaaaccctaatcctgctcctgcctttctcgtctccaaccgttggccgagcagtagcggtggcgatggagggcaaggaagaaggtcggatcttcgtgggcggcctgtcgtggcaaacggacgagcgcaagcttgaggacgcctttggccgcttcggcaaggtcgtcgacgcccaggaccaatgctgggtgctggagcagaaaattgatgctagcctcaccagtgtggaccctttcagccagctccatgcgatgcattgcagttttgggaagacaaactgggtaactaggagcccagcttaccagcagctcagacttccactgttgttaccatggaaatgcaagtcgtttggctttaggtttgtgcattggtttaaatgatctggtatgcaaactagagaatatggcagtggacatacctgctacattgtcctgtcaccagaatatgctgacatttttgagaagttagttcatgtcggtaacggtaaaattggttccttgttggaaatagcccagttctccaaaacatggttcccagaggctctatagctttgctccttgtccgtgttaacgagctttgctgtcttgggactagactttttcatgaaggtagttacagctagatgcatctgtgtcaggattatgatttgttcttgaattaccgagatccaggaataacctaatctcagtgcttctcttctgagatcatggtggagagacacactaaccgccacaggggctttggcttcgtgacatttgaagatcggagggcagttgacagcgctattaaagagatgcatggccaagaaatagatggccgtaccatctcagtgaacaaggctgagcctaagatgaatacagatgacacaaggtatgccggtggtggtggacgaggagagtatcgtggtggtagaggtgatggtccaccccctggcaattgctttgagtgtggtcgtcctggtcattgggtccgtgactgccctagtgctgctggcggtcgttctggcaggttcccatccaagttcagtggtggcagtggcgttggcaggggagaccgcttttctggttcagataggtttggtgatcgttacatggatgatcgttatgatggtggtcgctatgggtaccgtgatcaagctgatgcaagggacaggtatgctggtggccgagatcgctatgccaatgaccgttacccatctggtggcgatcactttggtggagacaggtatggaggtggtccggattgttatgtgccaagtggttatggtagggagcgagaaagaagctacgagagagatggagttcgtggtggtggtggcggcggcggcggctatgataggagtggcccaaggggtggtggtgggtatgacagggatggtccacgcggcggtggaggaagtgcacgctatgatggaggaaattacagggagaggcctgggccatatgatcgccctagcaggggaggacgttttgatgatcgctactgatgaactgcctgtagactcaagctccttgtcttggtagtttaatgtttgcagttttgcatggccgaatgcttaatgggctatggaagatgcttaatttatccctcttcggcactttaatgtctgctctttatttcaaccagtactggggcactggtttgccttgataagtttatccagctgacagtttttgcatgagatgagtcatgctctgggctattaccctgcctgttggatatttcagtagctgaggtttgcagtgatcgattgtcattgttgatctgaatatctggtatgcgtggactatgtttaaagtgattgcctgtcatcattggtctatatagttggtgagcatatatatgttcagtgtcggtgcttgtcattgttgttggtctggatatctaggcttgcaaggatatatttgcagggctgagttgcaagggcttaacagaacaatagccaaagtaccttatattttagtagctggagaccatgttaattatgctataattagctggagaccatgtaaatttagcttagtttttgtcggcggtctgacttttggtgggattttatcttgaacaaacaccgtccctgacatttaagagtgtagagccgactaacagtagtcaatctctatttcacatttgtctaggatcgacttcgcacttgagaaaaacgattatattgataagaaaggaa

SEQ ID NO: 34216 - DNA, 3424 bp, Zea Mays
atggcgggtgccggtgcgatgggcttcccacgggagctgatggttcagcgtatacagagcttagtggaggaggggttctgggacgcgctccgccgccacaagctcgacgtcctcggcaccgacgactcccccatcccaatcaccggttattatactccgcgccagcgtcgcccgatggcaagcttcttcaacctacggtccggatcattggtgccaccatctcacagttctgttggcgacaggaacaattgcccagttccagggaccctcataaacactaataacatgaggggatttgaaaacctagatagagaacaacttctgaaagcagaagcaaagaagatcttgcatgacattgtgtctggtaaagtagaagaggatccttctgttctacttagattccttgtgacatcatttgctgatttgaagaattggaaggtctattacaatgttgcattcccctcattggttttcaactcaagaatcaccttgctcagcctgcaacctgcctcaaaagtgctcaccaaagaagaggcagcatccatgtatacatcattgcaaaagtggcgtacttctagtgaaacaacagttattccattctttctggttagtatatcctcagattcctctgcctctataagacaacttaaggaatggaaagcttgccaggggaactatcaaaagctgctatttggattttatgaccatggatgccgctcagattgccctggctgggttcttagaaactatgttgcctttctgagcatccgatggaagattgagaaagcccagattttctgctaccgtgaatataaagggaaccctgatctagaacagtccctcattggtgaagcatcatttccatcaccttatggttgggataaccctgaatttctacctgatgctattggatgggaaggagtaaagccagggaagggaacaaaagaaatgaaaccaaaagaaatagatcttcaatcaatgaatccagcaaggatgaagaaaaacaattgatgcacttaaagcttatggggtggcgccactttcctgtgaatatagacaggttatcacatgttcgagttcttctcttgggtgctggaactcttggatgcgaagttgctcgccttcttatgacctggggtgtacggaaactaacggttgttgatagtggtagtgttgttatgtctgaccttgccaagcaatcactctacatagataaggattgtggagttccaagagtatctgcaatagctccacatctgaaagaaagatgtcctgcagtggaggttgaaagcatccaactggaaataccgatgcctgggcatcctgtttcttccagcaaaatggcaagtgtgcttgatgactgcaagcatctgcaaaccttagtggctgccaatgatgcaatcttcttgttaactgacacatgggagagcaggtggcttccaactcttctctgttcaagtgaaaacaagattgctattagtgcattattaggacatgacagttaccttgtcatgcgacatggtgctggaccaggaacaagtgggggtacagatgaagtgactactcagaaattgtccacagaaaatgctcttggtcatcaaagattgggctgttgtttctgcaatgataccgcttcccttattaatccaatttcttatgaaacactacctggacttacctcagttgcatctggcaaagcagtggagctctttgctaggatgttacatcatcctgacgagatacgggccccaggcgatactgctggtacagaaacagaacatcaacttggtctattgccacatcagctacgaggatcactccccaagtgtgatttatttgtggagctcaacaattcctcagtcaactgtactgcatgttctgttgctgtattgtcggagtatagaagaagaggattggattttgtcatgcaggctatcaactatccagcatatctgaaagattttacaggcatttctgattcgaaaagaccagatacttgtcctaaaataccgcccaacatctctgtaaattcagacaagatttctgatgtccgatgtctactattgggtgctggaactcttggatgtgatgtcgctcgcattcttatggactgtggtgtacggaagataacagtagttgatagtggtcatgtagttgtgtcaaatttagcgagacaatcactctatacttctgatgaccgtggtgctccaaaagcaactgcaatacttaggcatctagtggagagatgtccttcagtggatgcacaaggcattaaaatggaaatacctatgcctgggcatcctgtgtctcctggtgaagcagcgggtgtgctccaagattgcgagcgccttaaggaattggtgttgtcccacgatgctatcttcttgttgaccgacacaagagaaagcaggtggcttccaactctcctatgcactaacgaaaacaagattgctatcactgcagcattagggtatgatagttaccttgtcatgcgacatggggctggccctggcataagctgtgaagcttccagtgtggtcactgccatagacaagatgtccacggaggatgcccttgggcgtcaaaggctggggtgttatttctgcaatgacgtcattgctcctgtcgactcagtttccaatcggacactggatcaacaatgtacagtgacacgaccggggttggcctctattgcatcaggacgcgctgcagacctcttcagaagaatgttacaccatcctgatgggatacatgctccaggagagattgctggtacaggcagtggtcatgagcacggccttttacctcaccagatgcgtggatcactatcgcagtacaacatattaaccctgttgggctattcctcgagtaattgcacggcatgctcccatgcggtattgtatcaatatcggaggagagggatggatttcgtgatgcaagtaatcaatgaaccaacctatttggaagacctgaccggcctcacggagttgatgaaatccgcgtcttgctcacaggtcgagtgggtagatgaaattgatgaagacgatttcgtcgaggtctgatatgttacatggttttgacgactggtagatagtatcattctttacaacatggtaaagagatgacgaagcaatcaaagcaaccaccctatatatttgtaactcgctgctagctttttactctgtccgtcttaaaatgtaattcgttttaggctaaacctacattcattaatctgctccgtctcaaaatgtaattcattttaggctaaacctacattcattaatcaggtactcgtgaatgtagcttgaatgtatgtctacatttataatcattcaaataatttgaatgtggacttaaaaaaaagagggatatatattttgatacggggtgattatatatttgtaacgtacaaaaacaagtctag

SEQ ID NO: 34217 - DNA, 2248 bp, Zea Mays
tggattactactacccaccattttgcaccattactcaagaggtcaagatgaccccggagaaagtcagcgtaagcattgccatgagcccccctatacttctgatagactactcacgcgcaaaaccattaaatggggcagcagtggtgcgcgttgaagcaccctcatttatgaagaaccatgcccccattgacctagtcacacttatcaatattaaccaaagcatgagctggccagcagcatcgcaaacagagatgccatctaggttggatctactgaaaaatgccatgaagttcataataaggcagcttggtgatgatgaccgcgttgccattgtagcattcaacgatcaggtcatcaaagagtataccactggcattttagaaatatccggcagtggtcggatggctatcgaaaaaaaggtggatgggcttgtggctaagggtgacactgcttttaaaccaagcttggagcatgctgtgaagctcctggatgacagagcagataagaagcgtgcaggcttcatcgttctcatttcggatggtctagacggccagttcaaatggggagatgagagtatcacccccacggatcccatccgaggcctcctccgaaagtacccagtccacacctttggtttgggcaaggctcacgacccaagggcactgcactatatcgctaacatatcctacggaatctattcctccatcaccgacaacctcgagaacaagatcatagaggcatttgccgtctgcttagctgggttcaagaccgtagtagccgtcgacgtctgtgttgacatcaggtcaagcagtttgctgataacaaagatcgactctgggggttacatactccgggggagtaccggaggcatcttggttggcacactctatgctggggaggtgaaggacttcattgtctacttttcatatcataccgggagttggtcgagtggttaccatacaactttgaatgggattgctgctagtgtcacgtacaaggaagcgccgggcaggcagtcaactgccactgactcttgctcagtgtcactcccgattcacgtgaccgacaccgtgtatcctcctgaaaacccctgcccaccctaccccatggtcctgcagcagatggtccggttgaaggtgctagacttgcttataagcgtcctgaaagaattcctggtcctgaagggggaggctgctagtgccgtccacgggaaggaaggaggagatgacccggtcttgcaggccatcgcagcgagcttgctgcagaggaagtggaaagagttcaagcagtccgatgaatcctggaaagaagccccgaggaacttcgttaacctgggaggcatcgacgaggacatcagcgccatggtgggtatcctgaagcggggcttgggtgttggatgcatccactcatggctgtcgagctatcagatgcagcgcgcgacaattacaggcttgccaggatctcacatggttgcaaccggccaattccgcacgccagcgatgaacgcaatggtccaggaggcccataggcatttggccaaggaagcatctgcccaagatgcggggacgtcaattgtctgcaagcgcgccgttgagcttctagatggggtcaacaagcgattcgacctctggtgcaagctggaccatgacttgccgcgcactaaccaaccgtcatcgcaccaagaagaaggccatgagtcccgcgacatcaccgacgtcctgcatgggaacatcaaccgagcgaggcagcatgacatatacatggctgccgatcacgcgatcaagcaatggcggagcttcctcacatccgtggagaagacacatggccatgggccggacaagtaggcgcatgatgaggccaccggcagctaccacaaaccccagaacacagcgtgagtggtgttgtgtcgatgcagactcagacatactacaccatataaataaataaatttaatgagcgagaggccctgacaccagtgcctccgccgactccctccgatcctgagaataatatttgtgcgtactgtccctccgtcctcatggccattatattggtcatttgatttcccgtgtgttcactacttttgttctctaattactagtcctgatcagttccggacgactaagctgtaataatgtatcttttattttcttttttatattaatataaaagaccatatgtgtatgcgtcggtcaactctgttgtacggtgccatgcagtatggatgtgtttttggactataaatgca

SEQ ID NO: 34218 - DNA, 1568 bp, Zea Mays
atagaaaatgatattttatagtggtagtggggtataggggagtatttagggggaaccgctgcgggagaagaaaaaataggggggaaaagtgatatagggggaaaaatttaggggtaactgttgcggatagcctcaggcagcgttcctcgctgctgttaagtcaggctccactccagtgtcccgttttgggcctcaggcctccttttgtgcaatccagacgtcgtggtccaaacgcggatcggcggtgccgacggccgggaacccccctcgcgattaacgcccgagcgagatcgctatccgtggaccgtggttgtcgccgtcctcgtcggttcgtccccatcgcacaccctactcccccggtcgtcagccctcagcactcatccggtcatccccaaaccccagaaacctccttggaaccaactgaagatgcccgaccagacgtcggctgcggccgcgggcggcgcggcgttcgaccgttgcctgctggcgctgtacctcatcagcccgctcactgttctggcgctccgcttcatctccgcgccgtacggcaagctatcccggccgggctggggccccgtcctaccggccccactcgcgtggttcctcatggagagccccaccctctggctcccaccgctcgtcctcctccgctggccgccgccgccgctctccggcccactcgccgcactccccgccgcgctctacgcgttccactacgtccaccgcacgctggtccacccgctccgcctcgcccgcctgcgccgcgccccggcccccgtgccgctcctcatcgccgcctgcgccttgggattcaatatcctcaacgcctacctacaggcccgctccttcgccctccacgccggccgccaggcgtcccccttccgctgcctcgctgggctggccctcttcgcgtggggaatgcggacgaacatcgcggcggacaaggagctgctgcggctcaaggaggccggaggcgggtacaagatcccgaggggcgggtggttcgacctcgtcaccagccccaattacttcggcgagacggtggagtggctgggcttcgccgtggtggcgtggacgcccgcggcctgggcgttcttcctctacacctgcgccaacctcgggccgagggccagggaccaccgccgctggtgatggccgtggtttcggttcgttcttcttggccgccttatcttccttcgcggcggagcagaagcaggagagcaggctgagtttgcccatgtttcgactcgacgagaaggcgagtagacgacagagaacctgcgatgcgattagctgcgcgagactgcaacctgttgaatctaatgttcttactattgctgctgtcgatgattttatagatgtacaggcagagttgaatataaagccggctgaggcataacctggttactctcgtgtttgtactatgttccgactcgaacaggattgactcaagtctaatgtattgggcatggacagaatctctaattggagggttatttgacttggcgtagatactccaaccaaagatccacgtagtcgtactcactccggtaaggccacccgcgcgc

SEQ ID NO: 34219 - DNA, 666 bp, Zea Mays
tgggggtatccctaattatggtacctgacataactcaccagcatccaagcgattagaaatttcacgcgaatgacgatgacttcctgcttcaagatttttagcaaacacccaacgatagcgaagggcggaccggcgaggcaaggacacagatactgctccggcgtcctgctaatgcaccacaacgatgcaatatctgagacaacaacgaggttgatgcaggagcaagctcgtgcgtcaagctagggagtcatcggtgagcgaggcgactagcaccagcacggccgaccgacgagcaaggtcaaaatccgagcgccatgggagatggggttcggcgattcaacgttggttgcgaagagatgaaccagagcgcgagcttgagggatgcgacaggggaagacggagcacagccatggagaggaacctcgagggagctgtgcgcgtccatgacgagctaggcgtcgagcacagggaggactgggagcaagggtgcgacggccagttgccatgaccaagcagagaatggcggttgtcgggtcagcgaccacgcactccatgttgtcgcccaagaccgccagcagcttgccgtcgagactcaccgacgtgcttttgacggaccacgggaaggtgagctgcgtgagaaggctgggaggataaatactaaaggcg

SEQ ID NO: 34220 - DNA, 1421 bp, Zea Mays
atggccggccggggcgcctccccggccgcggcggccgccgtccaggtgcgctgcgccggctgccgcggcgtgctcgccgtggctcccggcatgaccgagttcatctgccccaagtgtcgcatggcgcagcgcctcccgccggagctcatgccgccctccccgcccaaggcctccccgactccgcctccctcaggtccaactccgcctccaccacctccaccttcgctgccgcctccgcctccgcctccgcctcagccagtgccgcaccctctgacccgccgctccgctccccgggcgcagggcgtggaccccaccaagatccagctcccctgcgcgcgctgcaaggccgtcctcaacgtgccccacggcctcgatcgcttccgctgcccgcagtgcggcgtcgacctcgctgttgacttgtccaagctccgccatttccttgcatctgctggcccaggcttttttccgcccccactcccacctcccccacccccgcaacccccagtgccaatgcctcatctgccctttctgccgatgatgccacgccttccattgcccatgctgccgatgctctctcctgctgagctaccggaggagatcaatgagaggcatcatcatcatcttccaactggagctagagcaggtttcttcatcggtgatggggctggtgttggtaaaggacgtaccgttgctggattgatctgggaaaattggcagcagggaaggcataaagctttgtggatatcaattggttcagacctgaaatatgacgctcgcagagatctggatgatgttggtgcaaaatgtgtggaagtgcacgctttaaataagcttccatattctaagctagactctaaaacctttgggatcacagatggagttgtttttgtaacttatagcagcttgatagcatcctctgagaaccgttcccgtttgcaacagttggtacagtggtgcgggtctgagtttgatggtcttctggtgttcgacgagtgccacaaggccaaaaatctgattcctgaggcagggagccagcccacccgcactggatatgttacctcaagcacgggttgtttattgttcagcgactggtgcatctgagcctcgaaatttaggttatatggttcggcttggtctctggggagatggaacatcgtttgagaatttcaaccaatttttaggtgctcttgagaaaggaggtgtgggtgctcttgaacttgttgctatggacatgaaagccaggggaatgtatgtttgccgtactctaagttacaagggtgctaactttgatatcctagaatcacttctggaggaaagaatgatggatatttttgttagtatgattgctcattgacatgaagtagtattcttttaaatttaattaacttggcgagaacaaagtggtagaaactgaaaggaga

SEQ ID NO: 34221 - DNA, 1061 bp, Zea Mays
gtcgatttttttttccagctccacttgagtcatgtgacgagaagatttgcagctagtatatcagaacggtggatttgggcccgagtgatagcgccggaggaagcgtgctccgtgtgggccctccctccggagcccgcccgcgaccgtttctgccgcatggaggaccgccgccgcgtgcggcgttagtcggccgggcggccccgccttccagttccagccgcttggaagccgtcgaggtactccccgccggcgtccaaccttacacagtccgtgttacggggcttgcccgtggcagcttcttctaccagtgcgtgtgcgtctacctccttctggagcccacccccgaggaggtgggagcgagcgatcactgctgtgccgacttcggttataggagaaaaactcactcttatatggagactttacagatgatgatgatgaattgatgaggaggcaaagaagaagatagatgagctgatcaaggatatctgtggaatagagtttgatatcactgagcttgtgctttatagaaggatgccatagatataagcttggagtcatgggaattggtggaggtgtgccatcttgagaagaagtgattagtttcctctccaaggtgattctgcttgtagtgttatggagtccagcaggaggcaaacatgcccgcatgatgctgaagccgaaggagcggtgcgctccgtactcctcggtcaatattaaacatgagaaaagaagaagcatatcttccccggagataacaaaaaaatgttcgcaaaaggcacgcgatccaatacgagaacactcggaacactgcttttgtatatctttactgagtggacgatattcgcctgcccttgtgattctctgttttgctcgaatggaatggaatgtacatagcctggtgtaggttttcttgcacatgctggtcgtctagatagccatcgtcaggatcatgtgtcgctggacttgtaatgaaagtatatgattttactggagtaacaatgcctcctctcgtaatggaagtatatgtaatgtaatccgctggtgttgtttgccagcattcc

SEQ ID NO: 34222 - DNA, 201 bp, Zea Mays
tgtttttcaggttttaaccttgtgctgttgttgatggtgttaagtgccggtgggctcggccttcttataagtctcagtaactcttctatacttcttattgaggatggtctcttgagctagcatatatttcaaacttatacttttgcaatcacttcgataaaataatgtaaaatttttgtaacttgtaaaatttggtaataa

SEQ ID NO: 34223 - DNA, 3468 bp, Zea Mays
cgctcttttgactgaggcggagcccagcccagagcccaccgtgagctcaacgacgcccacgcccggtgccggtgcaaaccaaacgccaactccaatctccaactccaagagcgaagaaaccaatacccaaacccaaaggttcgtccgcattgtcggccagccagctcccactccactgcccgttccgttctgcgctcgtcatcgtcggggccggccgggcaagccatcagcggccgtgatggtgatggcgccggcgattctgctggcagtgctagtgctcgcggcggtggcagcggcgacggcgtcggcgttcgccgtggcgtccaacaacgcgacggtggtggccgggaagctgaacgtgcacctggtgcctcactcccacgacgacgtcgggtggctcaagaccgtcgaccagtactatgtcggctccaacaacagcatccagggcgcgtgcgtgatgaacaccctcgactccgtggtggacgcgctcgccagggatcccgcccgcaagttcgtcgtcgtcgagcaggctttcttccaaaggtggtgggccgagaaaagccccacaatccaggacatagtccacaaactggttgattccggacagctagagttcataaatggtgggtggtgtatgcacgatgaagctgccgtgcattacattgacatgattgatcagaccacgcttggtcaccggatgatcaagaaacagttcaataagactccaagagctggctggcaaattgatccttttggtcactctgcagtgcaagcttatttgcttggagcagagcttggttttgattctgtacatttcgcaagaattgattaccaagatagggcaacacggaaagcagacaaaggcctagaggttatatggcgtggctcaagaactttcggctcatcttcacagatcttcacgaatgcctttcctgtccattatagcccaccagatggctttggcttcgaagttttggatgaaaatatcatacctgttcaggatgacctgtcactttttgactacaatgtccaagaacgtgtagatgattttgttgctgcagccttagcacaggcaaatgttacacgtacagaccacataatgtggaccatgggggatgattttaactaccagtacgctgaatcctggttccggaatatggacaaacttatccaacatgtgaacaaggacggcagagtgcatgcgttgtattctactccgtctatctacacagatgctaagcatgcatcgaatgaatcttggccagtaaaatatgacgactatttcccctacgctgattcaacgaatgcatactggactgggtactttacgagccgtccaactttcaagcgatatgttcgagtacacagcggatactacttggctgcacgtcagatagagtttttggtgggcggtaggagctccttgggattgttcacttccagcttggaagatgcgatggggattgcccagcatcacgatgcagtctcaggtactgcgaaacagcacacgactgatgactacgcgaaacggcttgcgctgggagcagcaaaggttgaaaaaggtgtaaacaccgctctggcttgtctgaccagctccaacgggacatgtggatcctctgttgtaaaatttagtcaggttgtagttgtttacaatcctcttggatgggaacgtagtgacttcataagagttcctgtcaatgatcaaaacctagttgtaaaaggctctgatggaaatattgttgagtcacagctagttgaggttgataatgtgacgagaaatttaagaaagttttatgtgaaggcttatcttggaatcacaacacacaaggcccctaagtattggctactatttcaagcttctgtaccaccaatgggctggaattcctacttcatttcaaaatcaactggagcaggatacaacagtactgagcatgtctcggacgtggtttccccaagtaacagcacgattgaagttggaccaggacatctaaagatgtccttctcaaaagcatctggacaactcaataggatattcaattccatctcaggagtggatttaccagttcaacaaagctttctttggtacagatcaagtgagggtgatgcctcagactcacaggcatctggagcatatatatttcgaccagatggtaatacaccgactacggtttcatcctcggtgccactgaaagttatccgtggaccactggttgacgaagtgcatcagcaattcagctcatggatttatcagataacacgactctacaaaaacaaggagcatgctgaagttgaatacacgattgggccgatccctgtcgatgatgatgtagggaaggaggtcatcacacggctgacagcaaatatggtcacaaacagtacgttttatacagactccaatggaagggatttcctcaaaagggtgagaaactacagggaggactggaatcttcaagtaactcaaccagttgcaggaaattactatccggtgaacctaggagtgtatgtagcagatgaaaaatatgagctatctgtgcttgtggaccgtgctgtcggagcatcaagcattcaggatggtcagctagagattatgctacacaggcgtttacttaaggatgatggcaggggtgtcggagagccacttgacgaggtggtttgcgtggatcaagattgccaagggcttacggccaggggcaattactacgtcaatgtcgagaagctagggcatggagctcactggcgacgtacatatggccagcaagtctactcaccctttctccttgctttcactcatgaggatgagaccagctcgaaatcctacagcgtggccaaagctggtatgatgaatgccaactacagccttcctgataatgtcgccattgttactttgcagaatctagatgatggtaccacactactccgcttggcccatctctttcaagctgctgaggacccgagatattccaaggtggcaaaggttgatctgaaaaaggtgttcggaaagagaactatcaaggaattgacggagactagcctctccgcgaaccaaaagaagtcagacatgaagaagctcagctggagggtcattgggaacactgaaactggtcctgccgcagtaaaaggtggcccagttgacagtagggctctagtcgttgaactaggacccatggagatacgcaccttcttgctgaaattttagtggcagttgttcttttgtttgtaaacaaacaatagtccatagagtaatttctaccttttcattaacgtgcccaaatcttagttcaaataggatcaaatacttgggcaatggaggtgcacacccacaccaagtttgttcatgtaataatagctacatgtcgggaaaaaaaaaaggaacggttgtggtgcttttcattgtgtaaagcgggtatttcttcctagcggataccgttatctgttgggctgattgggctgatctcgggtctggtttga

SEQ ID NO: 34224 - DNA, 300 bp, Zea Mays
taccttagaagtggtcctggcattcctgctttgtggtgtcactgttggttcagtgattttcatcaacattttgttgttggtattctcgaagcatggctagcctctgaagctggtagttaaggcatcacttttttgaagagtcccttgcatattgcttgttgtaacttgagagaccatgatcagtgttgattgtgatcctgctggtgacatttccataatctagctcaaccccctagctgatataaaacagatcaaccataaatcaaatataacatattgcaacaaacaattacacaatca

SEQ ID NO: 34225 - DNA, 2466 bp, Zea Mays
gtgtaggcccagcgtgtcagacactgaggctgttgcagccgtgattcccgagtcccgacgactcgcgcggtcgcgcccctcgccttctccgctggtcgactggtccggctggtcttccccctcggcatcgcactcgcacctcccaagcgtgcctgaatctcagacttgtccccccactgcctcggccatggctgtgcgagccacggtctcccgcttcccggccacgccggaggcgctggagtcgtgcgccgtccagtggggcgtcgccgtgacgcccttcgccgccgtcgacgagcgcggccagcccccgaccaccggcgccggcggggaccgcatcccacgctgcgagcactgctgggcgtacttgagcagccactgcgatctggagcgctggggctggacctgcgcgctctgcggcacgctcaacggattcgacgacgaggccgagcgacggttccagcgtcccgacgcctgccccgagctcaattcctctttcgttgacctcgagatcgcagtggatgaggcaggggctggaggagacggcgtgcaggcgctgcctgtttatgtggccgcagtggacctcgcatgctctgaagagttccttgaacttatcaagagtgcacttcttgcggccctagaagctcttattccgggctccttatttgggcttatgacattcagccacaagattgggttgtatgatgtccaaggtccgattccacttgtgaaaaatgtttttattcctccggacttggaagaagatggtctgcctgttgcccttgaagatgccatgcccctactttcttttttggctccagttgacacatgcaaggatcgaattgctgctgccctggagacactgcgacctacatcttcatgggagagaggggctgcttctgggcatgaagaggatgctgttttgcttggcggacgtggttttgggacagccatgtctgctttaattgagtacctaagttcaggatatggttctacttttgctttggataccgcttactaagtcgaccctacgcatttggttgtgttctaaggctgagaacatcttcagattttgaaccaggcaattcttatggacatttctttcctgaccctcagtatgaaagtgtgcaacacattatctgctgtgattcatttgccacttatgcatatgactttgagttttcccataacaacggtttctccaggcatacagatcctgctgttgtgcagatcgcttttcagtacagcgtgattgaacctgccaaggagacatcaggcgatggatcacaatcatctgcaagttataagttctctctaaagaggcggctgagaataagaacattgcagtaccgtccagctaggaatatcagtgaaatttatgacagtgtagatccagaggttgtactgcatatccttgttcataaggttattttagaatgcgtggataagggggttagagaaggcaggcatcaagttcatgcttggctatccctccttgcagcccggtataatcaggtcctgagttctgatgtgcgaactccactatcgagcatagacattgacttctcgcagtgcccgcagcttcaaacgatacctcaacttgtttttgcattgttgagaagtcctcttcttcgcttgcatgaagaaggtgtacacccagattacaggatatatctacaatgccttttcagtgcactggagccatcttctctagctaaagctatatatccggttttaatatcgtattcctcgcctgacaagcaagcattcccacgacacactctcagccgtgctgctctaatcatgagcgagagcccaatatttcttcttgacacatttaccaaccttatcgtttactattcctcaactgctgatccttcatttccttttcctccaccccgtgactgtcttttgagaacaacaatcaataaactgaagcaggacagatgtataaccccaaagcttacattcatccatggaggggaagatgattcaacattgtttgagagctatctcattgaagagcaagatgtcgatggatcaggtcttacaactggttcaggttttgtagccttccgtgagagcgttaggaatgttgcaggagagatcatccaggaagaaattggaagctagtttcagctagaagacccttttggtcccgctgcagagcgtataaactcggatgctttttaaccctaattaatatcgtagtagttaacttagatagccaaaatggagaaacaatgtcaaaataatatgaggggccacatgatttgtagttgcttctggcaataactgctttaggcttgattaatcagagaagcctttctggtacactggtaaaagggtcgagtacaccaatacaccgtgtgatcctggctgtctgattttttttggagaactcaaattttggtgtatattaatgctgctgtttattccgattaaattgaggccgttcgaaacctagag

SEQ ID NO: 34226 - DNA, 302 bp, Zea Mays
gtcggaggggggtggggtcatcgccatggtgctgaaggcagcagcgagggaggcactgtcccaaccaccggccggcggggaccaaggcgtcgaggtgtgggtccccgggggcaggagcgcgggcgaagcctggggcacgacggggacaccgtaaggaggcgcgccgtagtgaggtgcagtcaggagggccggcgccggaggacgggaggtactcggtgcctggcccggccacatggcgacggtcccggtccaggggttgtagaatgacggccacgcgtggccgccaccccggccggagggac

SEQ ID NO: 34227 - DNA, 1372 bp, Zea Mays
tgaatatttaaaggaactgatagagagggtaaatggcttccaactatgtggattcattcgtaactttcaagaaatggcagtcgctcactactaacagtttatctacagcctaatgaaattcgttggtagtgtccacttcatatgccataagttgaagagcataaatattctgaaagctcacggtaaaagcatcaaggatagttacatgctaaatggctatgcactaaagactaaacataggccgtgcaggcaatagtcctctgtctttttaaattttttggctcgaaattcattggtccaattttgacctcggaaaggtttgaacccgtcagggactaaagatgccaaaggtctggaagatgagtaggcggaacgtggttgcaatagatcctattcaagtgtactatgtggaagggatcttggagcagttggcgttcgtggaggagtcgaagcgcaaggaggactgggtcgtcaggaaccaggagcgcagggcggccaaacgcaatcgcatccgcgacgagcacaaggtcgttgtcaggcagcccaaggactcaccaccacgttccacaacagggagcgtgacatcctgcggatgaggacccacttcaaggttagcaagcagccgcccaatgaggcgctcgactccaggctctttgcaattcgcatccctggctccatggacttgcattcgcacattaggaaggtcttgaggaagctacgtctgatgatgattgtcaatcttgaggccacaatggagttattcgtggagcttcgagttattggaggtcgagctgtaaaaagctagcgttttttgcatattgtacacagtatcaggaggatgagccagaagcacaagaatgggctgatgagctatcccctgatgagcttgagcgcctcttgaatcatgaccatggttggttgattgccaacccccaccagttcaaggtccctagctggttcctcaacaggaaaaagtactacaaggatggtaggttctctcaggttgtttccaacgcccttgacaagaagctcagcttagggatgactctaggctgaagaagaccaggaaccactatggtctgtcactactggggtctacttgtccgtggccagcacaccaagactaccaaaaggcatggaaagactataggtgtgtcggagaatagataaagtcaatttggtgcctaccttggatatttattatctgtaggatagatgaaccgttctggtttatgaaacttttgttgcgtattccaagctggttgaattgaatgttcttaagaaccaatgtcattagaaaagttaaaagattcaataatttgaaatggttttaccacacgaatttggtatatcatagtgatgcttatcgttt

SEQ ID NO: 34228 - DNA, 688 bp, Zea Mays
ataaaaggcatgtaaatttggacttgaggtgcacttccagtcggcgtggcaggccaagccatggtctgcggtgcctgggtggtgggtccgccactgccagagatagtgagatgtagttcctcatttcataacttttatatttgtatgtcaggaaattgtggagaagcaagctcctggattgatgaaggaagctgagcggtttctaattctcagcaatattgataggctgtggaaagagcatctgcaggcactaaagtttgtccaacaagctgttggtttaaggggttatgcccaacgagatccccttattgagtataaacttgagggatataatcttttcttagacatgatggctcaaatcaggaggaatgttatttattctgtatatcagttcaaaccagtagtgaagaaccaagaaggggaagcatcccaaaaggtgtcaaaaaagaaactggacaaaggagctaacaaacttggtgctgcccaagctgcgtcatgatcttcctgtgagaaacgttgctggtgcttttagttgcagtggctgcagtctccacgtgtacaaagatggtctatactcgataccgtatgagaaatgtacttcatgcatggattagcatgaacaggcacgcagaattccgaatgtactagtagaagatatttgctggtagcagtgccaactgactagaat

SEQ ID NO: 34229 - DNA, 1907 bp, Zea Mays
acctcgaacgcgatggcggcgccgctcgcccctctcactgcggccgcggtgctccgcctcgggagccgaggcctgcgccaccgcatcctcctcgcttcgctccgcccctgctcctccgcaaccccgccccatcgttccgccctcccggccgctgcacgccgggccccgccgcctcctcgccgtttcgcccacactcttgccgcgtctgcggccacggccatctccgagggtcaggcggatttagtgcctggttcaacaacttcaaccaagggacgcatctaccacgagacgtatggttgccaaatgaatataaatgacatggagattgtgctttctatcatgaaaaatgaaggctatgatgaaattgtccctgatcctgagagtgcagagataatatttatcaacacctgtgccatccgggacaatgcagagcagaaagtctggcagcgtctcaactacttttggtttttgaaaagggaatggaaagctaatgttgctgaaggtagagcaaaatctatgcgtcctccaaagattgctgtcctggggtgcatggcagaacgactgaaggagaaaatactcgattctgataagatggttgatgttgtttgtggacctgatgcatatagggatttgcctaggttgcttcaggaagtcgattacggccacaagggcatgaacacacttctatcactcgaggaaacttatgctgatatcaccccagtaaggatctctgacaattcaattacggcatttgtgtcaatcatgagaggttgcaataatatgtgctcattctgcatagttcccttcactagaggtagggaaaggtctcgcccagtgtcttctattgtccgtgaggttggtgagctatggaaagttggtgtgaaggaggtaatgcttcttggtcagaatgtaaacagctataatgacacttctgaagtagaagagttggagcctggcaaaaattggcaactcagtgaaggattttccagcatgtgcaaggtgaagaatatggggctgcgttttgctgatctcctggatcgattatctttggaataccctgagatgcggttcagcacaaacaggcagtacagcggcgctggaacgaatgcggaggggttacactcgagaagcatacttagaacttgtccacaaaattcgtgatgtcattcctgatgttgggctaagcagtgatttcataactggcttttgtggagagacagaagacgagcacgccgagacccttagccttgtgagggctgttggatacgacatggcctacatgtttgcatacagcatgagagagaagacccacgctcaccggaactacgaggacgatgtacccgaaggtgtgaaacagaggcggctcatggaactgatcaacactttccgcgagaccacgaagaagaactacgactctcaagtcggcacagtgcagctcgttctcgtggaggggcccaacaagcgtgctcccaaaacggaagtgatagggaagactgatcggggccacaaggtgtcgtttgcccgcgtccctgtcccgcacacgttcgaaggcgaagaagcacgtgagccggcagtcggtgacttcgtcgaggtgagaattctcaggtcgtcgacagcaacgttgttcggggagccgattgcacgcacaagcctgagcgcgttccacagaaatgtttcacccggagcgcaggctgctgctgcgtgagtagcggttgaatttttggttgtggattgaaatatgtagtgatattttaaatgactagagtttttgatatagaggagaaactgagaacgtgcatgtcagcctcatgagccttggtcatttacttttttgataaggttgtattgccatgtaaaggtcaaacaatgttgacaaagttttttgcttgttactatgaagaaaaaaa

SEQ ID NO: 34230 - DNA, 2979 bp, Zea Mays
cagaaaccctttcttttgcgttgtactaaaccctagccgaccgcgtcacgccgccccccgccgccgccgaccgcgtcacgccgccccccgccgccgaccgcgtcacgccgtcccccgcagccgccgtcgccgaccgcgtcacgccgtcccccgccgccgaccgcgtcacgccgtgccccgccgccgccgaccgcatcacgccgtcccccgccgatgagtaatcgaccgcgtcacgctgccccccgccggttagcctcgtcgtctaccattcgccgtctcatacaggacggtgacctggccgtccccggctcctctgcggaggacgtcgcccacgctctccgcaaccaccgtcctgagctccgccgcaagaggctcaagcccttgacggaagccgtccgccgtgtactatcctctgactttgatgacgacgatgatgacgactccgcctcccgcggtcaccaaggtgcccacgccaccctctcctccaccacctctctctcggacgaatccgcccacccgccgcctccaccctatttcgatgccaccaagaccatgcttcgctcccagtatgcctcgcagacgtccaaacagaacccaggcactaaccagcagctggaaatcgagatgaccgctgagaaggctcgccgcctcatcacatctgattgtggaggcggaggtggcgatgccaagccagaggctccggtctccgaaggagtggtcaatggggacaagtggccgcgttttgctgatctcggcgggatggatcaggtgttagatcagcttgtggtagaagtggtggtgcccctgtgccatccggagctgccggattaccttggggttaggcctgttgctgggctactgctgtacggaccgccaggttgcgggaagaccacccttgcacatgccattgccaatgagactggtgtgccgttctacaagatctcagccccagatatcgtgtctggagtatctggaggttctgaagaaaacatcaggggcttatttcagaaggcatataggactgctccctcaattgtattcatagatgagatagatgcaattgcatccaagagggagaatctgcaacgagagatggagcgacgaatagttactcagctgatgacatgcatggatgaattccaccagaatattggtggtgatggttctgatgccgattcatctgaaaagaaaccaggttatgttattgtcattggagctacaaataggcctgatgctgtggatcaagctcttcgaaggccaggaagatttgatcgagagatatatcttggggttccagatgtgaattcaaggaaacagatactgatgatgcttgctcggaagcttcgacttgaagggcaatttgactttttaaagatagcaagggccacaccaggttttgttggtgctgacttgaaagcattagtcaataatgcagggtatctggcaatgaagagaataattaataaaagaagagctcagtattgttctgaggtaaaggtaaaatggtggaagcagctgtcttgggatgcaggcgagatggagagtgtacatgtcaccatgaacgactttgaggaagcaacaaaattggtccaaccctctttgaggagggaaggattttcttccattcctgatgtcacatgggatgatgttggaggtcttgattcgttgaggaaagagtttcaccgctacataagatgtattaagagccctgaagattgtgattgagaatgcaagatggcttcctgctgtttggacctccgggttgtggcaaaacactcatagcaaaagcagtggcacatgaggcaggggctaattttattcatattaaggggcctgatatattgaacaagtatgttggcgagagtgaatcagaaattaggaaaatattcaaccgagcacgtattaatgccccatgcattgtattttttgatgaggtagattcattgacaacaaaaagaggtaaagagggggggtggggttgttgaacgtctcctaaaccagttacttatcgaacttgatggtgctggtcagcgtaaaggtgtctacgtgataggagctacaaacagaattgatatgatagatgatgctatgctacggcctggtagattcgggaagaaacattatgtacctatacctggtgctcgcgaaagggtttcaatattaaaggcactagccagacgcatacccgtttcatcaaccgttgatttggatgtgttggcacttcgagaagagtgcagcaatttcactggcgccgacctagcatcactggtggatgaggcagccatgttagctatggcagagagatggatgtacctcgatagcaggacatcaacgagtccatcttctctgattgagccatcacactttgaagaagccttatcaaaggtgaagccatcaatatccaaaaagcaaaagagactttacgaaaaaatgcgcaagaaacacttgtcaacaacctgatcagatcaccatacatccatcttgtgtgtgtggcacaaactatgccatcgctacctatgaaaatggttctgccggcactgcagaatgctactataaatttgtgcattacaatcatgcttgaaatataatgataaaccgtatactccctctgtttttttacttgacattttttagttcaaaaacacactatccggcgtcaaatatataagattggaggtagtaccagacatgccgtggcttatttgtactgtcttcacctgctggaatttttgcacgtgagctaccaatgcatggcttgttagttgtgccgtgcttgttcatgatgtaggaaaaaactcgaatttaattccccacctattgtagcagtccgctttgtccgtgcatgtgcttgttaccatagttgtggcgtgcctgttcgtccagtagggggaagaagagtcagacgacgccgctgaatcaagcctgcgcttggaagaagtccaagctgaagcatgatgaggtccaggcgttggttgatgc

SEQ ID NO: 34231 - DNA, 1521 bp, Zea Mays
atgttgtattcgagagtgaattccacataccctatctcttccagtcttcctacgctcctgtcggcgcgtcctccgcatcccggtgaccggtgtgttctccgatttgaggggcgtccctcgcacgctccggtctgctgctcctccgccctccggagtccattccagcggagcgcgctacggcacagatcggccgccgtccatccctttcccagctctccagagcctccgctgccgcgtccgataactgcataaggccgagctcatgcaaaatggtgctatgccagggcgtatctgttggaaatgctcagttgctagcttttcctggtagatcatcaagccttaagagcacccagtttcttgttaaaacgaatcattttcctgcaagagctctacgtgttggtactgattctattcatcatgccatgcctacatcatccccaagggaaaattctgtcaggggaatcccatcactatcaagacagcacaatcagcatccaaggtccgttagttgtcaggcatcctcactggcatctttcagctaccctgagctgacatccaaacccagatggtggtggagaactctagcttgtgtgccgtacttgctgccactgcacaacatgtggtcttatgctgacgtgatctaccagctgcacacttatttgcaggggttttctctgttgtacaccttcatcgataccatgactctgtgtcctgggtggctctttctggtgatatttatgacagtgtacttcttcgttgtgaggcggaagtggtcgccgcactttctgaggttccatgtgatcctagcaatccttctggacactggctcccaagcagtggccaccatgtgtacatggatgccaagcatcgtttatcaggggaagccaatgcagtacctctggatgtctattgcattcatacagatcttcacagtgctcgagtgtttgcggtgtgctctttgtggaatgtatcctaatgtcccattcatatcccatactgctttcattcactctgatctaaatctgttcagataggtgtttataaggtccgggattcaagaagggtgattttttttgaaatggctacttatcataggaccagctggtacaatagcattcgaacaacactgcgattgatttttgttcctaagatgttattcaatgtacgttgactacctgcaaattttgttttgaggggcactacttgttttatccgaacttggttgagaacttgagatgaagctggaagttgagatgcattaaattgtgcattatatggtgacctgcagctctaagttgagaacttgagatgaagctggaacagaatggaggggttacgaagaaattttgagacttgtactgcctgtgaagtttactctttccatgaggactttgtgaatattttgcctaacaacagtttggtagagtttgggaaagaaacaacagttcattgaatggacatgtcccatctgagatatgattagctgactaatctcatcactagctgcattctatgaattaa

SEQ ID NO: 34232 - DNA, 3238 bp, Zea Mays
caccaccccattccccctcaccaaagcacagcacagcacaacacacagggctagaaaagagaagggagggaggagacgaccaaaagaaactggagaaaaagaaaagagctcaaaagctagtcgaggcctcctccgccccttttttttctccccctcccaatcgacacaggattcactcgcccgcccagttgtttcttttagtgccgcccccattccgctctgatccgagcctttcgctcaaagcctccagcttttccaattgtttggtcacttcgggaaccaaggaataagttcttgcgctgtgcgcgatagagagcctgatccatccttccccatatcctattcctgtggcatttcgctgcgcttgcgccctgtgcgtggccactgcaggggaaggattttggcctggtttctctcttcttggggttccaagttttcgggcgagatcttcgcctcaaggcggttccttgcttttctggtattggcgcggctcttgttgctcccctacaagtccaaggaaagaatttggaggccgtgggggggtcccttgcgaccggttctggtcgatttctcgggcagctccagctgaattcaagatgccgctgtgacccaccgctgcctggtttcttggaggaaggaaattttgcttcaattgggccgttgggcgtcgttgagctagacccctcctccagctcttgatccggtccatggggctctgccatggcaacccaagttcccgttctacctgccgagcccgctcccgccgtccagctacaagggctcgccggcaaactcgagcgtctcgtccaccccggcgcgcggcgggctcaagcgcccgttcccgccgccgtcgcctgccaagcacatccgcgctctcctcgcgcggcggcacggctcggtcaagcccaacgaggtgtccattcccgagggcggcgagccggagctcggcctggacaagagcttcggcttctccaagcacttcttcgctaagtacgacctcggcgaggagatcggccgcggccacttcggctacacgtgctccgccaaggccaagaagggcgagcacaagggccaggacgtcgccgtcaaagtcatccccaaggccaagatgacaacagctatcgccattgaagatgtgagaagagaagtgagaatactgagttctctgacaggtcacagtaacctagtgcagttctacgatgcttttgaggatgaagataacgtgtatatagttatggaattatgtaaaggaggtgaactgctggacaggatattggctaggggtggaaagtactctgaagaggatgcaaaggttgttatggtacaaattttgggtgtcgtatcattttgccatcttcaaggtgttgttcatcgtgatctgaagccggagaatttccttttctcttcaaaggacgaaaactctcccttgaaggtcatagattttggcctgtctgactttgtgaagccagacgaaagactaaatgatattgttggaagtgcatactacgttgctccagaggtgctccaccgatcttacggcactgaggcagatatgtggagcatcggagtaatcgcctacatcttgctatgcgggagccgacctttctgggcgcgcacggagtcaggaatcttccgggctgtcttgaaggcggaaccgagtttcgatgaggccccatggcccactctcacagctgaagctaaagatttcgtaaaaaggcttcttaacaaggattaccgcaagaggatgacagccgcgcaagctctgagccatccgtggatccgtaatgctcaacaagtgaaagttcctttggatatgatcatctataagctaatgagagcttacatcagctcgtcttcgctgcggaagtccgctttgagggccctagccaagacgctgacgacgaaccaactcttttatgtaagggagcagtttgaactgctgggcccaaacaagaacggctatatctcattgcaaaatctgaaatcggctttagtgaagaactccactgacgcgatgaaggactctagggttgttgactttgttaacacggtgtgcactcttcagtacaggaagctggacttcgaagagttcgccgcttccgccatcagcgtttaccagatggaagccttggagacgtgggagcagcacgcgcggcgtgcgtacgagctgttcgacaaggaaggaaaccggcccatcgtgatcgaagagcttgcatcggaactcgggcttggcccgtcggtgcctctccacgttgtcctccaggactggatccggcacgccgacgggaagctgagcttcctggggttcataaagctcttgcacggggtgtcgtcgcgctcgatccccaaggcctagccatgcgccatccattactcatccctgcgcatccatatccatcaagaaccaaggagatgatgaccggtggctaagccagtctctggctggtgcgtgcgtgcgtgcgtgccgtgtgtattgtgttctgttcgagagtggctggagggtggtggacggcctgaaaccgttgcatgatgaggagagatgcttggtagtcctgtgaggtaaaagaggcagtaacaaggctggtgcctgtgccttgtaccacttgtaccccatcccttgccacgtggattgatggctgtcgtcgtcgttgtactgaagtaaggtgctgtgtagacgagtgtacagatgatggaggataggagaaaatgagtactacgatggaagggccgtaagatttgcggctgctgtgctgtttgtcaatcgccaatgggcaatggctgcttgcagtgcagctgtggcctgtgtcgagctctctcctctttgcctgcgccgtcagagaacaggaacgtcgcagcgcgtcactgcaggtctctctgttcatggcggcgggcgacgacgacgcaggcgctgtacgtgagcttgctgctggtgtgtaggttgccgtgcatgcagcggtgtcgccacacggcgctggtcctggacgtacgtacggcggagcaggtccggtcgagcccggccgccggggtgcggggccattgacagctagagcggcaggaggaggaccacacggccggggacccaaattaaaacctctttcccgtgagtcagtcagacagactaccaaatgcgaaaataaaataaaaaactcagattatacgtatatagctagaatatggtttaaagctatagtaccacaagacaaagttaataagtaactaaacatgctcttctttagtc

SEQ ID NO: 34233 - DNA, 2058 bp, Zea Mays
ctccttataaacacttgtacatggatggatggcctcttgcacgggcaagtggtgtgctatttggagacgaactcccatccggagcacacatacatatatcggtagctgccctgagcttctgattcttccttttgagtggtgtatctgcccctggccttattacctgctcatccctagaagaagattgatcaggtgaagcatgagatggagctttaccctggatatcttcaagaccatttcaacatccacaaactcagtcgtctgcagccgctgccgacgagcggcgcgcccgcccgctacgtgacatcgggtcccgtcggggccatggggatctacgagcggcagcgccacctggtgcccaccggcgtgtggggggaaccgttccggctcgacgccgacgccgtggccatgcccctgcccctggccgcgttcccctcggtcaccgtggccacgccggcgccgctcgacgtcgtcgagccggaagcagaggagatcaagctcggcaaacgactgttgcaggcgcagcaggacgacgtgccgcggatgcaagaagcgccgccgtcgtcggatagcttcagccacgacgatgacgacgctaggccgagagacaaggttcagagacggctcgcgcagaacagagaggcagctcggaagagccggctacggaagaaggcgtacatacggaacctcgagacgagccgcgtgaagctggcgcagctggagcaggagctcataatggccaggcgccagcagcacggcgcgtacggcgtgggaggaggagtcgcaccgccggcggcgcccgtggacccgcgcgtcgctgcgttcgagctggagtacgcgcactgggtggaggagcagagcaggcaggcgacggagctgcgggcggcgctgcagtcgcacgcgccggacgtccagctgcgggtcctcgtcgacgccgcgctggcgcactacggcgcgctgttccaggccaaggcgagggcagcccggtccgacgccttcttcgtgctgtccggcgtgtggcggtcccccgcggagcgcttcttcctctggatcgccggcttccgcccctccgacctgctcaaggtgctggagccgcagctgagcccgctcatggaccaccaggcgtccgaggtgcgcaagctgcagaacacggcgcggcagctggaggacgcgctgtcgcagggcatgagcaagctgcagcagacgctggtcgacaccctcatgaccgtcgacgtctccccggacggcgccgggggcggatacgcggggcagcagatggcctgcgccgtgggcaagctcgccgacctcgtcgacttcgtggacaaggcggaccacctccggcagcagacgttgcggaacatgcacaagatcctgacgccgcggcaggcagcgcgcggcctgctcgcgctcgcggactacggtcagcgcctgcgcgcgctcagctcgctctgggcggcgcgccccagggagcccgcatagtcgtaacgagacacccgcgacggcgacagcgacgggggagaggaagcggcattgcaggcacgtgcgcgcgtggttgcctttggctgccgcccagcggagcaagaagccatgacgcggcagacgccggcctgcgatcagtgcctcggttcctcccactcccagctctgcatctggtattctggtacgggcaaccggcgtgttctgttcgctctcggaatgaaacctgaatcttctaatggttacagcagtgaattaggctttggatttgattgacagatcgaagaaattacaagtgtaaatacggtagacaaagttgtttgggtagtagaacagacgtgtactgttcagttaatgtttgtctcggtcaacctgtaactaatacgtcatctttttttttcttgtcggtgaggatgtaaacagatcatgtgaaagatgtacaacgaacaatctatggaaccagagttagacgggcatgtatcctatgcaatcatacatctcctgcaatcgagtaatttgtattattgattgtaaaccatgtgctgataatatttaacaaataatccttttgttttgtgcctt

SEQ ID NO: 34234 - DNA, 3547 bp, Zea Mays
gtgaacacaacgcagcgcagagcagaaaagggccaggaagccaccaaaacctgatccttaactgccctccgaacgccaactcatcccctcccccatcctcccctgccatcctcgacgccacgccatctctctctctgccctgccttgcgttgtcttggtcggtttcgtttcgatcccgctcctgaacagtacgtcggcaacttggagggggcgctgcctgcttcttcttcctcccgtgaagggaaggcggggtagccgatctcggcccgagttgatccggttgcgggggcttttctctcgcgtggtcctccagcgcgccgcgccgcgccgtgaatcgacaaccggccaccatgttcgtcaagaagctcgtggagagggcctccaagaagcaacatatcggcagcatcagctcccttcgccccgagaacgtcagcccgcggctagccttccactacggcgtccctgcggacgccgccctccttgcctacgaccccgttctccacgtgctcgccgtcgccaccaggaatggacagatcaagctgttcggccgcgacaacacgcaggcgttgctccagtccccctcccctctcccttccaggttcttgcagtttgccgagggccaaggggttctgctcaatgtcaatacccagaaccagatcgaggtttgggacattgatgcgaaaaaactctgttatctgcacccggctgaaaaggcgatcactgcattctctgtgctgcagaagagcttctacatatatgttggagatagttctggaagtgtgtccccattgaagcttgatttggctcagagatgtctagctgacctgccgtactggattccttttactgaatcttatggttccactaccagtgccggtaatgatgtggaagtagtatttgtttcaccccagcctttgtctgaatcgaacagggtgctcattatcttcagagatggggttatgagtttgtgggatattaaagctagcaaagcagtatccatatctggtaaaactacgcagcagcaatcacagaaggaggctaaaaatgtaacatcagcatgctgggtttgtgccaagggaagcaaaattgctatcggatacgataatggcgatttatacatttgggccattcctgaggttacaagtacacaaaattcctcatctatgggtggccagaatctacctattcagaggcttaacctaggatacaagctagacaagttgccaatagtctctttgcaatggatccctagcgatggaaaggcaggccgtttgtatatcaatggtttcaatgatcatggacacctatttcaggttctgattctgaatgaagagagtgagtcgcgaattgtaaagatggttttgcctatcgctgaatcttgccaaggaatggaacttgttacagggcttagtgacccaaataagcacagacaaagtgcccttgcactcttgttgaaatctggtcacatctgtttatatgatgattcagaaattgagcgctatctccttcactctcagtctagatcccctccaacacttccaaactgttcatatgtgaagcttccttatggtgattcaggcatcagtgttgcaaagttctatacaagtaaccctgcagcgttagcttctttggacgaggattatttttcatcagctaccaaatatccatgtctgttttcaatgaagggtaaaggtcagactttaacaagttttaccaacattcataagacccggaacctctatataactggacatctagatggaaccataagcttttgggatgcatcttgtcctcatttgctgcagatttttatgataaagcagcagaataaagacgatacatcaactggtaaccctatcacatcattacagtttgatatgtcctctagcattctattgtctggagaaaggagtggaatggtccatattatcacattcaaaaaggactccagcgacaacatattctcctttttaaatgcaaagcaaggagacaactatgatgtcagaagtataaagctcaaaggtgctgtaaccacaatgtcttctatctcaaaatcaaagcattttgctgttgggacagaaaaaggaattgtatcagttatcaacgtagaagatgctacaatattatatcaagaacagtttgagtgtcgactgcctggtggaatcgcctctttgcaatttgaaatctatagccataatggatatgacaaggacattttgataatagcgatggaagattcatctatttttgttatcgaggaagaaacggggaaacttttgaaccccaacccagttcagacagacaaaccctctaaagccatccttctgcagatgttggagttatcgcccattgacacaccagcagtttcagataaccaagatacagtatcgaaggaatcattgctgctactttgcactgaaaatgcgatccgtttgttttccttgggccacgcaattcagggcacaaagaagataatcaataagaagaaattgagcagctgttgttgtttcgcctctcttattcatagttcttctaatgacattggacttatactcgtcttctccaatgggaaacttgaaataagatccctgccagacttgtccttgttgaaggatgcctttttacgaggttttgtgtactcaagaaacttgaattcaagtagttccataacatgttcatctgatggagaagccatcttgattaatggagaagagacctattttttctctacgctctgccaggatgagatatacaggcacgtagacagcattagtacagtgtacagaaaagagaactcaaccagggaagactcttcttttgtagtgaaatctcctaaagaaaagaaaaagggtctgtttggaatgattatgaaagataacaaaggaagcaaatcaaaagaaagtgatgcaattggcagcgaacaatgtattgcaacgacttctgaagagctggcttcaatattttcatcaactaactttgctccgccatctgagggaaggaacagttcactacgagatgatgaaaatgccgagctggacatagaagccaaaaggtccacatttccctggtctaagcaaagataaaatcagcaagggactccaaacccttaaaggaaagttgaagcccaagactgaagaaaagataagctcgggaaacaaaaaaactgaagatgaaacatcagtgagtcaagtcgatcagataaagatgaagtatggatatgcaaatacaacaaatgatgactcaaccagtgtcacaaaaatgattgggaacaagctgcaggaaaacatgaaaaagttggagggcattaaccttcgagctgccgatatggcgagcggcgcccagtcattctccacaatggcaaaagagctactccggacaacaaagaacgagaaggggacctcataatcacctacaccaatttcccctcctttggtaacagcagggacttcacatagttattttttgccgcggcaatgtcgactctaccgtctacactcgaatgaggattgataccaaatatttgttataaagaaaggtgttttcaaag

SEQ ID NO: 34235 - DNA, 986 bp, Zea Mays
gagtaatttggacttcttcaaaaaaaattatggacctagttgtgggacctaacctatggtatggcgatcgcacaagacttacacccaagcaagaagaagctgcgcttggtttgtcacgtgcctgtggctctggcattccagcatacatttgcaccatgaagaagtctaatgttgtcaagagacagatggtattttcaagacagttcagtaagcgacacatattcggtcgtctgggcacttatgggtgtgaaaccagagtttttgcaggcagggacctgttcggcagtaagctcaacttctcaatgatccatggaggactaaggcttcttggtggatggcccctctttgtgaagagccaccgtatcgaagcagaacacgtctgtgctttcatgttccaggaagaggaagagggcgaactgtcacttagggctgatttggtgatttggtgattagggatccctaggggatccatggggaggaatcatcttgcaattcaattttgaatagcaagaggatttcttcccctcgggatccccggtcaccaaatcagtccttagggtgcacgttctgggtactatgccagtgccaacaatctagcctttgcttgtttcgttgatgaggcacgggatgaacgtcgctaacgaattatgcatcagacattagtattggaaacaacaacatgtagctatctagattacagccttataggttgttttgttgttctatctagataactatgtatggacatattgttcttttgtgttggagggagtaagcgttagtgttttgagacacgaagattgttatttttagactgaccgctcgagttgtgcaaataggaactgaattagtggcattgttagcatgtacatgaaaacgtgatttgtgcagtgcagggattagcttgggaatgtcgtcctaaggatggccttatattgggcctgtttggttcaacttttttcttaccagcttttctgaaaatctgg

SEQ ID NO: 34236 - DNA, 813 bp, Zea Mays
ctgtcgtagcgcacttaccgagtcacggtaccatttttggcagcaactactttgaccaggtttttttgtttggatttatcctgcggcatgaatcgcaggctaactgctccctcctattcggccatatcttgaagagttcgcgtgggacgaaacggtcatagcccagcggtcgctcgatccggttttcgtgcgagccaggtctgtacttctctggcgcagatggatcatggccatgggtctgcgtgcagaagccacagtttcctctcacggatcgcactttcttcatgcgcagcgactgccgctagttgcggcccgtgagggcacaacgagcaccgtcggcttcgagcttggcgtgtgggcagaaaagcaacgccaccgctgacacttctatatgcgctgcttcttcaggaagccatgggtgatcgccgtgctttagtctctgcatctgatggcatgcgggcccgtcgagcgccgctacgagggtgagcaggcgtgccattgacactctgcgggcgagcctccactggcgggcgaactggctgccgccgctgcaccgatcgggcgagtggaagggagtgctagcgggagcagggccacatatttggtttcttcaggaaactgttcttattgtcgtatgacttacaccaacagtaaatcgcagattcacttgaaatttcttaccggtgtttatgatttagtgaacgcaagcgaagcctgtcgcgtaggacagttcggcaaagccagagacctgccggcttgacggagagttgatgcagatctgatctcgccgcagcaacgtcgatgtagagcgtg

SEQ ID NO: 34237 - DNA, 1993 bp, Zea Mays
ctgccacgaaatggacacacgcgcgcacgtaaaaacgaaaaaaggtccccggccgagaccgagagccgcggtccagagcggggggcggccggcaaggacgaaacggcccaacgccaccacctccaccacctcgtcctcgatcgacacctcccccgtcgccgtcccgtgactccccgtccagccgtccaggcccagctgcccccgcgacccagacgaccacgtccgcctcggcctgcgcctccccgctacaagagtccgtccgcccgccagcgctgcggtgccagcgagcccctccctcctccactctctgcggcgcggagatcccgtcctttctctgtgcccccggtaccgcgaggagccactgccaggcgccggcgtttttggaactgggcatggaggcggcggcggcgtcggcggcggcggtcgggggttcgggcgctggactgaccaggtggcaggcggcggcgcttgcggcgctggccggctgggtgtgggcggcctccttctacgacctcacgcgccgggcgcgcgcgctcgtccagccgtgggtcacgcgccgggtgcacgccgagacgccggccatcctcagaagttggagcacaagttgctggacaatttcttctctgtgctgtcatgtgttgtctccgtgcccttctacacgggattcctccctctcctgttctgggatatggtgtcagcccctcggccatgctctccacccattagaagagtgacggctacagaagatgagaaggaaaatgccatggaatatgggctaccgtcatcgcatgctctcaacactgtttgtttgacgggatatttgttacattatgtcctcacatacggagaacatggcagtcttacagttgctgcgggtttatctctagctctcttacttgttatgctagttggcattgcgaggatatatctgggtatgcacagcttgaccgacgttgtcgctggaattggtttcggcatcgtcatcctcgcattctggctggctgttcatgaccatgtcgacgcctttgttgtctccgggcaaaacgttgcaaccttctgggcaggccttgctctactgatgtgctttgcgtatcccaagccagaattccctaccccgagctttgaattccacacagcattcaacggggtcgctttcggaatcgtgtacggcatccagcaaacctacttccacttccacgcccccgacgcgccgatcgtcttcagcgccgagctgcccttcctcgcgttcgcggggcgcgtcctcgtcgggatcccgaccatcctggccgtgaaatcgtgcagcaaggcgctctccaggtggctgctgcccgtgatgtgcagcaccctgggcatccccatcgtgtcgtcctgctacgtccccgccctgaaaatcgacggcggcagcagcaagagcaggcaggccgccggcgggcacctccagcgccttctctctcacttcccccagaaggcgtacgacgtggacaccggcatcaggttcgtccagtacgccagcctcgcgtggtccgtggttgacttggtgccggccatcttcgcccatttggatttgtagccagctacttaaaatttcagtttcgtttttttttctggaggtctcaataaggccctcctactcgtaagacatgtgtcatcttatgaggctgtaaatccgatgatctggccctttcttctttttttgtattgtattgtgtgtatgaatggacgaatggttccctagctgttttcatcagggtgttcagtaagtagaaatcagtggtacatttcttattctttaaattagatatggttattgtcttatatactaggttagagagggtattgatttgtagctatgagactatcgatattgttcggttccatgataagcaccactaagggtctatttggttttgctagaaaaaaagttgaaacaaacacaacttgcactggactggattatcttattcttggcatcgaagaaatgccttttcttgcc

SEQ ID NO: 34238 - DNA, 839 bp, Zea Mays
cgcgggtgctgctgcggaggcccaggaccgaaattgaactgcagttggtgaggtggcggcggaccgggtggcggcgggggcgggggcccagcgtggtagggcggcaccggcatcctgttgtagggcgcctgcggcggcggcgtgtacggattcatctgcgacgggtagccgccctgcggaggcggcggtgcgtacgacctgtaagacgccatcgcgcggcagctagggttcctcggaacccgagccctagcacacagacaccgcgcctgcggacactgctcgctccccttctcctccgtcgccgccaccgcagaagcctctaccacgcgcgaccagctcgccgccgcgcccgccggggccgacggcctgcacgcgctcgccgagcaggtggtgcagctcgtgctcgccgacggctccggcgccagcagcccgcgcgtcgccttcgccgacggcgtcttcgtcgactcctcgctgaagctcaagccggccttcgaggaggtccccgtgggaaagtacagggccgacacccagtccgtcgacttccagaaaagtggtcatatcaaccagaacttatcaaggaagtgtgaagcattagttgtgtcaggtttggcagaatatggtgatgaaatagatgggattgtcccagctgatatcatgaagattcagcctatcctacaatggtcgtgatagatgagattcttcttgcaaacaagggagattgacctaaaattgcaaaacagttggtggatgtctacgcgcgcagtttaaggaggcaggagcatccttaattgaacgacagtgatcctgcagtttatgttggaaagaaattaacataggag

SEQ ID NO: 34239 - DNA, 3134 bp, Zea Mays
aagagacactcctctttgtgtgcttgtatggatgacaaaaaaacatgtttggaaattaagtgatgcatgagcctggattatgtatggaaatatggatatcacacatacttttgcattatggatatcacacataatatgtgacgaactacaaagatgtgaaacagaaaagaagtacaacaattgtagcacactcctgagggcctgtttgggaactcttcctcaaaaccacagttttataatgccacaatttattgtatgccattgacatagccatggtatattttacatcagtccaatctgatacctatttggagacacaatatttcagttgtagtgtagaagagaagactgcagggatgccgacattactttctcttgaagtaactggtgatgcaattgaaggaacaactatgtttgccagtaaaaggtattggggaggagaagaaggggacacaatgttccgctggatactgacaaattctgatggaaccgagaaagaaattgaaggagcaacaagttcatcatacaccttgaaatgcaatgacattggcttctacatatctgtcttgtgcaagcctgttagaaatgatggagttgatggttctttagtgtcgactgaagcgattggtcctattataccagggccaccaacatgtcaatctcttgaactagctggctctatggttgaaggtggccgtttgacctttcatgctgtgtatacaggaggtttgcggggaagttgcatccaagaatggttcagattacatgatgatgggcacaaggacaagttgactgctgatgaatgtctagaccttgatctagctgatatcgattgccggattgaacttatgtatacacctgtacgagaagacggagtgcacgggttaccaaggagtgttacttctgatacaatcttacctggggagcccaagggtgtcaatcttattctacctgagtgttttgaggacaatgaaatttctcccatcaaaacctatttcggtggcaaggaaggcactggcaaatatacatggtttcgaaataaagagaaacttgataacttggaatttgatctggttgctgaatcatcagaagttgttggagaaaccttaaaatataagccttcattgaatgatgttagttcctatctgattctttattgggttcctacacggcgtgatggaaaggttggtgatcctttgatggctatctctgatgatccggtcatggcagcttttccatctgtttcggatgttcacttagagcagaaaagttcagatgtatattgtggactaggcatctattatggtggatatgagggattaagcttgtatagatggtacagggaatctagtgatggaactaggcttcacatagatggtgctgattcagtcacatacgaagtgacagatgctgattacagctgccgtctactgtttggatgggataagtggagaagaaaaactctctgaaccatctgatgtaattttgccagaactactcaaaatcgagacactcaatttcaaggggaatcaggttgaaagagaaacactgactgctgctgaacaaattccgtacagtgagattcaacaacatatatggaaaaattataagaaagagatgaaatatcaatggtttatttccaatgaatcaggaggcgatcagtcttttgaaccattggcaacccagtgttctcgctcatacaaagtgcgctttgaggatattggtcgttgcctgaaatgcgaatgctttgtcactgatgtatttggacgatctagtgaattggtatccgctgtgactgctcctattttgccaggaaggcctaaaattgaaaagctggagattgaaggaagaggtttccacactgacctatatgccgttcagggtacctatagcggaggcaaagaaggcaagagtaaaatacaatggctcagatcgatggttggaagccctgatcttatctccatacctggcgaaactggaagaacgtatgaagctaatgttgatgatgtagggtataggcttgttgcaatttatacacctgtaagagaggatggagttgagggacaacctgtttctgtttcaacagaacagattgcagttgagcctgaactttacagggaagtgaaacagaagctcgatgatggttcagtcaaatttgaggttctgtgtgacaaggaccgaacacccaaaaaggcacaagtaatgggccatttggagcggagggttttggaagtcaaccgaaagaggataaaagtagtaaagcctggatctaagacatcattcccgagtactgaagtacgaggaacctacgctccaccgttccatgtcgagctgtatcgcaatgaccagcaccgcttcaagattgttgtcgacggtgatactgaagttgacttaatggtgcaaacacggcacatgcgagaccgcatcatcctcacgatcagaggcctcgcccagaagttcaacagcacctccctcaacacacttctcaggatcgagtcatgatagacctgacagtgtaaaaaccaactattacgggaagctgtaccccttgttccgattggttagagtgcgtggttttagtaggattcgtgacatgccagccttttgtgtgtatgggtgtgggacgggccgagcgtgttggattacaattttttccctgacacatctctcaaatcagagcagcatcagctggttgctctgactggtgccgtcgtgcgtcatgaaatgtacatagggtggttagagcgagaaagagagtggtgtttcttggtgctgtatttattatgcactggttgggttgggttttttcgactgccattctcatactaagtattggttctttcttttttcggtcgttgggtttgcatatacttgtaccgacaacacagcttggggtgattgggcgagtgctgttcagaatgcctggtccacacttgtgtacgactggaatcctacggtggcgtattcacatgctgttttatggtgcaaatgtaaattcatctgttcataaacgagaatcaaaatcgtcggccacgtgtattcgtcgtattcgtaccgatgtatactaccttataaaccagtactaatctcacggtggcatcaattatcttcctctgtttcacaaggcacacgtt

SEQ ID NO: 34240 - DNA, 128 bp, Zea Mays
caccataaatacccgaatttcacccatgcacatttgctacctctttcacatgcggcttgcttaatcgaaggtattaaacccgcacgacatatattttgataaggtcaaaatccgtgtcaacagcaggc

SEQ ID NO: 34241 - DNA, 3159 bp, Zea Mays
cccctcctttcccctttccgtttccagttccgtcccgacgacgatcccagcccctcgccccgccgccgcgcccgctgcggagctcgggccgcaatgcccgcgcccccggacccgccgccgctcccgccgctggacccgtcggatcccgccgcggccacaccgcccgccgccgcggccgccgatgaggaggaggacgaccgcgtcttccttgtgccactcaggtggtggaaggaggcgcagcaagggctggcgatcaacgtgcctggtctgccctacgcggccgcgcctgctggacctacctcctacggcatgagggtgctcagcatgttcctctccgaccaaacatacaccctccgccgcgccgacgagctcttgcagcagaccgcctccttcgccgccaggagctacgcgctcctcccggccgacctgttctcaaaggcacgggaatggtatattgtgcctgccaagtctgcagtcaaaaacgtgtcaccagctggagagggctcagtaaatatttaccccataatgctaagagtttcagccagcagagatacatatacactaaccgtgaagatcggcaaaaaggacaactcaactgagaactttaagagagcatgcaagatcctgactgcagactctgagccggttcacatatgggatttctctgggcgaacaacatacatagttatgactgaactgaaccggtcgccccatgactcaaaatctgcagatcaggagatgcctctacaaatacacatttatgatctgtcggaacctatggttaatggttctgatgggaaaagggatgagttagcattaacattgggtggctcaagttctagcaatggtggtagtatgaacatggatctggattcatcaagtggaagctctaagcaagttggatccggtttaacaggattagacaatttgggaaacacatgtttcatgaacagtgcagtccagtgcttggctcatacttcaaagctggttgactatttccttggtgatttccacaaagaagtaaacccacataacccactggggatgaagggggaacttgcatatgcatttggcgacttgttgagaaagctatgggctattgataggacccctgttgcacctcgccaattcaaggccagacttggacggtttgctccccaattcagtggctttaaccaacatgattcacaggagcttcttgctttcctattggatggactccatgaagacttgaaccgtgttaaatgtaaaccatattctgaagctaaggattcagatggccgtccggatgaagaggttgcagatgagtattggggcaaccatttagctcgaaatgactctatcatagttgatatctgccaggttagttttgaatgaatggtcagtacaagtcaacattagtttgccccatctgcaagaaagtttctgtaacatttgacccgtttatgtatttgtctttgcccctgccttcaacaacaatgagaacaatgaccataacagtcttcagtactgatgggaccagtgggccatctccttacactattagtgtaccaaaatcgggagatacgaggacccttattaatgcgttaagcagtgcttgttcgttgagagatgatgagcgccttctagttgctgaggtctacaacaattcccttattcggtacttggatgaaccttctgaagttatctccttaatcagagatggagatcgtttggttgcatatcggcttcctaaagacaatgaagatgccccaattgtggtgttcagaaaccagcgtatggagtcatccctttccagttttgggcgtaagtcatggaagacttttggcactccactggtgtcaagccttcctgatacagtaactggaagtaatatttacaatcttttcctaaaggttatgactccattcagagtatcaagaggtgatgctgctgttgctgatcaaacacttggtgaaagcagtctggttgatgaaactgaagatatcaatatgagctctgatgcctcagagcacaccagcataaacaacaattctgtcgaggatgaaacagggactgaagatgtgatgcaatttttcctgactaatgagagaatcccagaccaacgcatgaagatagaaatggatctatccattacggtgaatgatccgcataagcgtctgcatgtggctgtgtgttgggaggacagtggactggaccaatacaactttagttctttgaattctcttccagaagtttacaaagcggtgctgttttctaggaggccacaggacacatgttctctatatgcatgtctggaagcttttattaaggaagaaccattaggcccagaagacatgtggtactgcccaggttgtaaagagcatcggcaagctagtaagaagttagacctctggagattacctgaaatccttattatacacctgaaaagattttcatacagtcggtataccaaaaacaagctggagacatttgtggacttcccgattcatgatcttgacctgtcgaagtatattggtcacagatgccaagacgttcctcacaattatcgactgtatgctactagcaaccactatggaagcttgggaggtggtcactatacggcttatgtttatcatgaagggaaaaagggttggtatgatttcgatgaccgtcatgtgggccccataaccgaggacagtataaagacatcggcagcttatgttcttttttaccggcggatacaggaggatagcttagatacagttacagacatagattctgatattccaacctgaggaggcggtggaggcaatttttgagcccaagtcccggacagtgtatagtttcattggtttagggggacagttgtgcggcaatgccgcaacggaagtgagaaatagaacaggtggggaagagtttgtgcggcaatgtggttcagaggggggagataatttgtcgcggttccttccgttgcaaattcctttgttttttttccgttcccttttagcacctgtaactgatagcggtaaaattttggctaatggcatgtggggaagatatttcgtcccagattctcaacacagttagggttagttttggaaccctatttttaaggaatttctatttttctaagagaaactagtttattttttcttggaaaaataggaaacctttcag

SEQ ID NO: 34242 - DNA, 1662 bp, Zea Mays
cagaaacttctcatccgtgtgcctggaaggaacctaataaaaaatctgaaagttctagtagcatgataaattgatagtatccgttggccgtctcattttgcacgcgaagcttttgtgcagccgtcggcactttgcaaatttacagtgctttacccaatctcagtcattgtagggttacctgcagggcacatggtctacgtgtttgcttacatgattggtcttcccactgttgtttgttgtttctctaccttttgtcatgaatggccgcatgctttttcagagaattcctgctacacaatagcacaaccaacaatactactgtttcggcaaaacatggtttgcttgcatggtactctgcctacggggtgaagtctctgtcggacgagcacagccagctcttgtccggcggcggcggcatggacgcgtcaatggacaactcgtggcgcctgttgccgtcccaaaccgccgccacgttccaggccacaagctaccctctgttcggcgcgctgagcggtctggacgagagcaccatcgcctcgctgcccaagacgcagagggagcccctctccttcttcgggagcgacttcgtgaccccgaagcaggagaaccagacgctgcgccccttcttcgacgagtggcccaagtcgagggactcgtggccggagctgaacgaggacaacagcctcggctcctcggccacccagctctccatctccatccccatggcgccctccgacttcaacaccagctccagatcgccgaatggaataccgtcaagatgaacctgagtaaccatgcggaccccaacatctcagagctgacgactctttgctgctggcctggcctcatcgtaccttgaggcgtcaaggaatacttcattaccactagtatcatgctcctggattttcgaacaatatatatatgcttatgtaccgctatttctctcatcttttacacttctttacccgtttggaattgtatgttctgcgtggcacggttgttcatttgacctttttggatttgattgaaagctccgtttcttgcttactccagcgcatcgtgagcaatgtccctgtctccgctgcatgtgaaagatctaccgctgcatgcatcagtagttcaaagatgttcagtgctgcgggagggaacatgatcctgatgggcacccgtcaggtccaagtcgtggcctcgtgggtgtttggagaagataaagcgtggcaacgctggatctgccgcaaagcttccagagttggtggaggaacaggctctaaccctggacgtgggtccttgcacgcactagttcgctggtccagtccagggacagggagcagagacgcaaggcagagccactgtactacgacggcactgcgggtgaaggcgcttgcctggtgcgattcgcatcacgtgttgtatcgggttccctccttgtcgctgacgcctttaccctttgggcttgcatggacacatggttttccatggatgcttgggttcacggtaccgacgcatcggcccgttggcgacaagggagaaaagccaagcctggttgcgtatcgcgccatggagcagtcagcactcggcagtggtggtggtctctccggtgtacggacgaacggtcccggcgttggaccatatgcaagtgtccacgacaacgagtccacgtga

SEQ ID NO: 34243 - DNA, 932 bp, Zea Mays
tcacgtctctctccctcacgtctctctctcacttctctctctctcccactctctcctctctctgctctctcgcgtgcgggcgctgggcagccgcgcacgccaggggctcaagccgccgccatcccgcgcgtccccgcgctcgccagcgccgcacgcgctgagccgaccggccgcgcccggccccaccgcgacgccgcagcggcaagcagcaagcccgcgacgcccgcaggcgagccgacctcgtgcagcgcgcacccgaaaccgccgtctgttcgtctcagtgttaaagagattaatttctaccgtttctaacctccctcattcctcctctccattacgtgcagtaacagcagcaccattgacagcctcttgaatgacgccagtgacctctcctctcccctccctctctctataaaagggaacagcagagcctctccattcctgcctactcgaatttgcctctccctctagcactcttcgctcatcgctagtgtgttgccgttcgtcgccggagtgtgccgttcgtcgccggagttcgccagagccgcgtactagctgtccgtagtcgagccccgctctccgtcgatccgtccccatcacacgcacgaacccgaggttgttggcgacccaaatttattttatgtattttataaagtgctttcgattcgattcatgtgttgtatagttcgtttgttgtaatatgaacacatgtgattccaatttatgtatttgtgtgcgctacggaatttgttaaaaatatatgattagtagtgcaccgtgttattccatgtaatcgatgcgttgattttggtttagaaaaatatggcgtagatttaatagtcacacgttggtgataaaaatactagataagaaattatagtcaattttggtcacgataaattctagaaaactatttggagaattataggtgc

SEQ ID NO: 34244 - DNA, 1126 bp, Zea Mays
ggccaccggtacctattggacaggcaacgtcctcatcttcatctcccaggttttcccctccaatcacccccaggtcttcctctcgcgagttgcggtctcgcggccccctccgccgaccgccgcctcctcacaaccgcggaagctgcttccctctccattggacgcggccagcttccatctctcggtcacctccctctacatcccacggccgctaccaccttccctctacctcacacggcagccggcctctccaagcattcagcgacgcatttgcctatatcagcactgtggtcataactctagtagagaaaggagaagatgcaggcatctagggcaaggcttttcaaggagtacaaggaggtacaacgagagaagtcagctgaccctgatatccagttaatatgtgatgattccaacatattcaagtggactgctcttatcaagggcccttctgaaacaccttatgaaggtggtgtgtttcaacttgcgttcgcaattccagagcagtatcctctactgcctcctcaagttcgatttttaaccaaaattttccacccaaatgtgcatttcaagacaggtgaaatttgtcttgatatattgaagaatgcatggagccctgcatggacctttcagtctgtttgtagagcgataattgctctgatggcccatcctgaaccagacagcccacttaactgtgattcaggcaatctcctgcggtcgggtgacatcagaggctatcaatcaatggcccgcatgtatacaaggctggctgccatgccaaagaaaggttagatgtagaacatgtgccaagccaagagcctatgtcagtccatatgttgtcaggtttgctgtgtgctgtctgtctgtgaacttggtggttcttgtttcctaataagtcctaaccattcatgtgtgtgtattctgtattctgtatcccggattcccgatgcttggtctgtgatgtaataaatcctggaattcaacagttgttacttctgatctatttatttagttgctcagtatttccgtcagtttctgctgcgcaacactacggaggtgtcttgtttaatgtttcatatgctgtcagctactgcgacagtcttggaggacacattcaagagacagc

SEQ ID NO: 34245 - DNA, 3017 bp, Zea Mays
ctctttctgtaggttttctccccacttcgctttgcttccccacctgctctctctcactcgtccccatcaccgtcgccatcactacccctctcctctctctcatcggctccaatggcggacgccgacgccaagtcccagccgcccgacgccgcggcatccccggatgcctcgatctcctccccctcctccctaggcggcggcggcggcgacgcggccgacgcggacgcgatcgagaagcagctcgccggcctgggcatcgccgtcgccggtgggttccccgagccatcgggatgggacgatggccccgtaccagtccccatcccggccgatgtccttgtcggcggtgatgagggtgccggcgagaagccgcgggcgccggcgccggcgccgactggggcggtggatgtgaaggtgcggttcccgcgccggcccggggagccggactgcagctactacctcaagttcggcacctgccgcttcgggatgaagtgcaagttcaaccaccctgcgaggaagaagaagactagtagggtgagaggcgtcgggagcaacggcagcgggagcaacagcagcagcaataaagcatcttctcctgatgatgatcaggctcctaaagaagaatacgaaggtcttgttccggacatttcggattccatgggctttgatgacaaggggagcttatctagttcagaaaatcataggaatatgtcatatgaagttattgatatgaaaagggggaaactagagccaaaggaaaaggtttgtgaagaacctgaaaaggcaattcattttacgaagttagacgagacaaatatcgcaacccaaaaggtttgggatcatgtattcaaccccttcagcaatttcttggctttgtacaggccagtgtgacacagggtgcatacagttagttcttaagaatttctagtgtattgtgacatcctgcattcccaggaaacatgttaactcatgttctctcagtgcggataaattgaagcatgtacaatggaggtgcttgaaaacaccttttttttttcttcaccaaccattagcacctgattcttaaaaggcggattcgatgctttttttcgaacaacgcaagagagttgcatgtcatttcattaagaaaagagaaccaaatacacagagaggaaagagacctcctgaacacacaacacactaacacaactcctctagagctaaaacaacaacatgaccatgaccacacactagttagcacccagctgagaggggtctgcacacttcttaagaggagctcttgctgaccggcggccccggctatgagttggatacgatgcttacgttagcatcaatgcttaatgtgtgttaacatattggtttaagcttatctaagaacctatttgcaactttgcattgtaggaatgaacttctctatcaatgcctagtgatatgacaacgttctctctccctaagcacctgtgtttaagcatcttgcattgtacatgcccttagagcaactccatccttgattccttggcagtgcctttgctttaaacttacagctagtgaaccaacttttgttatactatactggcatgatgatatgtatacacattcattcctaatcaaaaccctgttaatggaaggttcataaattgatttttttatttatttatctaaaacctctgttcgactgtcacctgattgctccctactaacttttgaggttctgaagggttctaaagataaaagaaaggaaacctttgcagaaggcaacactcaggaggaatgcaagtattattcaacacctggaggatgcaaattcggtaaaacttgcaaatacctccaccgtgagggaaatggagggaaaacagaggttgaaaaagctgagctaaactttctaggtcttccactgcgaccaggtgaaaaggagtgcccatactatatgcgcactgggagctgcaaatttgcgactaactgcaagtttcaccacccagatcctactaatgcatcttcaaaagaaccagggttggaacatgagaatggcgatgtaccactgcaaaatgtccaaggatcctctcagcctagccttcagatgtggcctgaccagagagcattgaatgaacagcatgttccttttcttgctccagcaccgtcatacagtggagggatggttccacctcaaggaatgtatccatcttctgattggagtgggtatcatcaggtacctttgaatccatattaccctcccggtgttcctttcccgcattttccagctgcccatatgaatcacccgatgtacaaggctgcagatataccaggacatcaaccaccaccatctgatgagtatcccgagagacctggccaacctgaatgccagcatttcgttaagagcggtttctgtaaatacaggatgaaatgcagatatcaccatccaaggtcgcgccagtctgcaccaccaccagcaggtcttagccccatcggcttgcctatcaaacctgatcaacctgtgtgcacttactatggacgctatggcttctgcaagtatgggccagcctgcatgttcaaccaccccttcaacttcgggcctcccgtgccggcagcaggaccacccctccctgggcagtaccctacgcatggaaacttcgcctagcaggcacgtgacgagcgattttctgagtcgccacgattgcttgtaataacctcctccacctgtaaagtagcgtagacaaaagctgtacgtggttggcagtagacatccagcatgtaggcgcaacgaagttgcatggagatgggtacgttacagttggtattgcaaactttacgctgtacaagttacagtccatacataagctgccatcgcatttaaaatcctggttgctgagtactccctcggtctgtctacatgatttagtcgttttagatttatcaactttgacagattatattgtatgtgttttatagtattttacaacataaacataaagacttgacttagggcaaacctagaacgaattaaatcatgtggatggagggag

SEQ ID NO: 34246 - DNA, 263 bp, Zea Mays
ggctggcgactgtcaactggctgctctcgagaggcgatcaacgacgtacgactataaatcaccggactgtccggtggtgcaccggactgtccggtgagccgttcacaggcgaagtcgtcgctcttgggaagtgattaacatcgtacggctataattcatcggactgtctggtgaggcaccggactgtccggtgagccaacggccagccaggccaacggtcggccgaggattccgcgcgtgacgcgtggccgtgccaacggtca

SEQ ID NO: 34247 - DNA, 1822 bp, Zea Mays
acacgagtatgaacagacgggggctcttgggtgggtctgggcagggcatctccggactcccacacagctcctcttggtggcgccctctgacatctcctttttcctcgccttcgatcggtggccgccgccctcctcgacttccgtcccgccgccatgaagggacccggcctcttctccgacatcggcaagaaggaaggatctactcacctacgactagaagctgtccatctccaccgccagcgcctctggagtggcgcccagacccggcaatccgttagaatccgttcgtcgcagaggccatgagctcggcgcaggatccgttctacatcgtccgggaggagatccaggagtcgattgataaattgcaaagtaccttccaccgctgggagcaaactgcttcaaacacaggagaatatgttcatctgacaaaggagcttctgatcagctgtgaaagtatcgagtggcaggtagatgagctagaaaagacaatctcagttgcatcaagggatccggcatactatggacttgatgaagttgagctttccagacgaagaaactggactggttcttctcataagcaggtatgcattcgctcatattgtagcaactcttcagtgatgtggtgattggacatgttgtttcttgtatgttttgaacatgaatgagtcacactaagctcaggttgcatgatttcctgttgtttggtacagacattaaggagtaacatattaccatgttcccgaattctgcagttgacaatgtacctaaatttattgcatggatcctcacaatttatgcatgagcatattcaggtcggtacagtcaagagagctattgaaaagggcaagagcaatgcagcaacttcaaaataccaggatacaagcaggaccaaccactattctgcccaagataatgatgactttctttcttcagaatcagatagacagcttctactcatgaggcagcaggatgaagaacttgatgagctcagtgaaagtgtccaaaggattggtggcgtgggactaaccatacacgaagagctgtctggacaggaaaggatcctaaacgacctaagcttggagatggagactacttccaacagacttgatttcgtgcagaaaagagtggccatggtgataaagaaggccggcatcaagggtcagatcatgctgatcgtgttcctgattgttctgttcatcattcttttcgttttggtgttcttgacatagccaagtgcaccagggtcctcggttttctctctcatttgttgtgcctccctagtacgaacactagtaaattggtcgcgctccgcgtgagttgttgcttgatgtgcttacataagatgtagaatcttgttgctataggcatgtatcaacaggtgctagcagcttgcagttctcctaacagaaacaggtcgaagcagattttttgttctccaagtgatcagtttgtccaaggttgttaggctttccgtaatcgcttcgagtttgcttttcaagatcatcattcacatgttgcttgttagactttggctcaacataaggaggcagcatggttagtgccctgtccaggtctccttgtcctttttgcactggatatctgtcatggtcgggcgcacgtatgtgaggcgacatcgtgcccgtgacgtgcgccgcgccctagagcaagcagcggccaggcaggacagctaagggataggataggatagcctgctgttatccagttccttagattgtggagtgctgttattcagttccttagattagggagttccttagattatggagtttgttgctcctttcggttgggcctctggccatat

SEQ ID NO: 34248 - DNA, 741 bp, Zea Mays
cggaaaaaaaatcccattatggacggcgactggtactttttgttcgcggggacggcgactggtactttttgtcgctgcggagacggggagtcttccgactcttccccaacgggaattcctcattcacatccctacgcacgaacggaaacgccccatgctgcgctcgcagtctcgcatggactccaccactgctgctgctaccgcggccgcggctgcggcgccggcgccggtgctgctggtgacgaacgacgacggaatcgacgcgccggggctccgcttccttgtcgaccgtctcgtcgccgcagggcgataccgcgtactcgtctgcgcgcccgacacagacaaatcgggtgtgagccactgcatcacatggcgccctgcactccgctgtaaacgtgttgatataataggtgctacagcatttggagtttcaggaactcctgctgactgtgcttctttaggcatctctggaaaactatttgatggtttggttcctgatctggtacttagtggaatcaacattggaaataattgtgggtaccatgtgccaacattctgcatcatgcaacatatcaggtctaattgtcatcatataaaacttgcctttttagctttcgtggcatcctcttgtcacatagaacgccagatgcttgacgttactttatccaccttgctttgattctatggctaatatcttcatcaatatctctgtctctgtaggattgatcttaaataccaaaa

SEQ ID NO: 34249 - DNA, 2796 bp, Zea Mays
ttttttaaaaaacgagcccgaccttgctccaactccctcgattccctctccctattcgcgttccccacttccgttcgccgccgacaccgcgtgcgctctctccccccctccgtctctgtctgcgacgactgggtgggctaccgctgccgccctacccatgtgctgaggcttctgcctacctcttcgccggcgaagagcgcccagcagatccgtcctcgcttccacgctgcagttgaagatttgatcagctatcgccttcgatgcagttgaatatttgatcagctattgacttcgctgctggcctgttttctcctttggagaccaaagaagccatggcgggccgggaggagagatatgtgaggtttcatgactggaaatcagagcaatctgtttctgttatttcagatagggtagtatcagaaaaagggcataacatctttggcttgttaaaggacagaacagcaggagccttttcattcctggggaactcttcacattctgaagccctaaacaaattaggcctaggggagaagtcaaaaacaaaagttcttgatcctcaagggccatttttgcagagatggaacaagatatttgtgatatcatgtctttttgcagtttttgtggacccattgttcttgtatgtcccagtaattgatggtggcaacaactgcctgtacttggacaagaagttagagaccacagcaagtatcctgcgctttttcacagatatcttctatttactccatatactgtttcagttcagaacaggctttattgctccctcttctagagtgttcggtcggggtgccttggttaaggacacatttgcaatagcaaagcgatatctatcaacattgttcctggtggatttcttagcggttctgcccctccctcaggtgtttgtgttggtggtgctgcctaagctccaaggtcctgaaattatgaagagacagcatgggctggtgctgctttcaaccttataatttatatgcttgccagtcatggctttggagctctttggtacattctttccatccagcgagaagacacctgttggagacaagcatgtatcaatcagactggctgtgatcctacatctttgtactgcgggtatcattcacttgcaaataattctttcttacaaaatgcgtgcccaacaaatagcactgccaatccagaccctatatttggaatctttctaccagctctccaaaatgtttcacaatcgacgagtttctttgaaaaactattctattgcttttggtgggggctacaaaatctaagttcccttggccagaacatgaaaacaagcactaatacattggagaatctgtttgctgtttttgtctcgacatcgggtttggttctatttgcactacttattggtaatgtgcagacctatttacagtcagcttctgtgcgtatcgaagaaatgagagtgaaaaggcgtgatacagagcagtggatggcacataggctactccctgagaatctaaaggatcggattatgcgccacgaacaatataggtggcaagaaacaagaggggttgacgaagagggccttcttaaaaatcttccaaaggatcttagaagagagataaagagacatctttgtttgtcacttctcatgaaggttccaatgtttgaaaacatggatgaacagctgttggatgccatgtgtgatcgtctaaagcctatgctgtacacagaaggaagctgcatcattcgcgaaggtgatccagtgaatgaaatgctcttcatcatgagaggaacactagagagtaccacaacaaatggtgggcaaactggtttcttcaactctaatgttctaaaaggtggagacttctgtggtgaagagctcctcacgtgggcccttgaccccacttcagcttcaaatcttcctggctcaactaggacagtgaagacgttgtctgaagtcgaagcttttgctctgagggctgacgacttgaagtttgttgccacacaatttaggaggctccacagcaaacaacttcagcataccttccggttttactcacagcaatggaggacctgggctgcttgcttcatacaggcagcttggcacagatactgtaggaagaagctggaagaggctttatatgagaaggagaagaggttacaagcagcaattgtaagtgatggcactacttcgctcagtctcggtgcagcgctctatgcttcacgttttgctggcaacatgatgcggatcttacggagaaatgccaccagaaaggcccgtttgcaggaaagagtacctgcaagactgttgcaaaagccagcagaacccaacttcttcgctgaagatagctgaacttgtaccctgtagcaagcagggattcatggtccaaccggtgaagtttgtgcagaagttaagattggatgctgtagatagacagatcaggtgctctaaagccgtctggtttaaatcacctaattcgcgaaaaggcctggtccgagttagattctccgttgaaataaatttgaagctgacgttaaaaaaaaaatccgcttttgctccacgttaaattctggcttccatagtggtcggactagggtgctgagataagggtattgagattttttagatctgtgtgaaaagattttctgtaacgtaatatctgaaggctgtcttatcctctgtaggttattttaaaaaaaacacgtatatttcgattgtatacaggtttcatgtattataaacactctaatttaccttgtgcatttgaaaaaagagagaagatgctgtgaatataatcgattaattgtttgttcatt

SEQ ID NO: 34250 - DNA, 2353 bp, Zea Mays
gcacctgagttcgaagccggacccctaatctgatgtgcacctgagttcgaagccgaattcacgactgcaattgcaaaaccctagctaccgcttcgccgaattccctgtcctccgcccgcttcgccgaattccctgtcctccgcccgcttcgccgaatttcctctcctccccgcccgccgcccgtcaccgcggcttcgtctgcgcttgtccctcccgttccaaggagcacgtgcttctcgccgcgccgttcgcccgccgccgccgccaccggttcatcgccagctatgtcttctcaggtcgacagccgcagccagtccgccgggaagcgcgcgcgcaccgacggcagccggcgtgaggacgactgggtttgccccagctgcaagaacgttaacttcgcctttcgcaccacttgcaacatgcgcaactgcaaccagtccaggccagcagatcacacggccatgcagaccccgcctcgctatcccacatcaggaggttacatgagcccagggacgccaccgtcgatgtaccttggtggtggtgctcccccatatggctcttcaatgtttaacgggcctgcaatgacgcgctatggtatcacacagttccctgggggttctgcgtatccatatggatatggtggccgcatatcaatggggagcccctacgggccaatgcaaatggctgggccaaccgcatactctggtggatctatgatgggagcaggtggaatgtatggaatgcccatggacaggtatgggctaatacctgctggttctggtccaatgggcacgagagctggctcatattctgatgaagattctcagaagaagtctgcaggagctggccgtgataatgattgggagtgtccaaattgccacaacatcaactttggcttccgcacagtctgtaatatgagaaagtgcaacacacctagacctgaaaaccagggatctaagcctgatggtttaagagggtcaaaaccaaagacaccagagggcagttggaagtgtgagcagtgcaataacataaactatcctttccgaacgaaatgcaatcgtccccaatgtggagcagaaaagccatcacagacgaacaatgcaaatgaatcagcggaagatcaggacaatcaggtctttgtttcagaaccttcactatggtcctcaacattttctacacctttatttagaacattaagttgcatgccttattaatatatcactactatttttaatcatttccttgccctcatgtttgcttgacatagcttaataaattatgtccttactgttacagtgagtcctagaacagtaatgagggtcaagaaggtccagcgtcgtcgtcaaggttcagtctgaatgtggggtacatctgtgtcagtagtcgccgttacaagtttcttccccttgagaacttagttgagtcggggccttggagttggcaatggagtcttgccttccttaatcactgcggataatggtcaagaacatcaatttgttatgtggtttgtcaagaacatccatcttgcctttcctggctgaacttggttacttgtctttgttactggtactctggataaattaccatatgttatatgaatgtcttttatatgtgtcatagaatatcactcatctgttatgaagtatcacaactgtcaccattttgttttggttttgttctggtcattgttttcaatttatggttggtttggtatttttacaggttctttctgaatggttgtgatggcaacctttctttccttccaaagtagttttcttagagatgtttgcaactttccctggtagcaatagttaggtcttaagttgacagctgacatcttggttgcataactgcatatgttactgttatcatcttccatgttgtctggagctttagctgttcaagtatcaccattcagtgttttggttagaagagatgctccttggtgaagtgacgtgcatctcattttgcagtggtagtagactaatcaccctgcatgcttgtctctaatgcaactacttcactgacttggtgccattggacttagttttcgtcatgtaaaattacaaagctttttatcgaagctacgacttctgcgtgagtttcaagacagcagtgagcaggcagatggatcttccttgtcctgctgctggagcactgacacagtgacactgcggattggcagcagtccagtgagtttcaggacagtcttacaaactgatgtggctaccatttcgcatcggaaaacaagcacgaagaaacgggagattttgcgttggaggaggcgtttcctcgcgtgggcctgcagccatggcccacacctaggggtgataatgggctataaattttacactat

SEQ ID NO: 34251 - DNA, 1899 bp, Zea Mays
gccgccgcaacaaatccgcgcacctcgatctgctcaagtgagcgtggctcaacgagaaggccacgtcagatatcctcagcttcgaatcgcccctcgcgttacgtgtccgcgagcagatccagcacctcatacgctcttctccctcccccttcttgaccacgttcctccactcccccccatagctctgggatctggccatggctccctctcctggtgtcgtgtcacccaggaggcggcgctcgatgacttcgtcgacgatggcgttgacgacctggtggtctcgctctaccagatggacctcgatctcacgctcttcctcctccgctcctaactcctcccggagaagatcaagaagtacacgatgcatatctctagggccacggccgaggcgactggtgaagttgcggcaatctgatgcgggaggtggccgacctcatccttagcttccctgacgagacgcccgtcgtcgtcctctctgccatggggaagaccaccaataacctcctcctgctaacaaggatagatgcgtgtgtgcctgattcgttgtctgtggaggccggagagaatgcggtgagctgcggtgcccccaaggcgtccgaaatccctaagctcgctgtcatcaaggacctgcatcttaggacggttgatgagcttggtttagataagtcgattgtttcagagaaatttttgaagtacttctggtggtgctggaacaagttgaaggagaagactgatgatgatattcccatgccagcctatttcaggttcctcgcgctgctcgcattcaagatattttctgctgagcaggtagatgttgctgttctcgaggttggcctaggagggaagtttgatgcaactaatgtggttaaagcacctgtagtttgtggcatatcttcccttggatatgatcatatggaaattcttggtgaccaaatcctgttcttggtgataaacttggtgtcgataaacgggttaattctgttggcaaaattaggatgacacaggtgacatgaagatgccaagtcggtgcatccatactaattgcgactttggtctgtttggacctctggtaaacgacgtagtaggtttggagacctggaactacaaatcaatagtattgggacttaagtgacaacctgaacaagtttaggaacaacttgctagaaaatttttatgctttctaccaatcttacaacgataatttgaaagttgatatttatggtacttatttggtccaggaactagattttttgtacattctttcggatctggattaaacaacgctctctttgtatatgaacaatgctctataaatatacgtttgataattttatatgatatttaataaatagtagctactgtgactgtttcattttgtttttcttaggttgttagttctcatgaatgtcatgttgtctcgaaataaagagcttctgtccgcacctaatcgcctaaaatggaaatgtttgactcattgtttaattcggggggaagctgaaggtggtctgatccgggacgatgttagcgaaagtcaatttaatcaggtgctgaacattgagttgcaacaaatcatcgatggagactgtcaccgcagccagaaaaccacggtctcaatttgaggagcctttccatctatgtttgttagaaggcatataatgcctatttatctcttgtattcgaacatttggcaattaagaaatagaagattacttccccaatatcccttattcctaatctcacctttcacggcttctggtgaacaatcacttgctattaccgactgacatgtccactcctcatatgtgagatattggggttgatatatatgttgttcgtttccatgtaattattgtgtactaacatttattgaataatttttacgccgtaacaacgtacggg

SEQ ID NO: 34252 - DNA, 2774 bp, Zea Mays
acgaggagggagcccttgaaggcaaaccaatgcgcaccgccgcttattcattaaccaaagacttgcatccaaccaatcccaccacttgtgtctacctcttcgagtcaggctgatgggaggtgcctgtcagcaactctccgtggacggagatgcgaggacgcctgcgaatgaccgcgatccggccggcctgctccagcatgatgatacggaaaaccagcagcagcagcaggcctgctgggagcgcttcctcctcaaggagactctcaacgtcttgcttgtggagagtgatgattcaaccaggcaggtcgtcagtgccctgcttcgttgctgcatgtaccaagttatctctgccgaaaatggccagcaagcatgggcttatcttgaagataagagaaacaacatagatcttgttttgactgaggtttttatgcccggtgtatctggtatttctctgctgagtagaatcatgagccacaatatttgcaagaacattccagtgattatgatgtcttcgagtgatgctatgagtacagtctttaaatgtttgtcaaaaggtgctgttgactttttagtcaagcctatacgtaagaatgaacttaagaacctttggcagcatgtgtggagacaacggtgtcacagtctctcctgcgtgttcgaaaaaaaaaaaagtttacttatttggaactcagtccagtggtagtggaagtgaaagtggcattcagacgcagaagtgtaccaagtcaaaaggtgccaatgaatccggtaacaacagtggtagcaacgacgatgaagctggcatgggacttaatgcaagggatgacagtgataatggcagtggcactcaagcacagaactcatggactaagcttgctgtggagatcgacagtccacaagctatgtctctggaccagttagccgatccagccaatagcacctgtgcacaagtaatccactcaaagtcagagatatgtagccacagatggctaccaggtagcagcaacagaaactgcaagaagcaaaaatacactaatgatgactttaagggaaaggacttggagataggtggccctagaaatttatatatggatcaccaatcttccccaaatgagagacccatcaaagcagcagatcatgaaaacaactccaaggagtcaatgatagaaaatttagaggagccaactgttcgagctgctgacctaattggttcaatggccaaaaacatggatacccaacaggcagcaagagctgcagaagatacccctaatttctcttccaaagtgccagaagggaaaggtaagaatgaccagcatgataattatgttttgccatcacttgagctgagtttgaagaggtcgagatcatgtggagatggtgccaacgatacagtcaatgacgatgaacagcggaatagtgcattaaggcgatcgaatctctcggcttttacaaggtaccatacatctgcggcttccaatcaaggtgggacaggattggtaggtagctgttcgccgcatgataacagctcggaggctgtgaaaacggattctacttacaacatgaagtcaaattcagatgctgccgcaataaaacaaggctccaacggcagtagcaataacaatgacatgggttccactacaaaggatgttgtgacaaaacccagcacaaataacgagagggtgatgttgccctctgctattaaggctaatggatacacgtcaacattccatcctgtgcagcagtggatggttccagataatgcgacagcagggaaagcgaaggctgatgaagtggccaacaatgcaggcagaaatagtcatcctggtgacgtgcagagcaacctgacgcaacaacatcgtccaacccttcattacgtccattttgagaatagtggatcaggtgccctgcaatgtggttcctccaatgtatttgatcccccacttgaaggccaggctaccaataactatggtgtgaaagccgggagcaactcaggcagcaacaaggggcagaataatgggagtacagctggtgcgagcacggctgctgcaaatgctggacggacagatacagagatacgggctatcgataaaagtggacctggaggtggcagtgggagtggcaatgacacatatgtcagacggcttgctgcgagcatgacaccacgacaagaacagctaaagaaatatagagagaaaaagaaagatcggaactttgggaaaaaggtgcggtaccagagcagaaagaggctagccgaccagcggccaagggttcgtggacagttcgtgaagcaagctgtgcaaaatcaagagggagatggagagagatgacccccccccccctctggcttcagctcatggttgttagacgtggcggttgatgattcttccttctctggtgtgatctgatatgatcgacaacacaccatccttccttttcttcattggtttcttcacatctagaatttactgcctgaccgggaaaaaataagctaggaacttctatacatgtgtatgcatttctaatcatgtagaagaataagtgtgtcttgactctagataattttaggtagagtcatgctcgctctcctacattatgtgatgtaactgaagtgttgttgtgttgtcatgtatggtcttggatcactttctgtcaatatattactagcccacaactactattaatttgatgagatgtatataattaaaaatattgtaatagtccttcctttggtaggtagacaacaaacaatcttgaattcagtgcatacataaatcactgta

SEQ ID NO: 34253 - DNA, 2416 bp, Zea Mays
agaatttttctatggacacacgaagagtccgcaaaaaataatcaactcgttttttttctttctccgctcctccgagtgaccgagtccaaggcttcgttctgctctccggctctcccgcatccaccccgtctcatccccaatccgaccacctcatccctcgcctccatggccctacccctcgcgtcaccggcgggggcatgagccggtgactgctcacgcggcctcgtctgtctgcgcacgcgcgcggggtcggcgagtgagcattgcggcggtccgcgatcgcccgtgggggagcatggcgtcggcggcggggtcggccggcggggccggcgcggggtctggcgggctgaagacctacttcaagacccccgaggggcggcacaagctgcagtatgagaagacgcactcccccgccgtcgtgcactacagccacagcggcaagaccgtctcccagatgacagtggcatatttgaaggagaagccagcaggccagggttccacgccttcaacaccaagtgctggtagtgggatgcggtctgcagctgcaagacttctcggcactgggaatgggagccgggcacttagcttcgggagcaatggtaccagcagggctgtctcaggaagcagccgcatgggtggaggaattggtgtgtcgactagtgcaagtggatcgcaaggcatggcaaactatgatggaaagggcgcgtacatcatatttaatactgcagatacactcttcatcagtgatctcaactcacatgacaaagatccaataaagtccatccacttcagtagctcaaacccgctttgccatgcatttgacccagaggccaaggatgggcacgatctgcttgttggggtgttctcaggagatgtctattcaatgtcactgaggcagcagctgcaagatcctggaaagaagcccgtttcatatcagcattttgttaatagagacaaagataaagacaaagatccaagtcaaggtggcgctgccagcagtcggagcacttgtgttgcatgggttccagagcgtgaaggaatttttgttgttagtcatgctgatgggaatctgtacgtgtatgacaaatgcaaggatggaaatactgattggacatttccaactgtaaaggatcaaagtcaggtgctgatttcacatgcaaagtcgagtaaggtatctcaagctacatgatatctcttttactaaaaattacattgacatggctatgtacgttccataatttacttcagggtattagtaaaatgttttttttctggaaaattgttatggagacaagtgctttgacctcctgcaacactctattgccctttctttgtagctgacacataccaaaatatctatcataagtacctgaaggctgacaaaattaaaggtgtgcactggcgttggctgcattcttgcctcttggtagtcgacattaaagcataaacttgtgtatccttggcctgacctttttatcagctaataccagctaccgaatagtactaaacccattccagcaggtcatactggaaatatataatataagtgtgtgaaacaattatcattgctgtgattttatgacaagatttgcgaagtacctatgagagttacggcatgtttggttgtcttgaacaaacttgcccactttccttgcttggcaaggttaggcaaggcacaggcgaggttagccaatctagcactccttccaaagcaagggaaatccccaccttgcccaaattcaaaccaaacaaagcttcatgagtttttcttctctaccttgctaggcaaggctagacaaggagcaatccaattgcaaggtggcacatctgtcaaggtgcaatcaatgacatttccttttcaccggatggtgcttacttggcaactgttgggcgtgatggccatttaagagtatttgactttgctaaagaacaactaatatttggtgggaaaagttactacggtgcactgttgtgttgctcttggagtgcggatggcaaatatttgttatcaggtggtgaagatgatcttgtgcaagtatggagcatggatgatagaaagatagttgcatggggtgaagggcataattcatgggttagtgcagtttcttttgatccgtattggtccccaccaaattctgatgaaacggaagaaaatgtcatgtatcgctttgggtcaattggacaggatacccaactgcttctctgggatctggcattggaagagattgctgtccctctacgccatccgtctggtggctcaccgacattcagtagtggaagcccatctgcacagtgggataatgcgtgccctccagccggtgttctacagccttctccacggatgcgagatgtgccaaagctctcacctctcgttgcacaccgggtacatgtagatcccctatccggcctggaattc

SEQ ID NO: 34254 - DNA, 1343 bp, Zea Mays
ataaagaatacgaccacagcagcactcgtcaaccgcgtggtctctttaaataacccgcgcgcggctactgcagcttccattccatcacagccaactaaagagaaggagagcgacgcacacacagacgccatggaggtgacaccaaaccacaccctgaccgtgaccgggtgggcggccatgaacgagtccgccggcaaggtggagcccttcgtcttcaagagaagggagaacggccctgacgacgtgacgatcaaggtgcagtactgcggcatgtgccacacggacctgcacttcatcaacaacgactggggcatcaccacgtacccgctggtcccggggcacgagatcacgggcgtggtcaccaaggccgggcgcaacgtcacgggcttccgcgtcggcgaccgcgtcggcgtgggctgcatcgccgcctcctgcctggactgcgaccactgccgccgctccgaggagaactactgcgaccgtgtggcgctcacctacaacggcgtcttctgggacggcagcgtcacgtacggcggctactcgcgcgcgctggtggcggacaagcgcttcgtggtgcgcgtccccgacgcgctgccgctggacgccgccgcgccgctgctgtgcgcgggcgtcacggtgtacagccccatgaagcaccacggcatgctggggcaccccggcgccaggcccggctcggcgccgaccgcttcgtcgtcagcaccgacgacgcgcagatgcgggacgcggccaggtccctcgactacgtcatcgacaccgtctccgccaagcactcgctcggacccatcctggacctgctcaaggtcagcggcaagctcgtgctcgtcgccgcgccggaccagcccgtcgagctcccctccttcccgctcatcttcgggaagaggaccgtcagcgggagcatgacgggagggatcagggagacgcaggagatgctcgacctctgcgcccgccacaacatcacctgcgacatcgagctcgtctccacggacgggatcaacgccgcgctcgcgcgcctcgcgcgcaacgacgtccgataccgcttcgtcatcgacatcgccggcgactccacctcaaaactatagttcattcaattcgttgcattaccattatgggcaccaaacctattatcatctatcaatatcgtcaccagtggcaggcatggcctctggttgcttgcattttgctctctatccatatcaagtgtgtgtcagcatgggccagcgtgcatattgcgccattgcttgcagcaaataaacgttcatatatacacatgtgctcgatattttcaagagaattgcttagagcaaataaacgtttcaaatttt

SEQ ID NO: 34255 - DNA, 2896 bp, Zea Mays
cctcaacagttgctctcctgtcttcctccccaactccgtcgatccgcctcctcctccctctccagtcccgttgcacttcctcggtcccctccttcactccccccacccccaccaatggcgtctcctcgccgccgctccctcccactccgcttcctcatcttcatccctgcccccctcttcctagtcctcctcttccaccgctcctctcattctaccgccccgcttctccacaccgcaggctctggctccggccccagctctgatccccgccgcttctccctcctcatcaagctcctcgcctacgaccggccggccgcgtttcgccgctgcctccgctctctcgccgcagctgactacgatggggaccgcgtcgcgctccacgtcctcctcgaccaccgcccgcccaactcctcgttgccccccctcgccacgtcgcacgagatccttgacttcgtcgatgcgttcccgtggccgcacggagagaagcgcgtgcactaccgcgcctccaacgcggggctccaggcgcagtggatagaggcatggtggcctggctccgacgacgagttcgccttcgtcgtcgaggacgacctccaggtctcgccgctctactacaagttcctgaagcggctggtcctgaggtactactacgaccgcgagaactacagcccctacctgttcggcgcgtcgctccagcgccctcggttcgtcgcaggtaaacatggaaacaagatacagctggatagcgagactcggcttttcttgtatcagatggtaggcacgtggggtcaacttctctttccaaaaccatggaaagaatttcgattatggtatgatgaccacaaagccaaaggactcaaacctattctccaaggcatgaaaactacagggtggtataagaagatgggtgagagaatatggactccttggttcgttaaattcgtccactcacgtggatacttcaatatatacacaaacttcctgaaggaaagggccctgagcgtctcccatagggatgcaggtgtgaactacgagaaaagtgttgggccagattctactttgttggatgggaagaatcttgatttcaatttatgggaactgcagcctttaaagaagctaaagtggtatgatttctgcttcaatgaagctcttccagggagaattgttagaaaaaatagtgaactcggttctatgctcaaatccctgcaattaaaaagtactgttgttctcgtaactctgtactcaatagaagagagatttgcaagaaacttgatttgccatcttgacaaggcaggcatgaagaatactattttccttggtgacaattcagagtttctggatgaccttgctcatagaggatatcctgtcattgatggcgtcaattttcttcagagtatcagattgagtagtttgcagggctctgacggttttgttcaggaaacattggttatatcttatgtgataaaagcttgcctggacctgggatataatctatggctactaaatggaaatatgatttcacttggcaataagttgatcgagccatcagatcagtctgttgacttctttactgcagatgaagggttgatgtttataaggagctcgctagacatgaaaaacaaatggaatgaacttgccatgtcgagagtgaaagcgatgtgtacatctagtgatctgtctgtttccatcaaacagaagagttttgtccatatgctaactgaagtgatggcgagcagtgctggtgttaggctgggaaagctggatgaggctatgagagttattgagttagggcctaacacctcaaacagatcaatattagaagacaaaagtaatgtgcttttctggtctcgcagtagggcttcagattcagttcaaaagcaacttgaaaatatggatttatggttggttgactcagattcgtcttgtagttctgttgtttgtcaccaaaagcagaagtagccaggttgttttggcacatcacttttgcttcactgagaacaaaaatggtgccatcataggggatccatggtaaccagctaagtggcactaatatattttccaaaaatcatataatgacatgtctttagatgcatgaggggaatcagccatattgtttgatatttgtagattatgcgatgaagctgttcgatcaaatgtctgtttctgaattatgattacagttagctatgccaccacagataaccatcttggagttctgctcttgccatgaatgaattttgtgctgaacacggctatagttttgaggttctgaatacttggatccttttttggtattgtgagggctaacgaagtcttcagttaggtaacctgctaattcaactcacaggagcagttttggatattatatcctgctacgtaccatattgatagcaatgccccaactacaatccaatccctgcagacactcaaatcatgggaggctgaaagcggcatgtttcctttttgttcaatgtacaaagtactcactgcacctcccggcgccccctgtcggacagatgtagaaagcgtgtatctgaagaaaatccggcaggcagatgcggttggtgcgtgcattttcactggcagaagcaacgtccgcaggaaacccagctggaaagtggttcggcgattttgacagatcgatcagagaacccggagatgattgtgcagcagcaactagaaagtagcaagtgtgtgctgccgaagttgccagaagcgatttcccaaccagagttggcgctcaatgttttcttagcagcgccgatttcctccccacctgaacaaggtgtgcttgcggcatcatctgtcgctgtatccaacttggaacacaagcaagcatgtactatattatatatactaagctgcgacagaatggtccgccggaaaatgacgtgcaggt

SEQ ID NO: 34256 - DNA, 652 bp, Zea Mays
tgtcacggtgcactaataatcgcaaatctctaccaaaaaatccataacgcacatacacgtgtatttcggaccacacatgttcatattacaacaactaaatatacaattcatgaatcgaatcaaaagtaatttataaaatattttgggtcgtcttcaaccttgagtttgcacgtgtgacggggagagtttgacgggggttcggcctggtggagaagagtaggggctcgacttcagatggcggatggcgtagctctggcgaactccatgggctccggcgatgacgaacttcggcgacggcggcggtggctctaacggcgaggagagtgagagagatgggggcgagtttgggtaggggagaagtgagagagagctctgctgccctcttatagagagagggaaggggagaaagggacgtcggcgtcatcaaggaagccatcaatggcgctgctgttacctgctcgtaatggagaggaggaatgagggggaggaagaaacggatgcacgaagtccattaatcgcaaaaaatgaaacggtcgcgggcgtgcagtcgggcgcgctgggcgcggcttggggcacgcgcgcgtcgcgcggcggtgatgcgcgcagggagctcggcggctcgggctgctgcgcgggactgtgcgcgcagggc

SEQ ID NO: 34257 - DNA, 1578 bp, Zea Mays
gaattggttaggttatagaagcccgcctacggaatacttcccctatgcagtggacggacggactgtgcctgcggaaaggagtaagggggaaaacatcataggtcctctttgcgcgacggccgccgcctcctctttgtagtttcattccgccgccgccgctccccgctctctcctctgcttgcggactgcgtggagcaccagcggcggccagcgggcaggaggagctccctccccaaacagagaggggtggggtatcagtgcgtgcgctcctggaggagggcgtggaagagcagagcaggcggcaagcaggggtttgggaggatggtttcgctctcgacttggttccgctatgccgcacacaagtttgattactgcatctccctctcgttgaagaaatataatgtgggccagatcagcagcacgcagctaactgatgtgatattcaaaaatttcttccatggcaagctcacctacgtgtgtcagaccaaaggggaagaagccatggctcccatcgtatctccaactggaggagccgtccttgtcagaaagctcgcaaatttgagccccacatccagtatcgctgggcaggtcaacctactcaacgctgtttcctgcagccatggatgccacgtccagcagttcccgtgcatgcgctcaagtgtcgactccgtgccctgcagggaagtgtttgtcggggacgttgtcttgttaaaagacccagagaaatctggcaattttgttattcgacgactggctgccctggaaggctatgagatggtctctaatgatgagaaggatgagccgtttgtgctcgagaaagaccaatgctgggtcctggcagacaacctagtccttaagccaaaggaagctagagatagccgcttgtttggacctgtcccaatgactgacatccttggcagagtgatatactctttaagaaccgctgttgatcacggtctagtcgagaacagcggcatggccacgaaactggatggtccagtactggcagtggagcttgatgtggaagagttggcgaagaacaataaggcgtagacacttgatgttttcgacatgctgcgctataactcaccttaacaatggatgttttttttttgtttatgatctgctgctgcttcaagtagaagtgcattggaatgttttttcacggtttgcctgtggagcagtcaataatggtcttgacagataacccagaggccgctggaccgtgttcactcagaattctcagcaggatacatcgtgtgactgtaatggttgtttttagggtttcttattcatgaagttgccgtgaatcttgtatctgcttgtgttcatggagccacggtccacgggtaagctgctgctgctgcgtcttgtagcagataaaccgtcaagattgtttaggcctgaaagggatcaaaacgttatgctgatatattgatctgaagtggacataggtaaaaaatgtctgcataaattttcgtccaatctgggtactgggagaaaagagcagaaaatatatggttacgggttcttgtctgtacattctaatatattttattacatctctttaaaatattc

SEQ ID NO: 34258 - DNA, 3350 bp, Zea Mays
cgtctctctgaccctctcccctcgtcccgaactggcgaacagtaagcgaaacataaacaaacaaccacggacccaatgaaatcgagggaaggttcacgacacgctgctccccaccactaaccgcactcgattgagcgccatgctgcagctccagccccctgggttcctgcccatcccgcgccggcgcgtcaccgcccgcgggcgtcgcgcccgccctgtcatcgccttcaactcccagtggaagatccccgacgtcgacacagatgcggtgcgggagcgagtgcggtcttggatgtctctggcgcggggcgcgatcgccgacgcggggcgcgcggcgcgggagggagggaggcacaaagaggagcccgagggtgggaagaagaagcagcggaaggaggtgaccgtggaggagcaggcgttcgttgcggtgccagaggtcaccgtggagccgcgggtgccccagggttggctctcgctggacgccgtcgtctccatcgagcagttcgccaggttgaatgggttgacggggagacaggtgcagaggatatttgaatcacttgctccagagcatctgcacaatgacgctcgaagcctggttgagtatagctgcttccgctacttggcaaaagataattctgacttccatccaaacttgaaggagcttgcctttcaaaagcttatctttgtgactatgcttgcttgggaagatccatataacgaagacagcagtccactttcttcgctagacaactattctgtattgggaaggcttgttggagaagatgcctttgcccgaattgctcctgctgttgcaggtgttgctgatgtttcaacagctcattatctctttagggctcttgttggtgcagaaaagggactttcatttgatctgtggacaacatatctagcggaacttttgaaggttcatcatggcaggcaaacacatcaaacgggagataattttttgtatgatgagaaagtcttatgcattggctctagtaaaaaaagacctgttctaaaatgggaggaaaataccgcatggccaggaaaccttaccttgacggacaaggcgctgtattttgaggccattggactgtcaggtaccaagaaaccaatgaggcttgaccttacaaatcagaattcaagggctgaaaagacgaaagttggaccatttggatccaaactatttgactctgctgtctcagtttcttctggttcaatgtcagatgaatggacattggagtttgttgatttcagtggggagatgagacgagatgtgtggctcgccttcatcagtgaaattatttcagtttatagattcattcgtgaatatggtccaggtggtgatgatccagcaatacataatgtgtatggtgcgtacaaagggaagaaaagagctgttagtagtgcagcgaacagtattgcaaggctccagtctctgcagttcatacggagattatatgaagatccagctaagctagtgcagttctcttacctgtccaacgcaccatttggtgatgttgttcttcagaccctagcagtgaacttttggggtgggcctctgactacaaaagccagatctgcaaatcatagatcaactcagtggcatagatcttcagaggacccatctagcggtcgcacacatgtttacgacatagatggcagcgtgtacttgcgcaagtggatgacgtcccccagctggacatctagccactcagccaatttttggagaaattcttctgtcaagtatggtataatattgagtaaatctttagttgtagctgataaaaaccttgtagaaaaggcaatggttgactgtaaagagaagagcaaagtagttgaaaggacacaagcgacaatagttgctgctacaatcgaaggtattccaagtaacattgacctcttcaaggagcttatgcttccttttgcaatagtggctgaaaatttcaagaaactgcaacgctgggaaaatccacgttcaacattttgttttctactattggttcatactgttattttcaggaacatgctttcttatgtatttcctttcaccttgatgacgatggccctttccatgcttgctgtcaaaggactgaaagaacaaggccggttaggtagatcttttggtaaagtgacgattagggatcaatcaccttcaaacacaattcagaagatcctagcccttaaagaggcaatggcctcagtggaaaattatctccagaatctgaatgtctccctgctgaagatccgcacgatccttctagctggccaacctgaggtgacaacacaggtcgcgtttgttctcctagcatcctcagccgtccttcttgtgtttcctttcaaatatgttcttgcattctttacatgtgatcttttcacaagggagctagaattccggagggaaacggtgagagccttcatgaacttcgtgaaggaacggtgggaatcaatacatgctgcccctgtggtcgtgttgccatatgaaggcgctgaaagcagccccaagacactcccggcagaagtttcggggcaagcagaaccccagaatgtccaacgtgggagcggttatgtctcctcaaagaatggcatcagcagttgatccgtgcagctttgagggcatcttgctgtaaacttgtgtacagttaaacttgtatagattactcgagagggcagattaggtatagatcgtaccaattggtggattttgcagagtaatgttccatttacgtcgtagtgaagataactagcgtagacgagaacttaggagagaattttgggtccaattcgctgtcttggatcgttggtctggcagttagggatgtcaagtaagaattttgggtccaattcacggtcttggatcgttggtctgacagttaggaatgtcaagttgacagatgcatgtattcataatccgtttggaacgctgcaggatcggggaatatatatcagcggatgtgcctagacagacaagtgatctgggacgtggtttcagttcaggctgcagagaaagctaatgagatatcctgcacctagaaacctgcttaagtgcgttgatggcatcctgtccgtgtacagcgaacggccgttgattcccaaaggacagcagcaaacacattcggggtctcgcatatgaccgctcagcatggcactaggaggactgattggcacggcacggtaagaacatggcacgacaaatgtgcctcttagccgtgtcatgccagtaccggccctaagcattacatatgtaaaccctaaaatataattttaagaagtttaggtagctcttttgttctttgacaattaatattagagtttatattagtatgtgttttattattgagacatgttcc

SEQ ID NO: 34259 - DNA, 2917 bp, Zea Mays
ctttggatgcaaacgaggagggagcccttgaaggcaaaccaatgcgcaccgccgcttattcattaaccaaagacttgcatccaaccaatcccaccacttgtgtctacctcttcgagtcaggctgatgggaggtgcctgtcagcaactctccgtggacggagatgcgaggacgcctgcgaatgaccgcgatccggccggcctgctccagcatgatgatacggaaaaccagcagcagcagcaggcctgctgggagcgcttcctcctcaaggagactctcaacgtcttgcttgtggagagtgatgattcaaccaggcaggtcgtcagtgccctgcttcgttgctgcatgtaccaagttatctctgccgaaaatggccagcaagcatgggcttatcttgaagataagagaaacaacatagatcttgttttgactgaggtttttatgcccggtgtatctggtatttctctgctgagtagaatcatgagccacaatatttgcaagaacattccagtgattatgatgtcttcgagtgatgctatgagtacagtctttaaatgtttgtcaaaaggtgctgttgactttttagtcaagcctatacgtaagaatgaacttaagaacctttggcagcatgtgtggagacaacggtgtcacagtaactcatggactaagcttgctgtggagatcgacagtccacaagctatgtctctggaccagttagccgatccagccaatagcacctgtgcacaagtaatccactcaaagtcagagatatgtagccacagatggctaccaggtagcagcaacagaaactgcaagaagcaaaaatacactaatgatgactttaagggaaaagacttggagatagatggtcctggaaatctatatatggatcaccaatcttccccaaatgagagacccatcaaagcagcagatcatgaaaacaattccaaggagtcaatgatgggaaatttaggggatgcaactgttcgagctgctgacctaattggttcaatggccaaaaacatggatgcccaacaggcagcaagagctgcagatacccctaatttctcttctgaagtgccagaagggaaagatgactttaagggaaaggacttggagataggtggccctagaaatttatatatggatcaccaatcttccccaaatgagagacccatcaaagcagcagatcatgaaaacaactccaaggagtcaatgatagaaaatttagaggagccaactgttcgagctgctgacctaattggttcaatggccaaaaacatggatacccaacaggcagcaagagctgcagaagatacccctaatttctcttccaaagtgccagaagggaaaggtaagaatgaccagcatgataattatgttttgccatcacttgagctgagtttgaagaggtcgagatcatgtggagatggtgccaacgatacagtcaatgacgatgaacagcggaatagtgcattaaggcgatcgaatctctcggcttttacaaggtgcaaaacataatatcagtgtcattagtgagttatgaaagcaacagtatgttgggtactaacagttaccacttttattgcaaggtaccatacatctgcggcttccaatcaaggtgggacaggattggtaggtagctgttcgccgcatgataacagctcggaggctgtgaaaacggattctacttacaacatgaagtcaaattcagatgctgccgcaataaaacaaggctccaacggcagtagcaataacaatgacatgggttccactacaaaggatgttgtgacaaaacccagcacaaataacgagagggtgatgttgccctctgctattaaggctaatggatacacgtcaacattccatcctgtgcagcagtggatggttccagataatgcgacagcagggaaagcgaaggctgatgaagtggccaacaatgcaggcagaaatagtcatcctggtgacgtgcagagcaacctgacgcaacaacatcgtccaacccttcattacgtccattttgagaatagtggatcaggtgccctgcaatgtggttcctccaatgtatttgatcccccacttgaaggccaggctaccaataactatggtgtgaaagccgggagcaactcaggcagcaacaaggggcagaataatgggagtacagctggtgcgagcacggctgctgcaaatgctggacggacagatacagagatacgggctatcgataaaagtggacctggaggtggcagtgggagtggcaatgacacatatgtcagacggcttgctgcgagcatgacaccacgacaagaacagctaaagaaatatagagagaaaaagaaagatcggaactttgggaaaaaggtgcggtaccagagcagaaagaggctagccgaccagcggccaagggttcgtggacagttcgtgaagcaagctgtgcaaaatcaagagggagatggagagagatgacccccccccccctctggcttcagctcatggttgttagacgtggcggttgatgattcttccttctctggtgtgatctgatatgatcgacaacacaccatccttccttttcttcattggtttcttcacatctagaatttactgcctgaccgggaaaaaataagctaggaacttctatacatgtgtatgcatttctaatcatgtagaagaataagtgtgtcttgactctagataattttaggtagagtcatgctcgctctcctacattatgtgatgtaactgaagtgttgttgtgttgtcatgtatggtcttggatcactttctgtcaatatattactagcccacaactactattaatttgatgagatgtatataattaaaaatattgtaatagtccttcctttggtaggtagacaacaaacaatcttgaattcagtgcatacataaatcactgta

SEQ ID NO: 34260 - DNA, 1371 bp, Zea Mays
cgaatagtgagaaaagctctgctggtttttcgtggctgctcatgaaaagttcaggttcataaaagcaaatgaggataacaccgttctcaatgccttgtcattcagcacttccaaaattagactgcttcggagcttgacaattgagcaaaaaaactcggttcaggttcttgattttgctgccttctcaagacctgaatacgaccttcctatattttgtgccaatgccttctcatcccctgcacggagtattgttgtcttggacctcaaccctttgtatgataccactgaacacaaggattacagggaaaaatactacagggctttgatgccccttgtacacaagtacagtgagatgaaatgcagcttctgccctggggtggcaagattacaagtgagtcgctgagattcttctctcccattgttatctggacggtattcgagccaagcgaagccaaccaccaagctctatactcggccttcgtggattactatatggtctggcttgagttcatggacggagcagttcgcgaaagtagcaaagaaaaaatcgaccgcaatagagaagcgcaacataaatatctcacatggagagcagagaaggtttggtcgatcttccacaagaaaagaatcgtttgttccatgcaataaaagatcgtattacatacttgattgtactattgaattcctgttgcttactagcagttcattaccaaagaaacaaaacaaaatactgttgcttagctggtgtcctagttccttgtgtatacatgaaatacaacctgtaccctgctttcttgatcatttttcaggatcctgggtacccgctgctaaagaagttgatcggtgagagtggtgccaaggacctggtgagggagttcctcttcgaaggagttggctcgctcggaaccaagtcgtttctggagtatttcgccgagtacgcgcaagaggacgggacggtgaacaagaagcggagcatggcggggaagtcctttggaacccgaccttgggacgcccacggactgttcgtcggcgacgctgtggatggatagcggccaagcgggggctgttttgcttctacataagcagtttcatctcaatccccgttgtttattcacggaggacttgcgtagtggtttcagttgttgtttcaagtggttttgcttcggcaaaagtactggacggttttgctggctcaggtttcagatcatcttcaacctttccccatggcattccatgcgaggccggctacaatttctgttgtctctttacttcttttatagcattgttcatcatctttttcgttgtccggtgacttggctttggttgctgccgctgctcggtcggtggttttaaacttttgattcgagtcct

SEQ ID NO: 34261 - DNA, 2489 bp, Zea Mays
acagctcatcccccggctgctcgctttttatcacttctcccttctcgaaacacagacgaacacctttcttttattactctcctgtccccctccctctctcatcaaccatcacctccgtcccgtccgcctcccattcgctcaaaccggaaggaggaggagggcgaattaaagcctcgcctcccgcccccgcccccgcccccgccccccaccgcgtcgccggcgccgatggccgacggcggggccggcgcgtaccgggagttcaaggcgctggcggaggcggcggaccgcaagttcgcgcgcgcgcgggacctgccgctctacggcggcggggaccaccacagccggaaggcgttcaaggcctacacgcggctctggcgcctgcagcaggagcgccgccgggagctcgtcgccgccggcctccgccgctgggagatcggcgaggtggcctcccggatcggccagctctactacgcgcgctacctccgcgccgccgagccgcgctcgctcgtcggcgcctacgtcttctacgaggccatatacagccgcggctacttcggcgcggccgcggcagcggtggggacggacggcggcggcggcggcgtcagccgccaccaggcgctcctgatccggtacaaggagcttcggttcatcgcgcggttcctcgtcgtggccatgctgatgcggcgggccgaggcggtggaccacctcgccgcacgcctacgtgcgctcgtcgaggagaccaaggctgcgtaccccaaaacaaacttcaaggaatggaagcaagtacttcaagaacttggcagatttttgaaggctgatggagcatataaaggatctagatcactaagatatgacaacttatttgattcttatccatcgaaccttgtatctattgcacgattccattcaaaaagggtgctcaaactgaaggaagctgtgctaacaagctaccgcagaaatgagatcaagttcacagaactaactttggatacattcagaatgctacagtgtttagagtgggaacccactgggtcttatcagattgctgctaaagaacttacagaaaatggcactgtaagtgatcagagtggaccctctggtctgattgatattcaactgtcaacagaaatatctgatggaagtcttccttcaaatcctcaaaaggcaatcatatatcatcctacagccgctcatcttttagcagttctagcaacaatttgtgaagagctctctcaagatagcattttactcatctatatatcagcgtcagggtctgctgagcagagttttgctagtcaaaagtttggctctagctcatctcgtgcgagggctgcctctgccttccccactgataagccaaactcgcataacagttctgataatcatctatggcttggcccccgtggaagtggaggtccaaacaatctttatccagatgatctaattccatttacaagatatccactgttccttgtaattgatagtgaaaatagccatgcattcaaggcaggtcatacataattcagagaagggagaaccagctgctttattactttctcccaggacatcatcagccatgcctggagtagaatccacggctcacggaagccagtttacatacttcctcactgctccaatgcaagccttctgccaactagcgggaataacttctgacatagacactgatacatacgcaaatgcagagaacatacttttctctgctttggaagaatatgaaggaatactctgcacttctgttggattaaacaatgtctgggggcaaattttaccagacccatttctcagacggctgattctcaggtttattttctgccgggcagtgcttttctatttccactcagatgagcacgaatatctaccgacctgcttacctagtcttccagagtcagtctccccgcatgcagaggccataagaactcctatcctttcgcttgcagaaaaccttgtcgtcagcgaccggtttgacttccgagactccacacgcaacaagaaatgatgaccagcagcaataaccataactcatgccttctgtagatacctctgtggtaaatatagtccagcgatttgttgattgttttgcatttatacagccaacggagcaattagtcagcaccaattagcagcggcatccgcgcctggatggtgtgaattgaatggcgatatgaagaattttgacctgtctccgttgagcgtctgtacaagtttgtttaggtgttctctaatttgctctaggcactgtaggcatgtagccttgtcgtcgattttttttctattttgttgtcttggagaggacggtttgtaagctggaagaggcgtttttaaagtactctagaaggcagattgttttgtagagtttggttaactcaccatatttgacggcagtttacggttttccaattttcgtagcgctacgtttgcctcgtgctcctgttggattaatgtgggcttggcccaaattaatactcaat

SEQ ID NO: 34262 - DNA, 3617 bp, Zea Mays
aacccaacgcaacccaatctgtttcaatctgtagaacaaccacgtggcgtccacttgaaccactctgtagagcaatcgccaatcggcagcttcgtcatccctcgtcgtcggattgtacgctccagctctccaagatttgccttggcttgccgtgccctgcgggagccaagccaaggacggctagcgctcgccacgcgcgatgtccgggcttcctccggccgcgcgaccgctgctaccgtctccctgcgcctcttcctccgttgttcgggcgaaggcagcgtcggcatgctgctccagcctaaagcagtcgcgcccaggccgaagtgctgccgcccgttccaccgtcgccgcgcgtcaggccgcgccgctcttggctgcggcgctcgtccttgtagcggcaccccctggcctgcctgctgctatctcaccagcatttgcacagccagtttcagaaggcgcagcgctgttccggaaggcttgtattggttgccatgacatgggaggaaacattctacagccaggagccactcttttcctgaaggacctcgagagaaacggagttgccacggaggaggaactgtataacatcacatactatgggaaaggaagaatgcccgtcaggttttggagagaaatgcaccccaagaggacagtgcaccttcggcccccggctatcggaagacgacatcaagatcctagcttcgtttgtcaagtcgcaagcccagaacgggtggccgaagattgagggggatggagattgatcaaactgaaaaaacgatgagaagacggtgcttgttagtcagatgaaaatggtgacgggaagatagtgtttgtatagtttaggaatctggtctttctgaacttgtaaccttttagtctctgtttctgaactgaacttgtaaccttctggtccgtgtttcagttttctgaacttctattccaggcagagtccacaccttttccagccagccgaacaaggctgacactgacagagttcagtgctcaggcagggtccccaacaagtcgcagtcgcagctcagctcctctgatcgagggttggtgagttcggttggtgacgccgcgcgaactgctaccaggcctggcgtggcgtcggcgtggtttaaacacgaagaaacccacgccctccgtcgcgcggctgctgctggtgcggaggggaggtggtggggaaggaaaacggcgtcgcaactcccccgcccgcctcgaaccgacatgttgccgcgcacgcactcccaccaggcgcggcggcgctccggcctgggcccgcagctctgcgccgcagcggccgcgctcctgctgctcctctccctcgccgtcctccactcgcgcctctcctcctcgtcctcctcccgcttccccacatccgcatcccgctcccgcccctccacgcccgcggccgactccaactcctccgctctcctcgccgacgaggaggacgaggacgtggccgccgcgctcgacccgctgctcaccgtcaccaccaccgccgccgagggcgattctctcgccaaccccgacgacgaccgcatcgatgagctcgacgtgttggacgaggacgccgcgggcgccaacgaggctgactccgcctccgcctctacggtgggggccgccacgcccctcgtatgggaccacgtcaccggcgccgctcgcctgccgttccgcctccccgcctccgtcgaatccctgcccgcggggctgccgcggcttgactccccgcgccggatcgccgccgcagccttcggatcggacgacgagctggtggatctggaactgcgggtcgagatctcgtccatcgccggtatcgaggacgcgcttctcctgaagcccgcctctggtaaggccgccgagacgcggctccgcgccgggtgggcacgctggctggaggggaaggccgactacctacggcgcgatcggatgctccgctccaacctggaatccctcaatccgcgcaaccacccgcttctccaggatccggacagccccggcctcacttctctcacccgcggcgaccgcatggtgcagcgaatgctactagccgagctcgacaagcccgcgtccaagagctttgagcggcgtaggcttctatcttacgagaacaagcagagcatgacaacaactgtgaaggagaagccgcagacgggaaggaggtggggatatttcccggggatcgatccacatttgggattctcagagttcatggagaggttcttcgagcatgggaagtgttccatgagagtgttcatggtgtggaacagcccgcagtgggcgtatgacatcaggcaccagaggggactggagagtctactcaagcagcacccagatgcctgtgtagtcatgctatcggagacactggaactagagtccttccaccaattcgtcaaggaaggatataaagttgctgttgcagtgccgaatcttgatgagcttttagaaagcactccaactcacgtatttgcatcagtgtggtatgaatggcggcagacaaaatattaccatttgcactacagtgaactagtacgccttgctgccctttacaaatatggtggaatataccttgactctgatgttattattcttaaacctttaacatcgctccggaattctattggtgccacaaatcatgtctctggaaattcccgttttggtggggctgtgttagcatttgaaaaacagagccctttattggaggagtgccttagggaattttattcgacatatgatgataccctcgtgcagtggaatggggctgaacttatgacaagagtgataagcaatatttctagcagagcagatgaaaacagggggcatcttgacattaagttggagccctttgttaaattttaccctataagctctactgatattatacgatatttctcagagcccgataacatggtccaaaaagcacatcatgatgcaatcttttctaggatcgtgaatgactctaccactttccatttttggaatggcatcacatctgctctagttcctgaacccggcagtcttgtttcgaaaatccttaaccgttactgtctccattgccttgatgttttatagttgcaacagtctgaagctcctgctaagagctttattttggtttagaacaggtacacagaagaaatctttcaatgaggtactcagaatggctagtattgctgaatcttgcaaaacattgtgatggggggaaaattaccggcagcactgtgtatatattcttttcactaaggtttgtgccggagctgcgcctgcaaagtccaagcatgttgacttgactagttattgtcgatagcaaaagtcttcctcctggcaatacagaatgcaacaactgaagacacttggaactagagagttttgactagttcggtaccccttctatatttgcacatatactgataattttcacaatttgatattttgaaaataacatgattcgtgtaagacagtagaaattgaaggaccatataccgaattcactgggtttatctagatgtttggtaaacttttatttctcagagcatgattttgtctgaattaacgacttgggaacgagaatgtcagcgttgtaagcatctgcataaaattatagtgcaggtcttggc

SEQ ID NO: 34263 - DNA, 5129 bp, Zea Mays
atgacgccaaaggctccaagaataactagagaattgaagcctgattggagatcacggggaatcttctccacagccctgctccaccagtcatcaaggctgcaaagagcattgtctggtgattcatatataactggtctcttgagtgaccttgagaaagctttgcagagtggtgttttgattataaaacttcattatgcaatcgacttccttgatctagtctctagatattaccctcatgaagtttctcgagctgcttcccttgttttgagtggtgctgtttctaatagatcatttcagccttatgaatcccacattccatatcttcttcactttttggttgactacaacttgtatggaatggggcacatacatgtcaaaaacttcaagtttcgtcctccattgccagttgattttcatcctaagtcatctcttcgcaggaaggcacagtcagataatttagaaataaatagtccaacagtttggatatcttcaacagtgtcgcattcttctatcctgggtagttctgccccttcgcatcatttgggaggaaccaatttgagcttcgctattcgacagagttcttcaatgcttgaagctgattctagagtagaaggtatcctaaatgagaaatataagatgtacacttctctttctcaaacaacagaagatacaaaaatggttcagtcacttgtagcagtttgggaggaacttgaacgattaagactgttggaggaaacaaaatatgctgatctgggtagacctttaagggaagaagttcttaaagattttcttcatggtattaagtatgagagtgccctttctgtgttgttttcacaagaggggccacatcacaaagtttccaccatagaagagtctgaaaggctagaaaggtgcttaaaatcgttgactgatattattgggactgttacattctcacaggataactactgtggtaatattgatgttggtaattctgctgatgtgcaaaacgacaaacccgatgcaagtctttgctcagggtcattagaacaaaacatgcagattatatctccagagagaaacagtgaatatcctgtgtcttcatctgtacaccaaagaacactatctcagttatctgataaaggtgaaaagcatctggatgctgaggctcttggacttttaagctggctggcctcttcacaagctgcagaggaatcaactgatgatgaattaactaatgaagtcatcctcagccctttgtttgccaataagtccattgaagttgctgtggagtctgctcaattggattttgatagcgcttctcagcaggagtgtcaggatattcttgattcagttgaccccattagggcagtagaagaaccaaacatacatacatcttacctcgattctgtgaaaaaaaagaggcaacatggagatgctgatgattcatgcagtgcaatgtcaccgcagaaggatttaagtgcatctaagaagagtacaattgataaggactatcatgataccataggcagcactgattcagaatcttctagttttttaggtgtacatgattcagtttgtcattctgtgagggatttgatgaggcggaggagatcttttcggcgtgaacagttggagtttggttgttctggagctgcaacatgcaccatggataaagagagcgaaactgtgaattctgggggattggaatttcatgatttcacaagtgacatcccaaacttagcactgacacggatggcttttgttcagaagcctccattgaaggatgatgcatgttctggtttggagagcccttcagattgtgagcaacgtggatgtagaagtcctaggcctttagctgaaaaatcgggattagctgatcttctaccatttttcaatcagaatatggaggagaataagcagaatgaatcatttcaagatatggaaagcacaggggatgtattgggtgtcccaactcattttcaaaatgatggatcagccctatatttgctgacacatgcactttcgccaccatctgcaggagctgtgggccattggctaacccaacaatctagttccagtattttctcgggttacaccaactatgatggagtcgcagctgataaggaagaggcacacagttctactttatcacggaattctcctaccagatttaccaaggagaattctgcaaataaaatgcatggagatgtgatgggatcggctctatcttacaaagaaagtaaacatttggacgaatggcatgatttttcccagatatcagctggaaatgagaaggataggctcacacctctaagtcaaattggatttcgtgaccctgctagtataggtggcgggcaacaactgactatacttagcgtggaggttttaacagaaagcagaggagagctgcgtcctgatccacggtttgatgccattaatgctgtgtctttggccatcgaagatgatgctgacaatactgttgatgttcatgtgtttatacgtggcaacaatgtcaaatcacataggagaaatctggatggtattgctggctgtaatataaatgtcttccctgaagaaaaggacgttttgaacaatcttattagtgcaatatgttcaattgatcctgatatcctagtcggatgggagattcagttaggatctttaggatttcttgccgaaagagctgcttatctgggtataggcttactgaaaagaatttcaagaacaccacatgagttgaatcatccacctaagatcccagttgataactctagtcaggtgctttctgaaacatcttctgcggatgatattattgatgatgtcagtgagaatgattggagccatactcatgcgagcggtatacatgttggtggaagaattgtgcttaatttatggcgtctcatgcgtgcagaagttaagcttaataattactcccttgaagctgtagctgatgaagtactgaggcgaaagataccactgataccaagcaggatattgaaccgatggtttgcaacaggtcctggacgaggaagacaccgatgcatagaatacattagcaatagagctagaatcaaccttgaaataatgaatcaaatggacctggtgaatcgaacatctgaacttgctcgtgtatttggtattgattttttttctgttctttctcgggggtctcagtatcgtgttgaatctatgctcctgagattggctcatacacagaactaccttgcaatttctcctggaaatcaacaggttgcttctcagccagccatggagtgtttgccgcttgtaatggaaccagagtcggccttctaccctgatccagttgttgtgttggattttcagtccctctatccttcgatgataatagcatataacctttgttattctacatgcttgggaaaagttttcccatcaaagtcagatgtacttggtgtcagctcatattcagcagatccacatacacttgtagatctgaaaaatcagctgctgcttactccaaatggggtcctgtatgttcaacctgagataagaaaaggtgtacttcctcgccttctagaggagatattgtcaacaagaattatggtgaaacaagcaatgaaaaagttgagtccatcacagcaagttcttcacaggatattcaatgcacggcagcttgctttgaagctgatagctaatgtcacgtatggttacacagctgctggattcagtggtcgaatgccttgtgcagagcttgcagacagcattgttcagtgtggccgtagaacactcgaaacagcaatatcatttgtcaaccagcatcctttgtggaaagctagggttgtgtatggtgatactgacagtatgtttgttctcctaaaagggcgttctagggaagaagcattcaggatagggaaggagatcgcctcatcaataactgcaatgaatcctgatccagtcacattaaagtttgagaaagtgtaccagccatgcttccttcttacaaagaagagatatgttggctatagctacgagagtcctgaacagaatgagcctgtctttgatgcgaaggggatagaaacagttcggagggacacatgcccagcagttgcaaagattttggaacggtctatcagaataatgtttgaagaacaggatttgaccaaagtcaggacatatttggagcgtcagtggacacacatattatcaggaaaagtctctattctagatttcatttttgcgaaggaggtccgtttaggcacttatagtgcaagggcttccacgctgccccctgcagcaattgttgcaacaaaagctatgttgtctgacccaagggcagagcctcggtatgcagagagagtgccatatgttgtaatccatggggaaccaggagctcgtcttgccgacatggttattgatccttatggtctgctagaagttggctccccttatagattaaatgaacaatattacataaccaagcagattattcctgcattgcagcgtgtttttggacttcttggtgctgacctgaacaagtggtttaatgagatgcctcgccccatacgatcaactcttgcgaaacgccaatttgctgctgctcatggttcattctctcgtgatggcagtttcatccgattaggattgaataataaaacctcagccaaaggaggcagaatagatacatactacatgtcaagccactgctcaatttgtggtgatatgattcaaggatcagagtccttctgcaacaattgcttgaaaagcgaagctgttgttgccacagtagtcgctggcagaacttcaaagttggagcgagaaatccaacatcttgctgctatatgtggccattgtggcggtgcagactggattgttgaaagtggagtcaagtgtatttcccttgcatgcccagtcttctatgaacggaggaaagttcagagggagctggtagtcgtctcagagtcggcaggagaagcagggtattaccctttctgctgcgctgaactcttttgagaacatttttttggggctgcgtttctctgtccataccgtgtaaattgtggaatctgtaacctttacatcacacgtgtgtatagttgttgtatgtaacactgaagaacatgtactggtgaaagaatacatacaatgtataccgtgtcgctcgctgttca

SEQ ID NO: 34264 - DNA, 3088 bp, Zea Mays
gccggctgttcgcagtgtgctactagcgcccactgtacgtataaggaagcggctgtccctggtcctcacaccatcacttgttctctcttctctctctctcgtcgtgtgcctgggtcgaccagcgacctggctagctagctctccagctgcgcgcgccatggccaacccaacagctaccaagcatgctttcaagcgtattttgacgagcctgcttaagcctggcggtggtgaatacggcaagttcttcagccttccggcgctaaatgatccaaggatcgataagcttccctactctatacgtgttctcctggaatcagctatccgccattgtgataacttccaagttacagagagtgatgttgagaaaatcattgattgggagaacacatctccaaagctggctgagatacctttcaagccagcgagatgcattctaatggacaacactggagtcccagcagttgtagaccttgcagctatgcgtgatatgatgccaaagttgggatgtgatccctacaagattaatccattgattcccgtggatgctgttattgaccacgcagtgcgagtggatgtagcagggacctatgatgcattggatagaaacgaggagctggagttccaacgcaacaaagaaaggtttgcttttcttaaatgggcatccaatgctttccacaacatgcaggttttccctcctggttcgggcactgtacaccaggtaaatcttgagtatcttgcccgagttgtcttcaacgaagatggcattctttacttcgacagcgtggttggcacagactcacacaccactatgattaatagtcttggagttgctgggtggggagtaggcggtattgaagcagtcgttgcaatgcttggccagccaatgggcatggttttgcctggtgtggttggattcaaattgagtgggaagttacgggatggtgtcactactactgacattgttcttaccatgacccaaatgctaaggaagcacggtgctattggcaaattcgttgaattctatggtgttggtgtgggcgagctatctttgcctgctagggccacaattgccaacatgtctccagaatatggagctaccatgggcttcttccctgtagaccaagtagcattggactatctcaaactgacaggccgaagcgatgaaactgtgtcgatgattgaagcatacctgcgagctaacaaaatgtttgtggacaagcatgagcctgagacggaacgcgttttctcttcacatctggagctggaccttagtgaggtggagccttgcgtttcaggccccaaaaggcctcatgatcgtgtccctttgaaggaaatgaagtcagactggcatgcttgcctggacaacgaagttggcttcaagggctatgcggtgccaaaggaacagcaaggcaaagttgtgaaattcgacttccatggaaggccagctgaaatcaagcatggcagtgttgttcttgcagcaatatgtagctccacaaacacatcaaatcccagcgtcatgattggtgctggccttgtggcaaagaaagcctgcgaattaggccttgaggtgaagccatgggtaaagacaagccttacccctggatctgtggttgctaccgagtacttgaaacatagtggccttcaagattatctgaaccagcaagggttccatgtcgctgcgcatggttgcgccacttgtgtgggcaactccggtgacctggatggatctgtatcagctgctatcacagaaaatgatatggttgctgctgcggtgctgtcggccaaccgaaacttcgaggggcgtgtgaaccctctcactcgggctaactaccttgcctcgccgcctctggttgttgcctatgctcttgccggcactgttgacattgactttgagaaagagcccattggagttggaaagggtggtaaggaagttttcttgagggacatatggccttcaaaccaagagatcgatgaggttgtggagtccagcgtgcagactcacctggagggcatgtccatgacgccgcctgcagccccgcccacggtgacggaggcctactgcctgctcaaccttggggacagcatcaccacggaccacatctcctactcggggaagatccccgagggcacacctgcggccaagtatctgctcgagtatggcgtggagcccaagaacttcagctcctatggtggccgccgcgggaacaacgaggtggtgatgaggggagcgtttgccaatatgaggatcgtgaataagcttcttgatggcaaggctggtccctggacgatccatgttcctaccggggagaagctctatgtttacgacgcggcaatgaagtacaagtcggaaggtcatgacatggtcatcattgctggctccgagtacggcagtggcagctctcgtgactctgctgccaagggaccaatgctactgggtgtcaagtcggtgattgcaaagagcttcgagcggatccaccggagcaacttggtggggatggggatcattcctctctgctttaaagcaggagaggatgccgattcactcggcctcaccggacgtgagcgctacaccatccacctccctaccagcaccgccgagctcagtccaggccaggacgtgaccgtcacaacccacgacggcagatccttcacttgcactcttcgcttggacacacaggtactcagtgccccacgtatttgacgtatgtctgtaaataagtggcacattcgagcgctcttcgctctgccattgaggtggatcgaagctgccacatattttctccgcaggacatcggcacgaattttgtcttagcaaaccagttaattttgtactctttagattctttaattggttccatgctctctttggtacttttcatgtcagtttgctttgcaaacattatcagcgtgcccttgtagatttcgtaatggttatatgtatatgccctattgaaattgtcattttgctttgcaaaaaaatatcagcgtgccgttgtagattttcaaatgtatatgtctgccgtcaaactctctcgtgaatatgtttggttacaataatggaacaggacggaatgaaacgattccaagt

SEQ ID NO: 34265 - DNA, 1418 bp, Zea Mays
cttccaaattggaaagcacacctccttaaccttgctggttaagatggctgtacagtacatgcggcgaatcattcagaaaagagctaagtttgacataatggatctaaatgttttaaggttggctcccaagatgtttatccctgtactatttggacatggtctgaatgatatgtttattcagcctcaccattgtgatcgtattcaccaggcatatgggggggataaaaatataattaaatttgatggtgatcataattctccaagacctcaatcatattatgattcagtttctatattcttctacaaatctttgcatcctcctctgctgcctgcagcacgatcaaagcttcatatgggagcatttaaagttggtaacataaccaatgagaatttcttctttgaaatcatcaatggtctacggccagcaaacactgcaggttgcagttcatcaaccgatgcacctaacatcccacatgatggcacatctgtaattgaattgttgtctgatagcatgaaccaactgtccattaagaatgagaatcacttgctgcaggactttcttttagatgaaaaccacagcctgccagagattgatagtgatagtgttggatcacgattgcaggataaaagaagtaggcgcaatgaggagtcattttcattcacaagctctaacagagaaagttggggcagatgttcatctttaggagcagccagtgatgaatcattctcaggcgataataatgataagcagaatttgacagtcaaggctttggctacgcctgtaagacaaaaccagaggcaaagccagaggaaaccgattgagaaagctaagcagaagaagattcaagccctatggaagaagattaagcgcgaaaaggtggagatgggggacagcctatcttcgcgtttgaagatgtgcctagggcaatctccgcagcacaagaggaatagatcgtctggaaccattacaacttcatagctctgacaactctactgaaccactgattgtccaccatagattctcccttattctgacctactcattgccacgttgtaacctatataccctaggtgaatatatgctacatgaccgcattgtagcatgccaggatgttcgaaagctgagaaagcacttgtatcatctcttgtaattgcctgaaacaagtgtaattgccatctctggctcgttgtcgcatgcaatttcctttcccctcttgcatcctgtgggccttgtatcatctcctgtaattgcctgaaacaagtgtaagtgccatctctggttcgttgttgaatgtaatttctttctcttgcatcctgtagtttgcggcgctgcaacgcaacaacggcatggtgatgaaatggaatggtacaatgggtttgttgttttcatcttcaatcgccattgttcgcaattatat

SEQ ID NO: 34266 - DNA, 1666 bp, Zea Mays
ggtaatggcgatatgggattttgaaaaacaacactatggtaatgtggagaaagtattggatacaagtacgactacatcaattgaagtattagcgatacatgaatgattaccctctccattgagcaactgtcacaagacctatctgactacctggttcattcatgttattcttttgcagttttgctcatctcattttgcctctgtgatacctacaactagttggttaggcacttgcacacctgaatcagttcccctgcagctgactgcatgctcgcaaagaagttccatcctgatactaataaagatgctgatgcagaaaaaacatttcaagaagttaaccgtgcctatgaggttttgaaggacaatgacaagcgtgaaatatatgatcagcttggaccagaagcatacgagcgtcaagcgtcaggtggtgaccctggagggccgggttttcctcggggtaacccatttggtgacatctttggtgatatctttgataatgcatacagaggtggccaagatgtcaaggtttctgttgaactatcattcatggaagctgtccaaggttgcagaaaaaccattacgtacgaagctgatactttttgtggaacttgcaatggaagtggcgtcccccctggaactgtgcctaaaacatgtaaaacatgtaaaggctctggcgcgatatacatgcagaagggtatatttactgtcgaatgtacttgctccctgtgcaatgggagcgggaaaattgtcaagagtttttgcaagacttgcaaaggagaacaggtagtgaaggggaaaacgtcagtcaagctagatatagccgcaggaagtgacgataatgacatcatgaaggtttttggtaagggtggtgcagatgttgaccgaaataagcctggtgacctttatgttactatcaaggtcagagaggaccctacttttcgaagagaaggcatccatgtgcatgttgattctgttttaagcattgctcaggctgtcctaggtggaactgtcacggtaccaaccctcactggaaatgttacagtcaaggttcgtcaaggtacccaacctggagagaaggtcgtcctccggggcaaaggaataaaagcgaggaactcgccagtgtttgggaatcagtatgtacacttcaatatcagggttccgacggatgtgacgcaaaggcagagggagctgatagatgagttcgataaagaggagtgcgcagaccgggaaagacctgcggttgcctccggatgaagtttttggttcaaccattaattagttttagcaccacactagtttgatgccctcaatttctccaacccgccataaggtgctgtaggcaccaaaagcttattgtaacatttgaatcttatatagcatctacccagtgtgtaacgtatacattacgcgctaaattattgtaccattttcgatttttaaacagaaaagatagcgggggttgtcttcactcttcagtaacattcttttgggggtgtggttgtgtgccaagaatgaagagaggggatattggcaggagaaagtgtttttgaatttaatacgaatgtcatggtaccaattttgtgtcatcaaaattatgtatcactagagtagctgttattaaaggcaatcctaacaacgaaataaccattataatttcaacggagag

SEQ ID NO: 34267 - DNA, 700 bp, Zea Mays
tgcgtgctgcccttgtgcagttgtgctccttccttccttgccccgtaccccgccggcgcgccctgagccaaatcgcaggctgccattgtgccatggacgaaggacctgattcacgccatcttcaagctggtgtggaggcggcgggcggggaagggggccggcggcggcggcagcattgaggacatcgatgcggagcgtgctccagagacatcgaggagaaatcggagcacaactgccaatgcgactgctcttaaagtcagctgcgaacttctacggatatttgtaacagaggctattcaacgctctgcttttatcgctgaagcggaggatggtgctgttattgaacccacccacctagagcgtgtgttgccgcagctgctcttggacttctgaggtaccccatggagcctccaaaagcatttatctaggcgtgtctgctatggaaggatacagatgcctggatgcatcaacagaatcttattgctgatctatgtcttgtaatctgtaaacacacgagatttctatatggctttataaaaatgcatgcatttcttggaatgttttcctgttcgtgttgtgtttgacgagattattgccattataaaacacgacagagttggtttcgatgaaatggagatgtagggaagggcttcgacggtttggaggcgcagacgactgcgaagcgctgatatagacatga

SEQ ID NO: 34268 - DNA, 1626 bp, Zea Mays
cgagcaggcagcgagcgccgcagcccgcagcccgcagccaaacgccgccaggccggggaaggggaacggtggaagagaagtggagcaccagcgaaccgcatatgctcggggttcttcgtcgcgcagccctcgccgcagcgtcatcgccggcggcggacctccgacagaccaagaagtttcatatggtcttaattgggctattgctggaaaaggtgtcattgtgaaagataaggtcctccataacttggaaacatctgagcttcagaaaggtggcgctacttaccctgactttttgtctggtataccacttcatgttagaggagatgttattggtggtgtccctggtgtttctaaagctcaatttgcaaagcttctaaaactggtgacgttccatctttcatccatctcgtgtctatatgttcaagatggcgccattggttcctcagcagaatgtgatgcaaaggttcgggtcattagtgataatccctctgctgttatgttactgtcgaatgtcctttggaaaataccagatcgtgcgatttcccatgacacatcccctttgactatatatgctaccagttcaataagtaacaacgttaagactgttcttggttctggaacacaatatgctaatggatttgctgtggcggatattgaacgatcatctctaatcctatgcggtaaagcatttgctgattcagctatcgtgaaagatgcacttactgctatgacagccccaatattgtctgcaagaggaggcctccctgttccaggatggattctgaactttggtggttctactgtattattgtttgccccagtggaaatcatgatgtcctgcgtagaaatccacaatgctctattgtccattgactgtggtgcagtcatatcttccaaggggtctactgtgcttttcccaacaaaggcaagcagggagcagaaactgcttaccaaaccaactgcagtaattatcgtatcatctgatagctctggcgccataccatctgtatgtaagctctctcctggccaggctgcctaccatttcttggctggatatcacgatggaaaatttgtcccagcatacaacagagccccctctcctgctgacccacttgcacttgcaagttctttattctcacatttgaaagaagatgatacaccatcgtatctgatcaacgctaagcactctggaaagtacattgacggcaatgggtttatgaaattattaaagctggcactatctcacgatcttcctgacatcaaaactgaaggctctagagttggggaactcaaggggaagtacaggagctttctatccagcaagtttggccaatgtttacccgaggaattctctttttaggagatacaccctgaggttgcaatgaacatgtatatttactggcataggtttacattttggtttgaaaaggtgtcagtattcccattctgtctcagtttcaatgtaatactctattaccttacattgcatctttccgcctcctggtgtttggatatactgacgtaacgacaatgtagctagtacctacatgcatgaattgtcttgtgcactccgcttcagtcaaattttgttaagcagcagaaaattggaaactctcagtatacatg

SEQ ID NO: 34269 - DNA, 1596 bp, Zea Mays
ggcagcgaccgttttgtcaccgcaacacccccgccgactccctcgccgccgccaggaatggagtccagcgctaagaagcttagcagcctccgtatcacctcactggatggcgatgatgacgaaaccgaggacccgcatcagccccctccagcaggaccctccgccgctgcagcagattctgatgacgacgatgaagaggaagaagcggaagtgactcttggtgtccttagcaaaccgaaacacccaggcctccttctccgccacttgttccccagcaaggccggcggcatcccggcgtggctagaccccgtgaacttgccgtcggggaagtccagctgctgcggtttttgtggcgagcctttgcagtttgttcttcagatttatgcagcagttgaagacaatgtagcagccttccatcgaactctgttcatgttcatgtgcccatccatggcgtgcttgcttcgagatcaacatgaacaatggaagcacaagcatgggaatccatgtagaagcgtgaaggttttccggtgtcaattgccacggactaatgccttctactcagctcaacctccaaagcatgaccggtctgacaaaccactgtgtccaggagcccatgtatgccactggtgtggtacctggaaaggtgataaaatatgtagtagctgtaagaaagcaagatactgttctgagaaacatcaggcactgcattggcgtactggtcataaaaatgattgcctccagataataagttcttctgctgcttcaaattcagttttgccaactgttggaaaagttcctgctaacactttttggccagaatttgagataaaaatagactatgaaggtagatttgattccgatagtggtgatgagaataactcgaagttgttggtgatgcaaagacatgggaaacctgatgctatgatgcagtcatggatggatcaatttgaggctgattctgacaacaaatgctgggcatcttttcaagagcgggtctcaagagcaccaaatcaagtgttgaggtattgtcgagaaccaaatgctaaacctctctgggcgttatcttctgggtgtccatcaaatgctgatatcccatcatgtagctactgtaaaggtccattatgttatgaatttcaggtaatgccacaattgctatatttctttgttgtgggaaatcaaccagactcccttgactgggcaacaattgctgtctacacgtgtcaaggggcatgtgaccaaagtgttagctacaaagaggagtttgcttgggttcaattgtaccctacaacaactacgaggcaataataatgtttgcctattccttgctgtccaatgctgcagggagttgacaggaaccgtctgcaagtacgtacctccttttggtactagagtttctgagatagggaggagtggcttcaatgtttccaggtctattggtcgtgaggagaccgtgggtcccagacacatggtcgttacatcgcctttggtccattttaggcactaccatagggcccatgtagatgtgatggctatagggggtgtttggtttctaaggactaatatttagtcccttcattttattccttttaagtttta

SEQ ID NO: 34270 - DNA, 83 bp, Zea Mays
agccaggatcagttctagattggtggatgaggtttgggacctcacgggtgtttacggtccccaactggacaatgaaaaaacga

SEQ ID NO: 34271 - DNA, 631 bp, Zea Mays
ggcactaaccttgacgcgctccctctcgtgttgtcctagtgtcccacgaactggcggcggcggttcatacgctcgcgaagagaactagggctgcgggcgtggcaacacctagcagaagcaaattggcgtggcgtggcacccgccgggcgtcgctccctgccatggtcctaggtcatctgaactatgcggactgcggttccacctcgccacggtcgccgccctcgcccacaccgctgttctctcccctaggtgcccgtaaccccctcctccgtgccatcgtcgatcggcgtaaccatctccgctgcggggacaaggtacctagcaagcaggaagcagccgagcatcttgctaggacaatgaagtactggccgccagctcccaatcttccaaacaggacttgaaaggcttgttgatgtgaaacatagttcatttaaaaaggcaagaacaattttgggggatggagatgttaaaagaagtggtaaaaacactcattcaagcttattatttacttatttatataaagtttatttccctttgtgagatttaggtaatggacataccaaggtttgtacaacaacttttcaatttgaaacaccaaaatccgttttaatgagtggcagtttgattatga

SEQ ID NO: 34272 - DNA, 4451 bp, Zea Mays
atttgatattaagaagcatccaagaaaacttgagcgaagtaatccaacaacataatcattatgtctatgaggtgtctgtctttggtgagaagtatgaggttgcaaaaaaggtgaacatcaaacttgttaatcaccagtggttggaagactgcttaaaggcatggaaaattctcccagtcagtgattatagcaaaagtagttgggagctagaattaatggatacacatgccattgactctgaacatgaagcagaagcatcagaaccaaggtcattgaacaataggcccagtgtcagtggtaacagagaggtggtggtaggaaggaattcgaacactcctgttcatatcgtaaatacagaagatgacaacagcaagacacatggcattagaggccgaatcagtgctaactctacggttgcagtttctgctaatgttgatgtgtttggacccattcaaagtccttctgttcatatcatgaatatagaagatgcagacatcaatacccatgatattacaggccaagacaatcctgactctagtttgttgccaatttctgccaaggttgatatactcgctcccattcaatcttctggtgaaaagagagacactgtaagaaccacaaatagcccaaatctgcaggaagttaaagaaaaatatgttggtgcaaggacacaggaccttgcaagtggtgttctaggtcctcaaagcacaagcaaaatgcctgtttttagaaatcatgtagataccttaaatgggaccctggacgttctaaaaggccatacagatcatgtttctcgaaaatattctgccagccatgatcagactgatgttgctgaagtcttattgaccagtcctttgagaggaaatcagtctgtggacgagctcgattcatcaaaagttgacagatggcaacatcaggagaaggatagaccctcaggtagtcatatcacagcagctggttacttaaatgccgatgccaagctcaacaatcatgagttcaatccgaagcctcgtagtgattccatgtctaactacatcaagaacacaaataactataaaaagacctctcggaattcatttttacaggaagggtattcagttaaccatatggtatcacctcagagggctgaagaaagcacactgagaggttactccaatctttctacattagaaacaagacagcaaaaggttattcaacctgctgatgttcagagcattgcaggcaatgaaaatcctaagcgtgaggatggactagatggtgcatgtgctcagaaaaggaagagcttggtctccccagctagcataaatttgcaaacggaagatttggcgtcagaaactggtcctttagattctccatttgtgagtagagtgagtgatgcatctgaaaggataataaatctagttgaagctaatgctgttaatttgggaaaggaacgctctagcttttctacaagcagacaagcaagatctaggaagacttctctcaagcatggtggtcccatcaatggaatcaaactttctgaatattcttcaagtgataagaatgtaaaatctttacagaaaggaaggatgtcattcaaagcaatgacagaaagtaaatgtgccatgagttcttcagccactgttcaagatggaaaaacaagtgcaggtttcccgtttcaggataaggatggggaaagtacacacagtagtggtaatgcagcaaatcaagattgcttgaatgagataggaaatgccttcacaaaggatccggcacatgacaaatctgtgcacagttcaaataattcacaagttgtgccctcttatagaaatgccagcagtaggatagaagatccagtcaaagttaatggtaatgaaatggcagtggcatcaaattctgaacttgagaaggtggtgtctgatgccactgtgaaagaaagcacaaaacaatttcaagacacttcaaggaatgtccaggctgaaacgagttattcaaagaaagcaccaactactataagaaggaatgcaggtgtcaagaggcaccggagcgctgatatcgaggctgaagggtcagttatcaacagtgctaagaaagttgttcctgaatcctggcctgccaaagggtcagttatcaacagtgctaagaaagttgttcctgaatcctggcctgccaaagtgattcatggtgagcatgctgacccagcctctaaaaatggctacagcacatcatgtgcagctgaactcaaaacaaatcgtccaaagaaagcattgatctgtagagtgacaaatactgttgcaaagaggacacggggtgcttgcgccaagaaagatgatgcacgggtaagttctagtttggagttcagtaaagtgacgtctcaagaaaattttgagataatctctcccaaaaaacttgacactgcaaatgctgatgaacaacgaagaaattcacctaagaaaatacagaacaccagagtaaggaatagagccacgaagaggtcatggaaatctgacaccaacatgagcaatgatacagtaatggacaaagctgagacagtggctgctggtgcattgtctgatgacttgcttcccacagacaatgttgaagactggcctaaaaagctttccagtcatggaagtgttagtgactgtgaaacactttctccaaaaaccatatcaaaggccagaattaggaatgcagcttccaacaggaaaataagaactgtagaccacaagtccggcgacaagtttggcaaaattggtagtgccgttaagtctgaaacaaaagctttttcatcaaacagaaccgaagggatttcatgcaatatcagcaaagtaattgctgatccagactccgagaagtccaacaaggatgtggtaagagaggtgtcggggctgttttgccaagattcttgcacgatagacaagcaaggatcatacaattctaagttgagaagcagcacaaggaacaaagctccgactccagatcatgaaaaggagaacagactaggctctagtgatctcaactctaaaccaaacagaactggcagtctgcgttccaaatctgatgcaaaatcgatcaagaaaaacacgcgtgtgctcagtaagcaccaaaggggaaatagaagtgaaccttgcaccttgatcacgagcaaacctgcattgtttatcttaagtggaaatagtgagcagagaaggggttatcgctcgatacttagacggctgaaggggcgagtttgtagggattcacatcactggtcataccaagcaacgcatttcatcgctccagaccctctgaggagaaccgagaagttctttgcagcggctgcagctggcaggtggatactgaagagagagtacttgaccgcgtgcattgaggccggcaagttcgtggacgaagaaccgtttgaatggttcggcacaggcttcaacgatggacgaacaatcagtttcgacgctcccaggaaatggcgaaacataaggcagcagatgggccatggcgccttctacggaatgcagatcgttgcctacggacagttcatattaccaactctggacacagtaaagcgtgcagtaaaggccggcgatggcgccgttttagcaacatcgccgccatacacccggttcctagactctggagtcgacttcgccgtggtatcagagagcatatcacgaacagacgcgtgggtccaggaattcatcagccacggcattccctgtgtcagcgccgattacctggtcgagtacgtgtgcaagccgggccagcccctggaccggcacgttctcttcgagacgaactgcgtggccagcaagtccctggagaaactcacgaagaagcaggtagagatggcaacggcggagaagtcggaaccgtcggaagacgacgatccggaggacctgagctgctcggcgtgcggccgcagggaccggggagacgtgatgctgatctgcggcgacgaggccggcgaggccggctgcgggatcggcatgcacatcgactgctgcgaccctcccctggacgccgtccccgacgacgactggatgtgccccaggtgcgccgtgccggagcccgagaccgagacgaagcatgctagaggcaccgaacgcaggggcagagggtccaggcgaaggtgatctttctgtacgctgtgtggtggtctttccatggtgtgtggattacacgcgcttacttaattgaacaaaaataaatgtactacacgaatagttggaggcattgtatgtttttagaaagaaaaaccttgtagaatgccgcacgcttctgctgtccgttctcgctacctccagcagcttactcccaatatgtacacgatctgttggccctaagatacggctttttttaaagacaacatatctggtgcacatggaacattggtgcacatggtgcacatattaaatcaacaccactcattttagatctaacgtttctagttgtttggtacattttactaaggacac

SEQ ID NO: 34273 - DNA, 1157 bp, Zea Mays
aaagaagtcgcgccccactcgatgactaccgaagcccaaaggcctccgcggcgtctcggctagtcgcctttccatttttacccccttctctctcctctccggccgttgccgttgctccgcgccgctctcctgtcagtagccgctgccgccgacgctgcaagtgtgagtctgtcgccgcggccatgttcgcctggatcctccgcggctgccgcgacgagtgctccgcctccgaccagctcaagcaggctcacgatgtcttcaaggcgaaagaggtggtcctgcaaaagaagatctctcaagaggtggaacgggccaaggagttcacaaagtcgggaaacaagcaggcagcaatgcagtgcctgaagaggaagaggtactacgagagtcaaatgaaccaagttggaagcgttcagctgcgcattaacaccaaggagagaatgatcgctgatcacacgggcaacaaataacacaaagtgagaccgcatctctggaaccgtgtatcgaacacagctttgttctgttcagatatgaaatcttgtgagaatgagatgtcaaccattggtgtgttcttcgccaaacagcatatcacacttaacattagtgtgcctttaacataagcataagatattacattttggaccaaacttcttgtttcctaggcatgaccacttatttcctagcatactgcagtgtatagtgtgagccatacgtgttcttcatccacattctcaccgtattcaactgaatagcaattagtaagtcatttatgtttcaagtttttttggcactctgcacagaagggttacaatatggtattttcttgaattgagatagaggcagtgtattcctctctttgcaggcgttctggagcagcagagtaaatccatgaatcttgattagtacaagttgaatcatgttattgtgcctataattggggaggaaagtaaatgatgacagtttgtatatctgagcagctacgttaacctctaaaacagcaagccggcaagccgactctatcatgtatttttaacatagagatagccttgtccttttcttatcgttcagtaaactacattgtaaacactgtcctgccattttgctcctgattttcctgaactttctgttctgcgtaatgacatttgtgtgaatgttttcga

SEQ ID NO: 34274 - DNA, 498 bp, Zea Mays
gagagggatattatacttttacaggaaaggttaatgtagactgcattttagtgcatttggctgggcatatgttaacaattggcacaacacatgggagcagctgtatgtgtactggatatgcccctttattggggccatgcttgctggatggatatttagggtggtgttcctaccaccggcacctaagcccaagaccaagaaagcatgattactcgtttatggatgctggtttagaagaaataagaaatagaggaaggtcacataagctcatgtgttgtacttgatttcctcaacttcccacaaactgggtgttgtgctctgttacttatttctcatcaataatttatgtttacttgtaattttgggctagtcaggatgtgtttttgtccttttatttagtttttatatgttttctttatgagtacagtaaaatcattgatctcaactgagttggaaatgagctgaggttggctcggcttgctcctctagtgagcctga

SEQ ID NO: 34275 - DNA, 1843 bp, Zea Mays
aggaaccatccatatatacatgctccggtgagctttgctcgacgacagtcatcatgcatggcgcgcggcgagtgaagtgaatcggagcagtttgggtgccgatttactcaacctgttcttgacggaaccaagccaagatctcgatcgacctggtccactccagtccagaccagaaatggaggtacagatggcagcacaaggccctaaatcgatgggacgacgacgcagcagcacgccgtgtgactctcagcacggcggcggtgccgacaccaagcccgtccccggctacctcaggccgtcggccggctcctgccaccacgtctgcaagtacggcggcacgcacaccttcgaggaccacaacaggccccagcctaggccgcctcggaagcagcagcagccggcggcggagagccacagccacaacagggtgctcgtcaaggtgcggtcggtgttccggaggccttccaaggcggccgccgacaagtccagtggggtcgagagcgtggagtggaaggacattgtggcctatgatacggttccacttccaccccatggatcgtcctccccgaagcatgatggaacctcagctcagttcaccggcggctccaagaagaaggatgtaatgaaggggaagaggtcgcatggcaaggccaagacccatgaacaagtggaagggcagaaacctagggcggctgctttgctcgtggaaaacatgggtaccaattatcaggaaatgcttcaagggtaccaaattctgcccccttctctgctgcagagtcgcgcaagccttttgcgcgacctcgagaaggagatgatggttcaccacgacgctgccgatgccggggaaggaagagcaacgccaacgtactctccggacccagaacagtgcgctgctgccgctgaatcaagcaggcccatccctgcgcaccggagggtgcagagcatgagcatcagcagcaggtccgcgcggcacccgttcgcgcgacaagcgagcaggaactcgggcgccttcaagctgcggtccaggagcaccagagcgcccgcagtgcttccaccgcccgacgaggagaagcccgcgaggctgaggtccaggaggggcggcgagaatccttcggtgaccaccgaaagaggcatccatctcaggatccgaagcctccggaagcgaggcgtcggtgcttccgccgccggcactgctggtttcgtcgtgccggcggtggcgctcaggcaccagaagacgctggagaagaacaagagccagaggctgtacaacaacctcatcgaggagacggcgaccaggctcgtcaagacgaggaagagcagggtgaaggccctggtcggggccttcgagaccgtcatctccaagatcgcaaacgactcgataagactggatccaatccaaccagtcacgatactgatccgtgacgtcctgttcggccagagcgggcataccgatcggtgggcctgattgctatcgaccgagctgaactagtggataccgacccaaatgctgaaggtaccaattatatgttgtaagcaaagcttcatcgtcgataaaaatggcgcccaatgagaacttcgaagaattggagatacacaaagtttcgacgaagaacagacatgtgaacacgtctgccctcaaatatagagaattgctatgtattggggaggggtaaaatgtaattttgtctgaaagtatattggtacttgaccatataaataggtgaatagtgtgaccgtcatgtgatcggacattcgctaaaattgtgcttgctacattcacgtctatagataacactagtgacacccatatcatatatccaaagtttatgtttgtttgtatgga

SEQ ID NO: 34276 - DNA, 860 bp, Zea Mays
gtgcccccggcgaaacgtcccacagaaattggacacccatcttcttcgtgtggagtgtgcggagagccgcgccgtgtgtgtgcgtccatttgtgtatccacggaccgcagaagaacctcaaaagctcttcacttttcccctccactccacagcgcaggcgaggcaggcacacgcaagctgccgcatttcttgcagttgcacctcgcaaacagatggggagggcgccgtgctgcgggaaggtggggttgaagaaggggaggtggaccagggaggaggacgagatcctggcgaggtacatcgaggagcacggggaaggctcatggagatcactgcccaagaatgctgggttgctgcggtgcgggaagagctgcaggctgcggtggatcaactacctgagggcgggtctcaagagggggaacatcacggaggaggaggaggacgtgatcgtcaagcttcacgccacgcttggcaacagagctacataagtcggagctggagaagcaggttcttcaagatgcagagaccatcaagatgattgctcttctcttccatcagcaagatatgaagactcgggcgcaagagtaaagacagatcgtgccgtatgctggtcaagcctaggagacgtcagttagttcagcctgtgtgctgttaaggccgagagccatctaattggaaccctcgtttgcatttttgtcttgttagcgtggaatattctgctattgggtgtaggctgtaacaccgtgatggctgttgcctaggcgagcagtatcagggtgggccatttagttttgtgtttcattctgaatgttacatactaaactctaattttgttactatcaatgaaattcagttttgccagt

SEQ ID NO: 34277 - DNA, 564 bp, Zea Mays
ctcccatagctgctaccatttctcaatacgcacgccataccggcctctaccgtagataccgcacagtggcaaccaaggcatgggagaggaggacctcaccgtttgaaggcggagccggccgacgacgaaacgcggtgcgcagcgaggcacaggtccaagcgattcaacatctcttcgagcacgcccaggtccgcgacccagccggacgacggtgcccaggtccacgacccagccggacgatggcgcccgcgcatgcagtcatcaatgccaggaagtgcccatggtgactttgtcctcccggcaacacctgacaatcgtaattcttcagtggtgactaccccttctctctgttcacagggatcggatcctggtatggcactcatggttctctctcctgctgttggcaatggcgagccctagctctacttgacggcctttttggtgcatgggcatgtataaatactatgacaagggtgctcggctggcagggagagaatcacggctattatttttttggagttcgttgcgatcccatatcaatttgttacggatccggtgtttttg

SEQ ID NO: 34278 - DNA, 1745 bp, Zea Mays
acgcgtcccctccccctatccaggcctcgccacccatgccctccccgtctcactgacggtggcccccaccgcccggctccgctcgtcggcgagcactcttcccctcctcccccgccccaccgcagtcccggccaagagatccggccgactccggtcgctcggactcggaggccggcgagccgctcgtgctgggcgccgggatgcaggcggccggcaccagacggtttcccggatctcgccggcgccgcgtctcggcgagattcggatagcgaagaacttgaactgaaggagcagaaacctgttccgaaggctctgtcgggaggcgattcaagtggcaacagatcaaacgattgctacttcccaggccttcatgatgacctgtcacaagactgccttgcctgggcaagcagatcggaccacccttccatttcttgtctgaacaagagattcaatctgctaatgaacagcgggtatctgtacaagctgcgaaggaaatacggcatcgttgagcactgggtgtacctcgcttgtagcctgatgccctgggaagcatttgatccatcgcagagacggtggatgaggctcccgaggatgccatgcgacgagtgcttctcctgtgcagacaaggagtcactcgccgtcggaacacagcttcttgtcttcggccgtgaatacaccggcctcgctatttgggtgtacaacttactgactcgcagttggtccccgtgcgctccgatgaatctgccccgctgccttcttgcctcgggaagctcaggcgagatcgccattgtcgctggtgggtgtgataagaacggacaagtgctgagatctgttgagctgtacaactcagagactggccactgggagactgtcccaggcatgaacctgcccaggcggctcgcttcaggtttcttcatggacggcaagttttacgtcattgggggcgtatcgagccagagggactcgttgacctgtggagaggaatacagccttgagacaagaacctggagaagaatacttgacatgtaccctggtggaaccagcgcatcccaatcgcctccccttgttgccgttgtgaatagccagctctacgccgccgaccagtcgacgaacgtggtcaagaagtatgacaaggcaaataacgcctgggacgtagtgaagccactgcccgtcagagctgactcgtccaatggctggggcctagctttcaaggcctgtggcgataggttgctggtgatcggaggccatagaggacctcgtggcgaggtaatactgttgcattcctggtgccccgaaggcggggaagactgggaggttctgtcggtgaaggaacgcgcaggcgtcttcgtttacaactgtgcaataatggggtgctgagttaccttttgctcttcggtacatgccgccgctggtttagcaaggcaacgaccatttcttgctgccatttagctgcccttttatagtgacttgtaattcagaaatgacctcccctccccgaaattttgcggcgctctcaaatgttgaatgttttgtagagagcatatatagagcattcagttcagtttacctggaactactctcttttttttttctgttaaactcgttcacatttttccttgttcttgtccagtacgaattttacgcggtaggagtattctttattcatcattgttgcgaacttaaatgtctgcgccattgtccggagacatatcttaggcctcgattttcagtgcaccgtacttccg

SEQ ID NO: 34279 - DNA, 2047 bp, Zea Mays
gacccgcatcgcagatctcccccttccctccacgcctctcgcgtcgccgcgatggccgacgaggccctggaccagccgccggacgcgaccccttctccgactccggcgacgccgccggtacccgccaccccgtcccccacggtgctgctccgcccgcggcgggaggcattcgagcacgggctcttgcccatccccaagctcatcttcccggagggtacgctggcgcagaccctcgcccagctcaaggagaagctcgctgcctcggccccggacggacgcgtgcgcgccgcggccctggcggaggcgttgcagatcccgcaggagcaggcggcgctcgccctcgccacgctcgcggctgtgctcccggcagaggaccccgcgctcggcgacggcgccgtggatggttctgccgcggacatccgcgacatgctgctcttcctctacatccagtcttacaaacgtctcgtcccgcggagtgcgcacaaggactcgcccgtcgtggcggacgtctggccgtccacctccgcgttcgatgggtacctctccgcactctccccgatccagcttgttcgcagtaacagccgtcgttttatgccttctcaagctgatgaagaaattcatcagttgtcctatctgcaaaagcatatggcgaatattcttactctcttggcagattctgttgagggtgatggtgatgattcactggtgttgacaatggagacttttgagcaccttggatttctagttcaattctcagaaggaacttctttaagccaggctgctacattttttgcatgctcagatccagacatgcctgatgtgcctgtccctgctgctcaggttcttgattggatgtcacagaaaatagctttttcactggaatattctgctgagaggtccgcagcaaaggaaagcaaccagcaaaccatgtctgatcttgatgtgaccatggctgaggccaatacaagtcacccacggaacagtacaccaagtgccaatcctgcatactacagaaatgtaacatttgtggagggcttttccaaaacctctgttgtcaagcatgcatctgatgtcaaagggaattctataaaggttttgaactgccatgattctgttatctacatattagcaccgctgaagtatgctactgtgtacggttgttctgatgctacagttgttcttggtgctgttggtaaggtagtaaaagtggagcattgtgaaagagtgcatatcattgcagctgcaaaacggatttgtattgccaactgccgggaatgcatcttctacataggagtaaatcaccaacctcttgtgttgggggacaaccataaattacaaattcctagttggtttggggatgaaaggcaagggactacaaaccgcaatcctttcccactgcctgaaatttatgggacatcccaaagcaaaaagcgttctgctctggaagatatccaaaagatgattcgggagctgcagcttgatgagaaccggaaaagggaattggcaactgcccttcacgttcagttcaaggattggttatacgcttcaggcaatatccgccagctctactgtctacagggcgattaacgatgggatttgcaagactgactacccttttgccgactcctactccaaaacattcgacaattgtcgaaagctgaccttcctttccctgggagagaggattcccacccgcgcagaaggatgtgaagatgtactgttacctacttttttacagattcatttgggtatattccctttgctgcgagttggaggtactaattaggatgtaatctccaagcctactcattttttttggcccttgataacgtccacgagtatgtaatagggactggtgaatcatacgttgtaaacatttcttcatcccgttttgctaaatggctcgtcatgtcaaccctctattggatcaactgtattgtgctcatccttatagacatgcttgtttgcaacttttttcgttggtcaaggttttgccactctcaggacgattattgtcagaatttatttgcaacatgttttggcccag

SEQ ID NO: 34280 - DNA, 459 bp, Zea Mays
tgttgctgttagagaagaccttaaggaaaccataagcttcataagccatcaggatcaggcgatcaaggaattgaatcgtgctcatccaatggaatttcaagtagcacaacggcttgtcaaccatctgcagcaagcagtgcataggctcaatgtttccttttatcctactcctgcatcagcggactaagggttccttggaagaatggcaacaagcatctggcagatggtgtagctagagaagatatagtaggaaactgggagtttagcgaagtagatcaatgtaaaaaaggtaggtgtaagatagaccagcttggtaataaaaacatgttaaactttgttggaaagagttttcctgtttcacttggatcatgtaacatatgagcttttctatgactatggtgtaagaaacgactgcctgtttcagaggcaacttttaatatctatagtagtttgtcaaaa

SEQ ID NO: 34281 - DNA, 840 bp, Zea Mays
tttgagttgaatttatttttgtgtgtttgtttagcattttgagtgattgatatattagaatttgagacttcactagcgggtacagttacccaatagataaaatcacccgcgtgcgtacgaatatgggtaagattctacacccacgagtagatatggtaagccgacgagtataatttgtgcatctagttgatgattatcagagttcactttttgtacttaaggaagagtagttgatgatcattttttaaagccttcaacagttcaagcactaatttatgcatctagttggataagaggctctcaacatgagaaaaaattgcacctattcttgtggtaggtaatcctattataggttgtaacatagcaactatatttaatatttcttttaacttttattctatgtaatgctgatgtgtcatgtgtggactgttcaggaggaagatgatggtgatatcgagtttgtggagttccctaagggggtggaggttgaaggaatatgtgctagccttttggttttggtggcatgcttttagccttttggatgttgacaggttctaacttagaacttctaagggagataggagtcatagccttttggatgctgctagccttttgttggcatgttgacatgctgcacttgtgctgctagagcagcagtgctagccttttggtggttgactgcgactagttctggttgtttcttttcatggcaggaaagtgcatgtaaaagtggctaaactattactcacctaggaacagaatgtacattgtcttttgtctagtctagtggtacagtcttgttgacacataatgaaaatgtaaaattgtatgttgtctaaa

SEQ ID NO: 34282 - DNA, 1412 bp, Zea Mays
agagccggccatggacgcaacgtcaaactcgaatttacgccggccaggccaccaccagtcgcccacgccccgccgccagtcctggcgcgcgcgcgcgcgtcccccggcccacaccgcaccttccacttccacggaccctgctgcatgcgcgctccagtgcgcagcactagtacgtacgagtagtagtagtgctgtgctgaggacgaggctgctaggtgctagctagctagctctccatgaatcgtatcgatcggaagagaagaagcccattccctgcccctgcctgccttggatacctactccctctccctccctcctcacatcacacagacagcagacaccactggccggccggcctgttcgttcattctctctcgctcgctcgctcgcccgcccgcccgcccgccagcctttcattccatctattaaacgcctataaatacagtacaggctcacacgtccatggaaggaatgtccatcttccttcactaccaccacacggctgctggctgctactaggcaggccttcccacacgcccgccgtagctctctcgcttgtgtggtcatccccggcctcgccttctctcattctgtcgtctgctgcccctgcctgccagtgccaccaccccccggccgtgcggattatattcgggcccaacccaagcaaatggagcagaaggcgaggaggcgccgcgtgccggcgttcggagagtggaactacaactactacggcagcagcgcggagctcgccacgcccgcggcaccggcggagctggaggcccgcagcgacgtctggttcaagtactcgccgcccccgcggaagccaccgccgccgccggcggccagcaggaaagttcggaggccggcggccgacaggtccgcatgcggcggcagcggcaagcggccccgtgccgcgacgcctgcgagggcgtccgacgccgtggtcccatcgtcgtcgtccgtgccacgcacgccggcgaagagcgcggccggcgctgccagggcgcgcgtggtgcgccgcgtcgacgcggacctgtaccaggtgcccccgccggacctgctccacgacgaggatctgccaccgaggcggaagaaggcgtccagcaggagcctgtggatgggttgcttcggcttcagttgcgttccggctgattaactattttctgtatttttttatccatgtatctactcctagtttaactgtactccttttcagattgtgcaatgttttggtttttttgtttgtttctagactagatttcagattgtgcaatgttttggtttttttttctttctggactagagcgagtattgtacagtgtgggcaatgaaaaaaatgtactattatgtatggtttcgtattcgagcctacttgacgccgcctaatcatctgacgcgcatcccgaaacatg

SEQ ID NO: 34283 - DNA, 684 bp, Zea Mays
cctacaaaacctggtttctagcatactgcttgccgacgtggcagccacggtggaccgcattacatacataattactcgtttcttccccatggaagaaccgtagcctcctctgttcaaatcgattccctagcagctctgccccctcccctagatctaacccgcatcgcacccattaatggaacatccacctccatatgtgaccgatgcagtacaagaaaggtgattgcactcagggccaagacaagcggaaactatggacggtacttctacatctgcccgacatacaagcgtgatggtagtggttgtgacttctggtactaggaagatgactatgagcaatatttgatggagaatggccatgttctacataatcatctaccaatattcagccaagcagagaagatgattactggtgaagctgatgttttaggaagttgtggaatgaagagggaagatagaaaagcagatggcctgatggttcaaaagctagatttagtagtagggttacttagttaagattgttgtgccactaaaaataatatcagtcttatgtgtgtgcatttttctgattaatctatatgtaaggattgtttgatgtgagttatggtggtaatgaatgaaaagagtactcagattcattaagcatttgtaaacctcatccccagttcacagaagcattattgt

SEQ ID NO: 34284 - DNA, 2623 bp, Zea Mays
cgagactagaagcctggagaaacgtttgttgttcttccagaacacgccctcggaatcctatcgcctcccacagcacacgacgcgcctttgctgaactctctctgtcgccatgctgccggcggtcgccgctgcatcccccggcctctcacatctgccgcgctaccaccaccttggccgtcgctttcacctccgccgccaccgccttctacctgctattccggccaggctatcgtgtggggccacccacgcccgccgccttctccttgccggcgcgttcgcaaaaggggagggttcttcaggacaggatgttgatcactctgctggtgccacaaattctgggtctgcataccttggtctcttcgttcgattgcttggcttggataatgacacccgtgatagggagcatgctgtttgcacactctatcaatactcccttggtggaaggaagagcatcgatgagataatgcaattccctggttgtattgttctcatcattagcctcctgaaatcagagtccattcttgcctgcgaagcagccacaggtcttctgcgtaacattacgtcagttcacatatataggaagatggctggtgagagtggagcaatggaagaaatcattaatcttctctgtaaatctacaataacccccaagattctagagcagtgtttgtgtaccatttggaacttttctattgatgaaaaatggaggtacaaggttctgaagagcgatgtcctaatgaagattgttggttacctggatgaagaagacatacaagtcaaagaagccgctggtggtatcatatcaaatttagctttgagttcctctagtcatggagctttggttgaagtaggcgtcatcccaaaattggttcatcttttgcaaaccaaagaagatgactataagattattagaaaggaagctaaaagttcactaatacagctggccactgatgattgttactacagccttataatagaggagggtctagttcgggttcctttggttggctcagctgcatataaagcctttaaacctctccctcattcatggccctcttttcctgatggctctaagattcagcggagttctcatccctcaaagtacggtgctaccgaactgctccttggcttgagtgtcaatgagaacgatacaaaaccagatgaagctaaaattaatgctatgataggacgttctaatcagcaattccttgcacgtgttggagctattgagttggatgatcaaggacaagaggaatctggatctgaaaagaatgacatgtataccattttgccatgggtagatggtgttgcacggttagttttaatccttggacttgaagatgtctctgcaatcaaaaaggctgctagagcaatgggtgatgcatcaataaatgaacatatgcgtacctcattcaaggaagctggggctgttaaacctctacttcagctgctcaagcacaaagatgtacatgttagagaagctggtgcttatgcgttggaaaaattatgtgtaaggtattttatctttccttattttaagtctttaatcaaggtaatcataccacttaatgctctttagaacaaatcttggtaccactttgctggtaaccaactctgtatgggtgctgtcacttataataaggtgtttctaggagattataattttcttgatctctagagtaatgtcatgttaaacagaggaatttggcatattaataacattataaggcacccatgagttctatgaccatatccatagtccatttttttccatctctaattctcccacttctgtatataaatcaatcataaaaatattctaggtggaaaatggttaaacaaaatgcctaggtgcttggcgagctgctccttttagcacctaggcggagctaggtgttgcctttttaaacaaaggtttcacaaaatgtattgatgtatcaccttctaaacacctatatttatgtctatgtgcatctatttgtttatctaatagaacattgtttttttgtacctagtttgtttcctgtagtttatttccctgtgtggcacatatgttacaatgactaaagtttattttctactttaataaaatggtacacagctctcctgcatatttgacaagaaaaacaatgcatgttttggaacatattcagaaccttttcttttgggggtgggggtggctacttggtccatttttatgaatagtccaacagatcagctttattcaaatgcacttgtgctccttgtttaggctagcagaagatacagataatgaagtctagttgactgtaatgttggttctagactaataagtgattgttgatgaactgtttaatatgtggatgtggatagtgttaaagtgttatctatttgataagctgtgaagtgcttgctttaatagcatatattatatattggggtgctactcaatcatatttagtatgttcttctgtagttctgtttgttgctggattcattttactatcatatgttccttgttttcttcacaatcctttgtagtgccacagtctgccataatatcaaaacagaaggtggactagaattgcttgtaaatatagtcaaggatcgacatactccagtagaactactagagaagtttttg

SEQ ID NO: 34285 - DNA, 654 bp, Zea Mays
taagacaggaattaatgtgataatttgatcatagaaggtgccttcgttggggtttcactggaagggaatgtggtgacaaccagaatggagaccaatctacgcttctacggtgatgcatacctgacggcaaccgatatcctgtttgggagggtggagcggccccgagctgcccagcccttgtactcagctctagatgatctgttctccaaaatggtttgctagcccatttagattggcgtgatactctgcattggtggcatgcagtcatgtatgtatataaacataaggtagcagcaaaaatcctaaacaggagatatggaagcggaaagaatgtacagcttttgatggatggtttcactactgatagcagtccatacatgtaaatattggcagaagaagatttaagggctgtttggttcgcacactactgatatcagtacgctgcagtgtgccactggtggactcatccatgcaatggaaaattttaatacatttgttagttcgtttgtggcttagattattcgatggggaagggggtatttcgctgcagtcccatgctgttgtagtagattctgttagtggaaggaacgctgcgatttttccccatactgtacctgttgtgcttactgttcacaaggatttctctatcaatag

SEQ ID NO: 34286 - DNA, 2657 bp, Zea Mays
cgggcgattggtttccttctcggactcttcgtcgtcttctccgatctccccttcctccctcgctctctcccgcccccgtggtccaaaccctaacaaacagcaatcaagcggaacccctgcaatcgtaatcggttcgctgcctaatcccctccctttctcatctcatgaccatgccggcctcgtccccctccgttggcagcgcctgtgacccaccgccgccgccgcctccgccgccgccgcgggctatgaagcgcgagctcgccttcgcgctccagtccctgtccgagatctctgcctcccacggccgcacgcgctccggccgccccatctcttcccttccagacccatcggcatcagcatctctcaagaggcgcaagagatctgacccgcccgcccctgcccccgcccccgcccctgcccccgcagccgatctcgtctccccgcccacgccgcctatcgacgccgagccgcctaaccagcccctccgtgacatcatccaaccgctacatggatctaatcctcccaccgcctctgaccaccgattcgattccaatgccgatcaagaggtcttggcaatggaagtgattgcaaagccgaatctgcccgcagaagaggatattgcagcagatgactcggcaatggaagtgactgcaaagtcgaatgtggctgcagcggatggtgtatcaaagccgaatgtttccgcagaggatactgcatcaaagtcaaatgtggccgctactgtagcagtagcaccaactctgttggaaactgccattgcagctggaaatgaccagtgtgatacctcaaactcaaatggagaaaatctacagcagcaagccgtggaaaatgtattagtctccaccactatgttagctgaggacactgtcacacctgcagctgctgccgggctcaagcctgcaaggcgcttcactcgatcgttgctcaagaataataaaccagataaagaagagtctgcatcttgtgaaagtcaggcaacaccagatggtagcaaggatgcctcagttggttttactttgctcctggagaagcctcagagaaggttcacaaggtcgttgctcaagacaaaggttgagagcagtttggttggatctgatgatgtgctggacagtgcatctgattcccctccatcagtgaagaagatggagatgaagatgtcaaagaaagttgcatgtctcacgaagcaccctggaaacattagagagctgctcaacacaggcatgcttgaggggatgccagttatgtacatcattcctcatagcaagaaggctgtcctaaaaggagtgattactggttgcaatatacgttgcttttgcctgtcctgtaatggcgccaaggccatttcagcttattactttgaacaacatgctggaagcaccaaaaaacaccctgctgattacatttacttagggaatggcaatagtttgcgtgacgtgctacgtgcatctgacagatctcccttggaggctctggaagaaacgattcgttcctccattgatccagtagttaaaaggagccgcattaattgtctgaattgcaatgagcttgttcttccgtcatcacatgaaaatgtactgtgtcaagtttgcctcgagtcaaagcaacctcaagatcctcttactgcatcgtatacatgtaatggcagttcgagtctgagtcgaagttccaaggaggctttgctaaggaacatatcatcaggcaagaagggtgggagtgccggcaaagtaacaaacaaggataacagactacacaaattggtctttaatgttctgcttgatggcacagaagtagcttactatgttgatgggcagagaaaggttgatgggtatatcaaggatcatagaatctactgtaatcactgcaacagagtggttagcccatcagcatttgaagctcatgcaggtgagggatcaaggcgcaaaccgtatgataacatattcacatcaaacggagtatcattgcatgagctggcgatgaaaatatcaaaggatatggaactgtcagaacgcgagacagatgatctgtgcagagaatgtggtcaggggggagacattttcccgtgcaaaatctgtccaaggtcatttcatccagcttgcgttggactgtctaaagtccccgcagaatggtattgtgatagttgtcgcaatcttgtgcaaaaagaaaaggctttagcaaagaacaaaaatgctaaagctgctgggaggcaagctggagttgattccattgaacagataatgaagagagctatacgaattgtccccatctctgatgatcttggaggctgtgctctgtgcaatgtgagaaagagtatcatgtaggatgcttgcagagtcaatggcaagtagaactaaaggaattgcccgaggaggagtggttctgttgcagtagttgctctgagacacgatcatcattggacaagataatctccgatggagctcaactgttggcggacccagatcttgaaatcataaagaagaaacatgagacacgaggtttatgcatggacaccagtaaagatctcaaatggcaattactttctggtaaaagggctactgaagacggaagcatattgctctctgctgcagtgccaatttttcatgcagttgattggcaatcttatcaataacgggctggacctg

SEQ ID NO: 34287 - DNA, 4099 bp, Zea Mays
caaacctccccgtcgcggcgccctccccgccttcccattcccggccccgcccgcccacatctagtctcccacctcgccctcgcggcgccggtgtagcagccatgctagtctccgtcgccgccgacgactccggctggcaggagtccccgtcgcaggccgtcctcttcgccgacgagatcgctgccgtccgcgctgtcctgggcgggaccctctccgaggccagcatcattgccgcgctctcccagtgcggtggcaacgctgagcgcgccatcaacgcgatcctcgacgacgccgaggtcgtttccgcccccaagcgggccaaggtcgagctcgacgtcggtggtgttccggtgcaggtgccggtagctgtcaaggtgaaggccgaatccatcgacgtcggggccgtggcgccggcagctgtcaaggtgaaggccgagcccattgacggcgatgtcgtggggagccaacaatccgatggctcctccgcgaaggccaccgccaagatgaagagcgagccggccgaatggtccgccaagacacccgaccgattcgtccccgacgcgcgcagtgtaggtgcgcctgtggcggtggcgagcgccggcgccggcataagcatcgtcccgcggcagaataagaggccgaggcaggaggtggggaccatcgaactcactaccacgcacccggtgccgtacctcaactcgcggcccatccgggcgctgccacccatgccacccatgggcggggacggggaggtgtacgacccgaagcctatccagatggtgccgcccctggaaatccagatgcacgatccgaggaccaccctacctgcgccgtcacccatcgacatcgagatgtaccaacaaccgccgcggccgccgcccgtggacgtcgagatgtgcgagcagaggtcgcggccccggccccggcccctcagggcggttgtgcctgcctcggtgacggacatgaggatggtggtggcgccaccggacggcgagtttggcgacttccctgtggagcgcgactggatgctcgtcggcaagtcctatgtgcccgggctgtccaccaaccgtgggaggaggaggttggacgctggggagattgtccatttcgccttcccttcgtacgagaagatctatggcgggttaaagatgactgccaagaaggcggcggctctggcacagattgttcgcttttccaccaaacgagccggagagattgggaagctgtccccagagtggacgcaatgccttgtcccgcttgtcaactcgtccaaggtgaagattcaggggaagctcgtgttcccaacaatggagctgaggctgatgcaggagatattgctctatgttagcttctacatccacaaatctgtgctagccgaaatggacaactcaccctgtgacatgctcgatcatgcaaatgttgatttcactcccagtcctctccataaattgcttagtttgctcaacctaaagccatccaacaaggatgctttctcccttgacgatctcaccactagaaagctgaagcaaattctaaggggtaacaataataatggtgatgattctactccggtgcttggccatacatttctcgagcaaggcgctgatgagcaggcgatttcagaggctgccttgaacaaacttgttggcactgctgaaacatttgacttagaggaagcagagcctcccactacccttgtctctgttctaaagccataccagaaacaagctctcttctggatgtctaaattggagaagggaattgatgctaatgaagagacaaaaactcttaatccgtgttggagtgcctacaatattgcagacaggagagctcctccagtctatgttaatctttttactggtcaagcaacaacacaatttccaaatactagcagacgcaatgggtcttggcaaaactgtgatgaccattgctctgatactttccaatcctaggggggagttctctaactgtataaaaggagacacaaggtatctaggagatcgtgcgaccagaggatacacctcaacatcctctgtgagaggaggtacccttgttgtttgccctatgtcattattgggccaatggaaggatgagttggaggcacattcggcacaaggagctctttctgtgtttgtgcattatgctggtgataaaactagtagcctcatgctgatggctcaacatgatgtcgttttaacaacctatggtgtcctctcagctgcatgcaaaacggaatgcaacagcatttttcacaggatggattggtataggattgtgcttgatgaagctcacacaatcaaatctcctaaaactaaaagtgcccaagcagcttatagattaaagtcggaatgcagatggtgccttacaggcacaccattgcaaaataatttggaggacctctacagtcttctctgcttcctacatgttgaaccatggtgcaatgcaaaatggtggcagaggcttattcagaaaccttatgagaatggtgatgatagagggttgaaacttgttagagctattcttaggccactaatgctaaggaggaccaaggaaacaaaagacaagattggcaatcccatactggttctacctccagctcgtattgaagttgtagagtgcgaacaatctgaacatgaacgtgatttctatgaagcacttttcaggagatcaaaggttcagtttgacaaatttgtagcacaaggcagtgttctgaacaattacgctaatattctcgagttacttctccggctaaggcagtgctgcgatcacccttttctggttatcagccgagctgaccctaaaaagtatgctgacctcaaccagcttgcacagcaattccttgaaggggtgcagcagagttcgtctggaagacagaacgtagtgccttcactggcttatgtagaaggggtcgtcgaggaaattcgccagggtgctacgatggagtgccctatctgtctcgagtcagcttcggacgatccagtgctcacgccttgcgcacaccggatgtgtggcgaatgccttgtttctagctggaggactccagacggagggccatgcccactctgtagacgtcacatcagcaagtctgacctgatcatactgcctgctcagagtcgtttccaggtggatgccaagaacaactggaaggactcgtgcaaagtgaaaacgctcgtaacgatgctggagagccttcagaggaagcaggagaagagcatcgtgttcagccagtttacttccttcttcgatcttctggagatccgcttcacccagaagggtatcaagttcttgaggtttgatggcaagctgagccagaagcacaaagagaaagttctgaaggagttcagtgagagccaggacaagctggtgctaatgatgtcgctcaaggctggaggtgtagggctaaatctaactgctgcctccaacgtttttatgatggatccgtggtggaatccggctgtggaagagcaggctatcatgagaattcaccgcattgggcagaaaagagaggtccgagtcaaacgcttcatcgtcaagggtactgtcgaggagcggatgcagcaggtccagatgcgcaagcagaggatggtttctggggcgctcaccgacgaggagattcgtggcgctcgcattgagcatctcaagatgttgtttaaataaatgatcattgccgatgtgtatagctgacgctacgccgttgatactttggtagtgtcaagtaggttgtcgagggcatgtttggtaggagtaagatctgggtttagaccattgtagatggggatggccggatgggagtgggtggaaccttgcccttccgatatgacggtcttcctttctaacgtgaatcagactggcatagagaatgggcattttggaaaacatgactacgataaatcacttttctcttgagtcttggattgcaggtgttaatctgtcatgttgttcttgttttactccctaccctttctgtatgctgtgccttttgttctctccttcagacttcccaggaatactgattctagtatgtccactaaggtatcttttgatcttgaaacatcatccttcgtggctgttgatggcatataatagaaaagcttttggg

SEQ ID NO: 34288 - DNA, 1767 bp, Zea Mays
cgggatcctcggtgcacaccgagggagactttactcgtgatgctttgaggcgcaaaggggaaacctccactttaaaaaggggccgacccctcgggtcgtggccatgccttggcccttttgcatccttcgcgcccttctgccttttgggcccctagatggggtgtgccggtatcttctggagagatccgtgtcaggaccgtcccttccggtgatctcaccgtcggagagcttgcactcgtggtggtgccggtgatcttgttttcctcttactgctgttaggggggcgcaaccccgtgggggttggcgctcttccgccattgctcggcttcaaggattttcatcatgcagcccggctacagtcctccgccagtggccatctagaaggatgaccaccagcctcgcggtggggagaagcaagccgggctgcagcttcctccccagcttcagcttcaaggatgttcatcatcctcgctggagtggagggagagccaagtcgggggtccgccctccgcgtgggctggtgacccgcttcttcctccagcattcggaggagaagggtgttcaccagccttgcggaggaggcgaacctcagctacgtggggccggctggctgcaggccgtcagctgcagcgtgtccggccctttgggttggacggcttcggtgccgcctccgacgctgcctcctatcgtctggctggaggcgtggctgcccgtccaccgcacgggcgacggtcgcgccgtgcgcaggtcgccacatccatagcttctcctacccgccgaccgcactaggggggatcgtacaagacgccgtacgccacgagagtggtggccatgctcttggatggtcttgtcctcactctcgtgggaggacgggagcgaggaccccttcgtgcgcgctgaggcagccgtcgcccaccggcacggaggtgggcgctgtcgtcggagctgaggtggtcgccgtcgctggtgaggctacccgttgcagaggtggttgcctccgtcggcgagaccgtcaaagccacctgccgctgagtctccgactttttggctttaatggcctcgttgtcaccccccgtaggaggacgggggcgaggacctccttgcaacggcgcacaccctgaggtggacgctgctgctggcaaaccactcggagtggtggtcgttgttgctgtcgatgcagaggtggtcgctatcgccggcgatccgtcgatgcagaggtggccgccgctggtgaggttgctcagagccaacttccagcgcgactcttgctggtgcagcgtagctcattcctacaaaaatggagctagggccccgcttgtaagggaatgtaataacatatgcctgctcggaagcaaaatgtaataacatatgtatacaggatcttagtctgggaagccaagttgtgcgcccggaccccctggatggtggttctaggtactaggacacctgctgcagggtggtggagtgtgcaggcccacggtatgggaccaggctgagcggctacacggctccggactaccccaggagacaagcatcgcttctctagttccggaccccaagctgtcggacgcacaggacttatagttccaaatactagggcacccgtcacggagtgatggagtgtgccggatttcaggtacgaaaccaggctaaccgaccacacaggctccggaccaccccatggaacgggcatctgttctttagaactggcccccaggctttttcctgttttttgtaaggtacttctgagtattatttataaagcag

SEQ ID NO: 34289 - DNA, 3479 bp, Zea Mays
gtgaaaccaaacatacggtaaatgagcgcgcagcgttggctgaaaaagaaaaaaataatctttctcggtacggactcccgtaaagcattttgcagtccagcagcagcagcccctctcgtactcctccgcctcccgcaatgccgcccggttccgcctccgccgccgccatcgccacccgcttcgcgacccactggatagctgacgccctcgccggcgacgagtacatagacttctccgtgctcaaggttctggtgggggcctcgtcgaagcccctcgcgggcgccccggagtttacgcgtgagcgggtcgcgctccggtgcattcaggaggtgtcgtccgtgatagccgccgggggtgacgccgcggacaccgcgggggtgcttagggttgatggcgcccaatcatgccagaatgtgctgtttcagcttatgagagaggttggtagccccggagatttggagaaggatttgcttccacatttcagtcaagacatccaggaatatttatgtaccgagaaatttatgctaccagaaacttccttccagatgctaaaacaagttgacccattgcttacatctatggccctacaatcccaaatggagcacaatgacactgaacaatgtgacaatgatcagtcactgcgcagcagccacagatgtgtaaatatagagaagcctgtgtttgtgttccctacagatgtagtcaatgaaagtgaaacaggaaatctccaaaaggatccgcctgcaccaacttctgtttttcaccaaccatgtatgccccaaagcaggtcttacgtccctccgcaagaagatactattgatgctgttggtctaggcactaggtcctcagaaaggattcctattgtggaggggaacatgtctgttggatctgtgcttgcttcagatggctgtgatgcacctttgcagggaagcattactgagcccttttcccagcaggataaacatgaccatactgctacagttgaaccaaaatcttgtaagcaaaaatctccaagtctatctcactgtgctgatggagatggggcaaatgatggtggctccagcaatcagtcatctaaggtttccattcatgaaggactgagctctcatgccacggtaacttcaggttttgacagaatcagcgatgtcttaccaacagatgcatctggacctgagcatttgcctgagtgcataacagcacaggatacaaacatgatttcacagcttgacagcaggaaagctcatttgagtgctctgcaacaggataggggtgagaaagtaacccaagatctggaagatatctctgcaaatattgggctagtggaaaaggaccatgttcatggggatctgactttgcaatctgccagtgttttgctttctataagctgcaatggtgctaatcaaggaagtaaatctgaaaccaaccttcaaccagggattgttgctacagaggataggatggctttggaagagcagaatgcagacaagtctcacttagaattcagcgataccaacatggctaatcaagctctgcatgatgattgcagcgtcatgaaaaataatgcggtacatggcgggctgactgcacagactgctgcagtgtctcaaaactgcaatgtaaccttacatgataaaacttcagaagccaattgtttttctgagccggaaaatgaaaagaacattcaaaaaaataattgtcatacttatgttccaggttcttctcaggataggggtggagaaagtgcaaaggagacatcaaatgagctaaagtctaaggacgcttctccagaaatatttgtccatttcgaggatcaatacatcattgatactttggagggcttgtctcaacaagatttgtgcttgaaatgtggcaaaggtggtcagttgttggaatgcagccgctgttttttagctgttcatagtagctgtttgggttcatcagcgacatttgaagggacaaatttattctactgcccaatatgctcttataagaaagctattgaagcatgtaaaaaggcaaacaaaacatattgcgaagctaggaagaaccttgctgctttacttagcaaaacacaagtcaccaagcaagttcagccaggagatgcccatgaaaatgaagtaaataatcttgctcatcaggttaaagagcctaatcagcagaggaggaagcagaaaataaatgctataggtaagggttatcctaaggaggtactcactgagaaggttcctttccagaactctggttcgtctgcatccattaatatacattcagtgctccagaataacaatgaaatacaagttaaggattcagagaaaaggcggcaagcagtagacgaagaaggtcgcaaagaagctagtaatgacaactcatctcatgaaacaggatcttcatctcagataagatgtgattctcctttgaatcaggacgttgaggctgaccaggatggtaatcttacagcttctaaccaacctggtggttctgatgaatcagaagcaacatcttctgatgactctggcaggccatcatcttcttggcagtcatcacgttattggcgttgtacgagacacaacaaaaaaggattgcaagataaggagccagctgtatcaagtaaatctaaggaggatcaacaaatgcctacttcaccagcgaaaagaaagtctgcaaacccgcaaaagcactattccaatcctgttgcgagagctcgaagacgcagaaaactctggtggacagcagaagaagaagcaatgttgaaggatgggatggcaaaattctctccacataatgatggtcaaatttcatggacccagatactgcaatatggccgtggtgtgtttaacatcgcgcgcctgccatgtgatttgagggtcaagtggaggaacatgcagatgaaggagaggcgggcagtctcttacacacacatataactgttgtgtgtcatactaaattactaaccatgccttcatttgtttgtgtccatctgcagatataattgatgtggcagatataaccttgcctttatttgtttgtggcaatcttacacacacatataacactgatgtggtactagaacatagcgaatatgcaagtaggaatggaagtgggtttctccgaaataggatgacagaggtatagtttttcccttcttttggtaagtacggcgttgattggttgtgtgatttggtgaacctagacctactatacccgtagatgatgtaaagagattggtagacactcactatgtactctgaaaagaggtatcagagtcgacttccttttgtttcttttgggattgaatctaacagtttagatgataacatccggcagctgtgtttcatccggcaactgtgcatagcaggctcagggacacgcaatgttcttgcatgagtttagggttcaattcgtaatactccctccatttcaaaatagtatttgttttagagtattaatagatttatacaatatttggtgtatgtgtttta

SEQ ID NO: 34290 - DNA, 1188 bp, Zea Mays
gtttcgtgttcatacgagctagaataattaatatccaataataataagtcagatttcaacatatattgcatgtaatgtatagacaggttggccagtaaaaagaaaaagaaaaaagataaaaacgtagggcctagtgatcagcacagcatgcagaattgcagatgcggcgcacatgcgaacgtaacaaacacagcaacacgcccacgctagcggtttccatttccggccctgcaatcctgcaccggcgcgaaagccccctcacggcctcacctccactccggtgatggccgcctctcctttacttctcagatctcagtgctcacgccgtccacggtccactagttgcatcggctcccgcataaagatccacaccacttgagcagcagctagctcaagggaaggagaaggctggaagtggaaagaagtgggttcttgcttgagctgagctcttgctgcccttgaatctgttagggagtggagaacggagtatggggcgcggcaagatcgagatcaagaggatcgagaactctaccaaccggcaggtgaccttctccaagcgccgggccggactggtcaagaaggcacgggagatcggcgtgctctgcgacgccgaggtcggcgtcgtcatcttctccagcggcggcaagctctacgactactgctcgcccaggacctcgctgtccaggatcttggagaagtaccagaccaactccgggaagattctgtggggtgagaagcacaagaacctgagtgcagagatcgacagagtcaagaaggagaacgacaacatgcagattcagctcaggcatctgaaaggcgaggacctgaactccctgcagcccagggagctgatcgctattgaagagggcctccagaatgggcagaccaacatgcgcgagaagcagatggactactggaggatgcacaagacgaatgggaagatgctggaggacgaacacaagatactgacttttaggatggtaattctccccatctgaatagcagttgaaactttgcttgatcatccttcctcctttcaactccttagcataacttatcagtatgcaatattctaaacaaactcaatgttccgagctaaccgaagaaactgcacaaccacgctgagcaaatttccaaggacatgaaaattcttgtcttgggatttctagttggaacgcaattctgctc

SEQ ID NO: 34291 - DNA, 3092 bp, Zea Mays
gcaatatttcaaaggccgtagccccgtataggcctgcctctcgtctgcgccctactccccaccacttccctcccttccccgcctacaagcaagccgccccagccattcatggccatcaccaccaccatgtgtcgccgccactccacctccacctcccacccactcctctcaccgcaccactaaacccgcctccctcgctcctcacccgctccctgtccgtccatccatcgcctcgccgccgctctgctgccgtttgctccagctgcggccgacgggggccatggcgggcatcgacctcaacaccgtggaggaggaggacgaggaggaggcggaggcgctgcctttgcccggacccggtggccgtggcgccgtgtgcctggagctgtggcacgcgtgcgcgggccccgtcccgccgctgccgcggaagggcagcgccgtcgtgtacctgccgcagggccacctcgagcacatcggcggcgacgcggcgcgaggagcagcagcttcggcggtgccgccgcacgtgctctgccgcgtcgtcgacgtcaccctccacgcggacggcgcgacagacgaggtgtacgcgcgggtgtcgctgctgcccgaggacgaggacgcggagaagcgggcgcaggcgcaggcgcgggtccgggaggacgaggaccgccgcgacggcgaggacggcggcgccatgaggccgctcgcacggacgccgcacatgttctgcaagacgctcacggcatccgataccagcacgcacggcggtttctcagtgccgcgccgcgccgccgaggactgcttcccgccgctggactacagccagcagaggccgtctcaggagctcgtggccaaggatctacacggcacggagtggaagttccggcatatctatcgaggtcagccacgaaggcatctcttaaccactggatggagtgcatttgttaataggaagaagctcatttctggagatgcagttctcttccttcgaggcgaagatggagtgcttcgactgggagtgcgccgagcagcccagctaaaaattgtaactcctattcctgcacctcataaccagtgctcaagtaatagcaatcttggaaacgttgcacaagctgtggccacgaagactgttttccacatctactacaatcccaggttaactcaatctgaattcattgtaccctattggaagttcacaagaagcttcaatcaaccaatttctgttggaatgaggtgcagaatgcgatatgaaagtgacgatgcttctgaaagaaggtgcactggtataataattggaagcagagaagctgatcctatatggtatggttcgaaatggaaatgcttggtggttagatgggatgatggtatagagtgccgttggcccaatagggtatctccttgggagattgagctcacaggatctgtttcaggatctcaaatgtgcgctcccagttcaaaacgtctgaaaccatgcctcccccaagttaatccggagattgtgcttccaaatggaagtgtttcttcagattttgcgggatctgccagattccacaaggtcttgcaaggtcaagaattgttgggtttcaaaacccatgatggtcctgctatttctgcttctcaggcaactgaagcaagaaatttgcagtacagtgatgaacggagtaacaataacttagggatcccaagacttggtgttaggtctccaactggaatccctgggtttccctaccattgctcaggctttggggaatctcaaagattccaaaaggtcttgcaaggtcaagaagtgtttcatcctttccgaggaggatgtttggctgatggccatataagaactgctggcatgtatcaacctgacggtaggcatgtatctggtgcagcttataaatggtctgcaccacaagggtatgatttcccacagccagcaaaaccggtttttctgttgcaagaatcatccccatcatctgtgatgatgtttccacaaactagatctaagataactcacttggaatatgagtactcaagacatgaggatggtagacttgataggactgttcctactcaagacatgggaagaagcaatcaaacattatctctttggcctcatcttgtttcaggcgaagcaatagaagaatgtactggaactgtgaatatgcactcccccgtcagtggtgcagagcatgaatcaaacaatgagagtacagttgaaaatggctgcaaaatctttggtatctcattggctgaaaagatccgatcatgcgatgaagcagactcttgtagtgcaaaatgtaattctcggctccagcctttgaagtcacaaatgccaaaatcgctaggcagctgttgggccactgcctgttgttggcagggtggttgacgtctcggcgacagatatgtgatctgatccacatggcatatccttgtagaatatgcaggaaggactaccgagtgcaactttcatggcctgaaccacatcctggatgaaagattgctgaaggtgaccttatgattcttgaaacagggatgtttgacaaatttgtaatgtacttttgggctttaagtatcttattatcttaagctacctagtaatcagcacttgtaccttaaggtgtgcgttatggcaagttcttttagagggcttgtttggactagcaccatctcccaagtactcgttgcattgtttctttgccccgggaaacaagtccgttttggaagttcggctccagtcctgttggtaccatttgttgcatcgtgtgtgcttgtacaattgcacatctcaagcggtaaagcatgatttgaccagctagttgctgccttaattgggacgttcagtcaaggaataaaggccttgcagtatcatcacttggcggaactgccagcagtaggcagtagctaattagctagtgttgacaagctggcgtggtgagcatacgctcctgtttgtttcggcttttcgcagtttctggccaccaaaagcttctatagactgtcaagtactcaatttttcagccagttcctataaaattcgtttgggtaaaaaccattcaaaatcaatgtaacatataatcggttgagtcgtcgcaatagtagtaatccgt

SEQ ID NO: 34292 - DNA, 1823 bp, Zea Mays
gtggattcgggagtggatcttggtgtttgctgcctcaaacaaaaaaaagggaaagcttgggctttgccaagctcaggtggtgggatggccaccaatccgaagctaccgcaagaacacgatgtctaccacccagctgaagggcagcaaggaggatgctgaggccaagcaggaccaggggttcctgtacgtcaaggtcagcatggatggcgcgccgtacctcaggaagattgacctcaagacttacaagaactacaaggacctgtcgactgcgcttgagaagatgttcagtggcttcagtactggtgagatgtctcgggttactctcctctcccggatggcacgtcagtatgtaattgtgtttcattttgatgtggatggtgtaagaagtacatcaagaagcctttaaaaagcatcataattgattccttggataagcaatagctttgacttaccgttagttttgagtaattgtgagattacaaacaattgaatccttggataagcaatagcttcgacttaccgttagttttgagtaattgtgagattacaaacaatctggcacatcttctttttttatctttagtgaactttttattccttgctaaacaaataccctgctgcttgttctgttattgcatttgcatcaagtctttcttagaaagattttatttcctgtaaggcaaaataatttttgtctccatgttatgattattcgaggatatcttcgggtcctgagtattattccagaaagctactatcactatgagagcaacatccactatatatttctgaaatttggagatctatggtctgtcctgtatttgtatatctaatatctcattagttgtcaccactttcttagaatcatggacatgaaaatgcggtccgagtcttttcagtagaaattttagtacaagaagaggttctcttctgctttccttttattggtcttacaggttagtatgggtgtaatgccatatcaggcaaggatggcttatctgagtaccgcaaggatggtgaatatgttctgacttacgaggacaaggatggagattggatgcttgttggcgatgtaccatgggagatgttcgctgactcttgccgcaggctcaggatcatgaaaggatcagatgcaattggacttgctccaagggcagctgataagtccaagaatcgcaactagaatggttgcttcttacagtccagagcaagagggagatatccagtgactgtagggatctttgtggaagccggaaaacgtctaacagtttcaagaagaattctgccttatggtctgtaccacatgtttttgctgctacgcaagtaaagaactccacgtctgtcaatgttagttttacaacatcgtctacggacaaaaaaaaaaccccccgctatttgattgttgctaagccttcgtacgacgtgtaaatggtttggtacaatgagtgctgcgactacgattgagcacccctctacctagtttgcaaaaaaacagtgtcccatggactgtctgttgtccctctatataaatgtccaatgaagcttgctaatgtgtggtcatcgtgttcatgttctggtccattcatctcgacagtgttgaaaccctgacgaagcaacttgtttcgaaagtgggcctcctctgtggagcagtttctttgtggaaactttgattcctctttttttttcttttttttgttaccagctttgatgcctaattgctggtggggcatgcagcgtatgcgattatttgtctgctgctgaaggtcatgatggttaccatctatgatcccacaccaaagtgtcattttttttaaaaaaaaaga

SEQ ID NO: 34293 - DNA, 201 bp, Zea Mays
aaataattacatcatacgaagacatcaatccaacaaccatagttgactgggagacgacgacctagaccactcatgaacccatcacaacatccttcatgcgcctcatcttgtggtacatgtccttgaccagggggtgtgagtacaacaagggtgagctcacatacgttcatcgctcaacaagttgtgcggaataatgtgcat

SEQ ID NO: 34294 - DNA, 3141 bp, Zea Mays
ccgtgccgatccatctcggctgaccctttctttcccaaagccgagcagcgaccagcgaccagcgagggtgccactcaccgcccgccccccagtaccccactcactagctagctagctagctgcgcactacgagtccggcgatcacagcccggcaggccggccatggccaccgtgcccgtcctagtcgtcctgcatgttctgctactcgctgctgcggccgcctgcgccgcggcgggggggagtagcagcaaggtgccggcgctctacgtgttcggcgactccacggcggacgtgggcacgaacaactacttgccgggcggcgccgaagtgccgcgtgccaacttcccccacaacggcgtcgacttccccacggcgcgccccaccggcaggttcagcaacgggtacaacggcgtcgacttcttgggcttgtgcggagatgagagagaagacgtcgagaaagggagtagagatgccgggcgtgcatcatggggagaggaatgcggagtctgctggggctataaacagtgctacagcccgtgcaaaaacacggatacggagtgcaataggatgggttgctggcagtggcggacgcaggacgaaaatttaggggggggccaaaaagatcacatgagagccatgattttctagttcgccaagtttgccgactgtagggaaagtcatattattgcgacgagcgagatctagcttgtcgagcggatcgacgtcacgataaaaacaggacaaaggacggagacgtcacaaaggggcgaagtcggatggcgtcacatcgggaatgggtcggcggcggaaacgaggcagcgagcagactggtttaggtgctgttgggaagattagagtcagactcgtagatgcaaggactggatcgagaggatccggcgagcaggctcataacatggttgttttaggccatgttctaaacctctagagctaattgttaactgattttagctgggttggggcatctaacaactaatacttatttgaggggtataactaacatttagttgatccattctaaaccttttaggtaattttagcaactagctattagttttagagatttagaacaagactttataccatctaaaacttcgatttttttctacacttaatactaaataatcattaggtataaaggggtgtataaaattgagggggggccatggcccactttgcccccctctggatccgccactggttgctggagttggtcttacgcattcggcctctgtcgatcagataacacgtaatgctgtttggttcacgtatttgtaacgtgaacggtaaccgataacgttaaaccatgtttaagtctaaccgtaatggataccacaaatattggcatgtatattcaaatttttactgctggtacttgagtgtaaatttcctgaaccaaacagcaccaccacattgtacatgatttgtccgagcacactgtgtgtgactggctcgcttggcgttggcgcttcaaggaagcagaggcagagggagacgcagtgtagttgtagtggaccaccacgcgcccactgcacctctgcatggtcacaaagagcaacagtaaccataggaaaaaaatttgctatagtccggctgcaaatcgttttagttgtgttattgacctgcaggtggggtctattctcctttttgtgaggggctgtaaacatcttggtttgtagccgggctgtagcaaatttttttcgcatctagtaaaaaaaattgaacccataaattactagtagtacgtagcagctctaccaatgaatctgccttgtacatgcacaatcacaagctggagaattgtgctgggaacatgtccatctcctggcggtgctaaaaaaactaaaaagtgtttcgttcaactccatcagccgtgaacatgggcttcaagcgcagccccccgccgttcctcgccgtggccaacaagaccaacaggcaggtcttccgaggtctcctgggagtgaacttcgcctctgcaggatcaggcatcctcgacacgacggggagctccatcatcccgctgagcaagcaggtggagcagttcgcctccgtgcggcgcaacatctcgtcgcgcgtcggcaacgggtctgctgctgccgacgccctgctgtcgcggtccctgttcctcgtcagcaccggcggcaacgacctgttcgccttcttcgcgcggaacagcacgccgtcggacgccgacaagcggcggttcgtcgccaacctcgtcgcgctgtaccagaaccatgtgaaggctctgtacgtgctcggggctcggaagttcgccgtgatcgacgtcccgccggtcgggtgctgcccctacccgaggagcctgcacccgctgggcgcctgcatcgacgtgctcaacgagctggcgcgcgggttcaacgagggcgtcagggcggccatgcacggcctcggcgtgagcttccaggggctcaggtactccgtcgggagctcccacgccgtcgtgcagagcatcatgaagcaccctcaaaggctggggttcaaggacgtgacgaacgcgtgctgcgggtcgggccggttcaacggcaagtccgggtgcacgcccaacgcgacgctgtgcgacaaccgacaccagtacctgttctgggacctgctgcaccccacgcacgccgcctccaagatcgccgccgccgccatctacaacggctcgctccacttcgccgcgccgatgaacttcaggcagctggccgaagacgaccggtgctagctagctagcacagctagagctagcacgaggacgtagggacgtgtctctgttctctgctgcggactgtggtgaatatggtcgttggtgtgtagaggacgacggatgcgtgcatggctgctgtgttcgctgtatgtttctcgaccgtggtttggtttagatgatgatgaccgacgccgccggcgtagtttggactgtgaacgaatttacatcatgctgctgcagaggtacgggtgtaccgtgtacgtgacatcgtctacacctctcctggacaactttaactgaatctttttttacgcgtcctcgactaaaaattccggagagcgcgcccagaaatacctggtgtaggagccagtgagagcgtcacgctcacgccctttggatccgagcgcaggctctaa

SEQ ID NO: 34295 - DNA, 558 bp, Zea Mays
ctaaaatgtatctcgctataaactataatagctggactttggagctggaggtgctaggtttatgcagctttaggcatctatttatacaagcaagctagtagcagcagcacacacagtatgatatgagcatggtggagggaagggatcgtttttcaaattttctcactggagaagactagggaggagcaatgtccctgtccaacggtggtatgtggtacaactaaaggatgggtggcagtgtctacatcactcgcatgacgttcatggaaggaaacatgcatatagctaggggcaataattcttgaggctgttatagggaggagcaggcaacgttgctgtacatacacaggccctaggacagggacatgcttcattgacctctaatggtaaatgataccgagtcatttcgaaattcctgcaaaataaactagtcaatctcatcttacacataacagctgatgttccataatgaggtactccgtgcgttccaaaatatagttcgttttagactaaacatacatttattaatcgacttatatgaatgtagttttgtatgta

SEQ ID NO: 34296 - DNA, 1455 bp, Zea Mays
actccgctccacccacccacccagctctgccttcgtcctccccgtcccgtcctagctaggctcttcagtcttcccccacaccaactcgctcgccggccaagcttccttctcatcctctctctctcgctgtcgctgggccccgcggcgccctccccctccccgcatttaatcctcgggcgtccgtgctcccccggtccgctcacgccccgcccgtgatctcggccgccgtctcccactctgtctcaccgcacgagccccgcgtggtggtggtggtggcgctaaatggcgagcagcggggtgaggaacggcgtggggcccaggatgagcgcgaaaccggaccgtcagggcgccggcgccacgcccaagacggccgcggggaagcaccgcgtctcctcggcgggcggcgccggcgcgtaccgccggaccagctccggcccgctccccgcggcggcgggcggccgcgcggcgtcggacggagcagtttctagtagagtaagggttgctgtaaggcttaggcctaggaatgcagaagagttggcggcagatgcagattttggtgattgtgttgaacttcagccagagctcaaaaggttaaggcttcgtaaaaataattgggagtcggaaacatacgaattcgatgaagtgcttacagacttctcttctcaaaagcgagtgtacgaagttgttgcgaaaccagttgtggagagtgttatggagggatataatggtacagttatggcatatggccagactggtactgggaaaacttttacactgggaagacttggtgaagaagacactgctgctaggggaatcatggttcgtgcaatggaggatattctagcagacataacacctgggactgattctgtctcagtatcatatcttcagttgtacatggagatgatacaagatctccttgatcctgtaaatgataatatagccattgtagaagacccaaggactggggatgtttcattgcctggagccacagtagttgaagttagagatcaaaaaagctttgtggatcttctaagggtgggtgaggctcatcgtgttgctgcaaatacaaagttaaacacagagtcatctcgaagtcatgcgatcctcatggtgaatgtcaggaggtctgtaaaaggtagaactgaaatggatgtcagcatttctggtgaaaatgggctctcatcatccttggtagggtctttgagaccacctattgttaggaaaagtaagcttgtagttgtcgatttggctggatcagagcgcatagacaagtcaggaagtgagggtcatacgttagaagaggcaaagtctatcaatttgtctttaagtgctctgggaaaatgcatcaatgcacttgctgaaagcagtcctcatgtgcctgttcgtgattctaaacttacaagattgcttaaagattcatttggagaaagaatcagtgtgctatacttatga

SEQ ID NO: 34297 - DNA, 2328 bp, Zea Mays
ttcacaagcatgtccgaacaacatttctgggtgcactttgacgccccttgatctctgtgatgtaacaaacgagataacactgccgaaccatcagggttctgttggtccttctactccttcaaatctgaattccaggttaccagggtctcctgctatggttttgggcaacaattcaccgttcccttcaacattgagtagtcctagggatgctcagaaatatggtgttcccagacctatctctttacagggtgatgagcaaccaaagattcagtataatcagatggtcaatgacagaaatcttcatgaacctggagtttctgctcctggaactactccttccggggttgattgtggtccaggtgccctcatgatgccatctgcccctgctatgggaacagtggcaggactaaatcgaggtatgcctggtgccaagccaggctttccaaggattagttcaccagtaatgttaaatgctgttccatctggaaatctgtttcccaacagtgggcaaggtgtgctcaacacagtaaatgtccatcctggagccatatctggtcctggcaattcaatcttgaggccacatgatcctatgcaaacatttcgtcctggtcagggtatggaagagcataggcagatgtcggagtttgacatgccggtttcacagggaagcggccaagccactatccagtttagcagcatgaattcatctttctcgagtccacctgttcagcaaccccaacggccacatcagatgtcacaatcgttacacatgtttgggaatccacaccattctcagatccagggaactagttcaagctcacaacagcaggcatatgctgtgcacttggctaaagaaagacaaatgcaacagcatatggcacctcaacagcatagtgatctttctggagcaagtgcagtacccaatgtgcagagtaatactcaaacattgcagcagggccaaacctcatctgccaattcagccccttgttcaaaatcacagcatcagcgacagcaagcggcacaaaatctgccggatagctcttcatctcccaaccaacctgccacttttacacaacagaagcagaagaaacaacaggaacaacagcagtctagacaaaatgagccacaaaggaaccgtggcagtcaacaagctaagcttatgaagagtttaggacgaggaaacatgatggcccagactcctccaattgactgcacaccaaccaatgctgcttctactccatcaaaaaaccatgtgtctgaaaaactggtgcaacatggccaaggacatttccctgccaatacaacaccagtaccgtcaatgcctcaacctaggctagtcacttcgttgcctcagtcaccaacgaaggtggcagacattggtaaccaaggtttaaaaaagggtggttctttgagtcaggccatgttagctttgcaacaacctccacatggttctaaatcgacattgaccactcagctgcagcagcggcaggtcaatccgccacagaacaacaatgggagagcagtggtgcaacagaaccgccaaatgaactctgactgtaggacagacttgcacgtcggtcaggtccgtcacaatcagatggttccaacatccatgccacagagtgcagattcgtgtagccctgtactgtcatctgtaaaccagcagaagcgtgagccatcgctcaatcagacttcagttacctcgccgtctaacctgcttaggtctcctaaagatacttcttttgggtagccaagacatgctacaaaggcaagttttcaggtggcttccctatacaggctcatggtgttggtgaccagtggaaccaacatggcagagagcaattgcagtctcagcatcagcagagacaaccggttgttcaaggcagtgcatatgctccttcaaattctgggcctggctgatcattaattatttcaggattcgtttttcttattcaagtgacagtttgacaaagttcattaagagccagagtcggatgagggactgtatggctgcatggatgcatggaccaggatggcccatgagaccaggccaggcgaagccatattttttagggtcctttgtttcattggggccctagattagcctgatttacccgtttgatctatggatttacctcccgtatcgaggtcgagatgcacattagtttccatgagtgtcttgatcggcttgacatccttcatcccaaacttgatgagtatgtcttgaatgtatttcgtttgactgatgaaagtgcccttttgaagttgctttacttgaaatcctaagaaatacttcaactcctctatcatagacatctcgaatttttg

SEQ ID NO: 34298 - DNA, 1603 bp, Zea Mays
caggacgacggcaaatccgcccacgcaaaatatcagcccaagtgcccatcgcccaagcttcctagctcacccgccgccacccactagccaaattccccatccctctcctgccgccacccatcagccacatctctccctcctactccctctccggcagccatcatcagacaagatccctcccccaccatcgagccatgtcgagtcgagtgcatcttctgcaagcacggccatcttacgaaaccctagctggctcgaaggaccactactgtccggcgccctgaacaacttggcatgatgccgacgaagggtggagcaaacaaatcacaatgacatcgggtagtagatccaccattgcatccctatgaagaggagcgccttagacaatgtatgaggaacaattcgaggttgcaacaacttggaattcctgctttagtcagcatgtgtgggaacataaattccatctctaggaacaaaaagccaaataacagggataatgaagattctgaatctgagtatgatccttcacatgacgattctattgaaggggatttgtttgaccatgatgatcataataagaagggctcaaaggacactaacagaagaactattcacatggctcctggtggaatcaagcctcgaactaagagagtttatgcagagcaacatactactagaaatacaagctaatggccctacccaggttgacaacacccacatggccaatcgagatggctttgaccaatttgatgacaacatgaccaaccaaggggaaggcattacccagcctggtggaaaaggtgatggtatatttctatatttaccatattgcatattacatcactagttgcttgctaaacctatcatgtgtcattagtttctactttactggatgttcttttgaccttttcaattagattcatgtgccatgtgtcattagcttgtcaatagtccattggatgatcatctttgatccatgtttgatgcacctcacttattgcaatttctatgtgaatctaaaactaggagtaaatcagcatagagaaaggggacttaatatgggacttggtctccaaaggatgaaccgagctcggcgtggcaaactgccaattgtcattactgaaggaaggataaggcctgtggcaccaattgttgctgcaaagtttgcaactgagtgcaacattgcagttcggaatcatgtgcttgtgcttaagtcatggaaggaatacgagaagcatcctgggctctttaaattgtttacagcaaaacttagtgcaaagtttgatatcaatacagaagatgcgctagttaaaaatgcttgtttccaaatgatgaggaatgcactgcgccaacaacgatataagctgaagaaacaatattttgacccttttccgctacatctagtgaggaaaacatctcctatcaaatcgacaagtgatgaacaatggaatgaccttgtggaacattggaaaggtccaaaaaatatggcgacatgtgaacataacaaaggcaaccgaggcaaagttaagttccatcaaacaactggatctcgtagctatatggttcatgtagaaaatttgtttcataaaataatcctactatcaag

SEQ ID NO: 34299 - DNA, 3782 bp, Zea Mays
ccaagccccaaacagctagctcttccccacttcgcctgcggcggcgctccctcccgccggtttgctcgctgggccctggcgcgttcgtctcaacgaagcactcgcaccgccggccaccccgaagcaatcgccactgctatctcggtgtcctctccctccacccggactcggattgacttcctatctctcgtcgggggccaagcatgatggaggtgggtttgaacccgggggaggagctggacttcggggacaaccaggaggacgacgacgacgcgggggacatctcacccgccagcaaggagctggccgccatggtggcggcggcggcggcggcggagacagtcgagcttgacgacggcggcgccggtgtcgaggcggccgcctccgctgccgccgccgcgtcgtcgtcgtcagcggcggcgcggtacggggacgaccgcacgccgcgggacgggatggtgttcaagtcctacgaggaggtgctcaacttctacaagcgctatgccctgcgcacgggcttcggcgtctgcgtcaagaagtcctccttcaccaaggccggcctctgccgccgcctcgtcctcgtctgcaacaagtggggcaacggcaaggaggacgcctgctaccaggccaggcccacggccaagaccaactgccaggccaccgtcgtcgccagactcctgggggacgacttgctgcacctcacggatgtgaacctggagcacaaccacgcgctcaacccatccgccgcacgcttcctcaggtgctacaagacgctgcctagcgggttgagcaaagatctcgtggtgagggctgccagaggggaatgctcggtggcgggtgacatcgatgtcccgatatttgatgaatgggggcggcttaagaccgggcaagctgatgtcctggccatcaacgctttcttcacccagatgcaggcaaagcttccaaactccttctatgtcatggacttctatgtggagggccatctgaggagtgttctctgggctgattccagatccagggcagcgtatcagtatttcagcgacgctgtttggattgatacggcatgcttaaggaacaagtatcatgtcccgcttgtttcgtttctgggtgtcaatcatcatggtcagcttgtattgctaggctgtggattgctgtcagatgagagcacagagagcttcttgtggctgttcaagtcatggttaacttgtatgaagggacagcctccaaatgccatagttaccgatgaatgtgtggcgataaaagccgcagttcgagaagtgtttccgaagacacgccatagaataagtgattggcatgtagtgagaagtatttcagaaaaaataggtgacttgccagaatatgaagcgatgagaaccaatttggttactgtaatatatgattctttaaacgacaatgagtttgaggcaaggtggaagaactggattgatagatttagccttcaggataatgaatggatcacctttctgtatgagaatcggcacttgtgggcccctgccttccttagggacactttctcagctgggctctgtactgttagccagcgtgaaagtccaagtacattttttgaggatgcagtcagttcagagaccacattggtgacgttccttgccagctacatgacacttttggataacaaatacaaaatggagcaacaagatgattttgattcattaaatagcagcaggctcctgatatcaaagtaccaaatggaagaacagctatccagattgtacaccttgaatatgtttatgaagttccaggatgagctaaaggcaaccatgcattgtcaagttcagctggatgggtcagcatcttcttttatagttattgatttgactgaagcagggagtgaaatgctgaataaaaagtacgaggttgttcactgcatggcgacaaacaggatggagtgtaactgtggcctatttcagtttcatggtatcgtttgtcggcatgcattatctgtgcttaaatggcagcaagtatacgacatccccccttgctatgtacttaacaggtggcgggctgacttcaagcagttgcactacctagataatccatcaaaggatttagcaacaagtaatcatgtcgagcgttatgattatatttctttgcagtttcttcgtctcgtcgagattgggatggtatccgacgagaagtataggcatgcagtaaggcttcttaaagacatgaaagagactcttcttgatgataatctgtgccgtgatttggagcagaagcttacaccagctgagcgtgcaattgtgaatggtgacaaccatacacaacctggttcatctgagggcggtgctgcaaaaaagcggcgaggccgtcctcctaaaaagaataaagagataaacatggattccatggaccctttactagtatcctcggatgtaactcagaaggacacttttcattctgcttcaactacctcaaaccttggcactcatgtccggacgcatggcattgttgatctcatgaagtcaatccaagcgagctgtcatttgatagccgttacggggtgcaatctggccactcgcaccattttggtaataaccaactaaatacaggaaacacactgcggtttggccaatctacatcagcagcagagcagtctagggttcagtgggtgtttcataatggcatgtatcaggatgaccaagtgacttacggcagacggacatcataacaattggacttgttaggctccagggtttgccgtttcaggtttctttctcttgagattttattcccgtgtgtgccatgatgaggtgatagatagatcatgtctttcttgcaagttaatatactagccattgcttctacagatagaggagtgactgaaactttgttgagaaaatatagcattttacataagaaccctgtggaacaggaagtcaggaaggccatgaaaatctgcttaataagagctccatcggcatacagtatttgttatggaagctttatgtgtttaggccttgttcgtttaggaggtggatcgaggggaattagaggaattgaataggaagggatttgatccccctcaatcccctccgatccccatacaaccgaacatggcctgagtagaaagttttcgtctaagcggcattcagtgatgagctatatttccaaattttcatctgtccattttctgacgattttatttcatgccacatgtcctgcatggaatgtgcaggaaatcgggtcaggggtcctcggtttttggactttggagcaccgatgacttaagtgatcctccattgtgcttcgaacgttgagccttgggagatgcatgctggaactggctgctggtgatggtggcggcggcggcatctgaaggcaggatacactgtagaaacagaagtttgccactaagccagccgaacgcttccataagccatcaatgttagccaactaactgacatgtgtatatacacacacatcatctcagaaagaagccgtcattccgtgggaagtgctgcgtaaactcctgataataggcgtggtcagcgtcggacaagaaattgagagcttcattttctttctttcacgtgggaaagatacaattttgttgcctcctgacgatcagctaaaagggggaggaaatatccatgctcttcatctgggaaagatgcaaaaaccatccagctttatcatctttgctccttcagtaccgtgcctggaatcctgctttaccaatttttagcacccaaaaaaagaaaaacaaaaaaaaactatctgtggcgccccttgacacaaac

SEQ ID NO: 34300 - DNA, 215 bp, Zea Mays
cgctaatgaatgcaccatatgtccttagatacacaccaactgtaattctctttctaacaacgatcaacttggtcctatttcattttcctagattcaacactcaaggtgcctattatagtattatcccatatttttactatcggtgtctctacctcttcaatatgatgtgtttcccacttctataaaatgtgaccctcggattgatatattaaaat

SEQ ID NO: 34301 - DNA, 2933 bp, Zea Mays
ggggactcggacgggactgggacccccacacacccagcacggctggccagctcctctcctcctcctcctccgcctcccacgtccgtcgtaataaatcgccccgtcgtctccaattccccccctcctctcctttctccccgcccgcgtgagatcggctcgaatccaatcctctccaataatacgcaccggcacccatttgcgccatgctgccgcggccggccaccacgacgagccaagaacacgcgcggcatccctgagccacccacccaggcttaccaaaacggattccttttccctcttggatcccagccgctcccaagcgtgcgcgcgaattctctgcttgcctcgcccagcgccgtgtgctcttgtgctgaagatccatcccatccatggaagggtgccaactgctagtaggctgtaggatggagatggaggaggaagcgttctttgactcgcgagaggagctcacggcgtcgccggcgcccagcccgggccctgcattgccgtggtcgggaagcctcgacagtgtgtgtcagaggagggagcggttcatgagaagcatgggcctagagtgctgcccggctcccctgcaggccgatgccgtggccaccgtgggcgatgtcgacaaggaggaagaggctgtgccggaatttgggagatcgtggtcgcagtcggatgagaacgactgctccatgtcgagttggtccacggaggagacgaagagcttagaggatggtgtctcggatgacaattctgtcagtggatccagccgggatgatgctagcagcaaggtgagcaggagtttcagttcgttgtccttcatccagaggctcatgagccgcagtggtaagctctctggtgttcccaaggcggtcgagaggaggagaaacggatggcttcggaggctgggcttgaggtctggtatcctcgatcatggaggcgatgaggctagcaccagctcctcagagagtgagcaaaacaggggtggaaggtatgaaagggtcaaggtccgcagctacaggaagcggtcgaaagaactgtcagcagtttatcaaggccaagtgattaagggccatgatggtgccatcctggctatgaagtttagtccggatgggcagtttcttgctactggaggggaagatggagttgtcagggtctggggcgtcgcgcagtctgaggactgcaaaatcccaatggatgatccttcttgtgtttacctcaaagctcatcgccagagtggcttgggtcctgttgatgctgacaatgagaagaaatgcaaagttaagggcgtgaagcaatctgcagattctgcctgtgttgtgattccaacagtggtgttccagatctcaaagcaaccactgcatgagttccgtggtcactctggtgacgtactgagtctgtcatggtctaacaacaagcatctactgtcagcatcaacagacaaatctgttcgcttgtgggaaattggatctgcaaactgcatcactgtttttccgcacagcaactttgtgacttgtgtccagttgaatccaaccaatgagaatcaattcatcagtggatccatagatggcaaaatccgtgtgtgggatattcccagatgcagtgtcattgattgggtggatattagagacataataacagcggtttgctatcgacctgacggaaagggagcagtggtcggaaccattactggaaattgtcgattttatgatgcatcagataatctcctgaggtttgaaacacaagttgcactcagtggcaagaaaaagtcttctcttaaaagaatcactgctttcgagttctcaccaagcaacccaagtaaattaatggttacctctgctgactcgaaggttaaaattcttgaaggaaccactgtgactcagaattatagtggactccgtactgggtcttgccagtccttggcaacattcactcctgatgggcagcatatagtttgtgcaagcgaagactccaatatttatgtatggaaccatgaaaaccaagacgaggcttcactgaaacatgcgaaaaccatatggtcctcagagcgcttctactccaacaatgcagccatcgcaataccatggaatggcccgaaacccagaaacccggtctctctggcctcccaaatcttgtcaccacaaggagataacttgtggtgcatgagtaaggctgtcaagtgcagttcgagtcagagcgaagattctgctatcaacagttttgtgtcaaggtttgctcctggtattttcaatttgaatcaggagttctcctctgagtccacttgcagaagttcagcgacctggccagaggaaatcctgccgtctcgctcgattcgtgcaattctggacgagtcgcagtacaagttcctaaggaactgtttccagagcacaccaaactcgtggggtcaagtgatagtcactgcaggatgggatggcaagatcaggtcgttccagaactatggcttaccggcgcaccagtgaacaacagctggagcatctgctgaaactacaccggcagttttggcacctcacatggcgtgtggtttgttggtacaagacatcacatgctcagtgctcctcctgctgaattgtacatggaccagtgttgtacataatcaacctggtggtcctttgagatctccgcgtcagcggttgttcatggcaggacccgtggattgtacctttttgtagaaattttttgtgtgtagatcagatctgactctctccctttgcccccccttatcaattgctcattgatatatatactacagaaatgttagtctcagctgagtgtaagttcccctcccattgtattgcgggaacagccagatatatatatgtgccactcaagtatacaaaattctttcatttttttttgaacttttcctgctctgttgttctgcaagttttcattttgtcgatcgaatttcagat

SEQ ID NO: 34302 - DNA, 2157 bp, Zea Mays
gtgcacaagaggagcctgcgttggccgccaccgccgccgccgccgtgctgcgctagggaacccatcttcttcttccccgcgctgcctgctgcctgctcgagcttggagatggcgttggtgcggcgatgcctctgtggatccgaggaagactgcagagcgcttttgggcatggaaaatctccggctgttctcctacagagagatcagagcaggcacaaacaacttcgatcagagtaacaagcttggacgaggtggttttggaactgtctacaagggagttctaagagacggcactgaatttgccgcgaaggttctgtcctcggaatccgagcaggggatcaaggagttcctagctgagatcgagagcatatcccaggtgaagcacgcgaacctcgtcaggcttctgggctgctgcgtacagaggaaaaaaaggatactggtgtacgagtaccttgcgaacaacagcctcgatcatgcgctcaaaggagcagcagcagatctaccctggagcacgaggtcgggcatctgcttgggcaccgccaaggggctgagctacctgcacgaggagcacgagccgaacatcgtgcacagggacatcaaagccagcaatgttcttctcgaccgagactacctgccaaagatcggagatttcgggctcgcgaagctgttcccggacaacatcacccacatcagcaccgcagtggtcggaacgagtggatacttggcgcctgaatacttcgtgcatgggcagctgaccaagaaagccgacgtctacagcttcggggtgcttgtcctggagatcgtcagcgggaggagggtctcgcaaacgatccagtcggacatgttcccggtgcgagaggcatggatgatgtaccagcaaggcaggctgctagagatcgtggacgcgagcatggggagctacccggagaaggaggtgctccggtacatcaaggtggggctggcctgcacgcaggccacgcccagcagccgccccacgatgcgccagagcgagtgggacacaaccagaaaagggacaacagaattagaggcacagattcccaagaaacgggggcatattctattacaagatgactacaacatactataattatatatatagtaaatgaatgctgtcagctactggattcatgttgcctgcctaggctgctaatgaagatgactacataaacaatgtaacggtaacactgtcaagtactcaattctgtgctataacttataacttgcctaaaaacttagcactaataaaactggctacatgctaaggctccaacctactggggtccaactttcaactgaaccagagcacgggaaaaaaaagtgtccaactacagcgctgccctttgatccatggattcctggcatacacccagaaatgaaatggagccgcaagcctgcatcaatccctggttcaaccataaaacttccaggtcaacaattatgccaagttgacagcatggggtaacactggcgactggtcaacggcagtgaaattctgtatgaagtcatggccaccattcatacttcacagtttcttggcccttccataaatatattcgtcggtactctcatggccagtggtggcctgtgagagccttggaagcccacaagaagccaagaatccagggcttgtattcaatttgtggagacctcacagttcaaagcttcgtccactttcaaaatgtagtgcccaggcacatcattcatgcaggcatctaaggagcatggccttcgattctagaatatgttccataaggaactctttgcacggtccttggaaaatctggcttgaaccgcttgttaaaattcggtgccaatgacctagggtaaatggtaactggtcattagaatcatacaaagctcatataacctataatataaacataaatactgtgacgggaatatagttcacacaaatacaaaaacgattgtccgaatgttgactggaacatgaaatgtttattccacatacatgacccaacacagctaaggcactaacttcttcttggtcacctcttaggcgtaagggcttcctagccgtaatccacaatagtaactgagaactagtttagtcaagagtcaaaaagcacacgaacaaatactccaattttccatccctatcaaatttgatcactactct

SEQ ID NO: 34303 - DNA, 1668 bp, Zea Mays
gcgaaggaccgccgccgccccttcacggaacccgcggccgactccccctccgccttccccgctcgtccgcttctccgccgtccgctcctccactgcatggcctccacccctccgaccctgcacctcggctcctccacccttcggccccacgcctcggctgctccgctcgtccagccttcggccccacgcgcaccgcggccgccgtatctcccgtcatctgatcacccacaacggtgatgtggacgacgtggtgcgtcttggaggcagttccatttctggcgttacggtgagggaatgccacaacgtggtggacgccactgccgtggcgctcccgttgcaggccggagtctggacgcctaagcttcttgttttgctgggtttggtgcaagtggcccatatgttgcgcagaggagcactggtgaagcctaagaaccctttatgtcgatgggggcggtctcgagggaggtgtcgtcagcatgtgagaggctctgcttcatttgcccatcactgcggacgaggtcccgccatccagtcaagcgctacaagaagttgcttgcagaaatcttccctcggacacaggatgaaggaccaaatgatcgcaagatagggaaactgtgcgaatatatttcaaggaatcctatgcgtgttccaaagattacagtttacttagagcaaaaatgctacaaggaatttagggctgagcgctatggttcagtgaaagttgttatggcaatctatcgaaaggtgatatgttcttgtcaggagcagttgccactttttgccaacagcttgctaacaattgtagagacattattggagcaaaatagacaggatgacttgcggaaattagcatgtcaaacactttttgactttataaatagtcaggttgacagtacttacatgttcaatttagaaaaccagattcctaaactatgtcatctggcccaagagatgggtgaaaaggagaagatatgcattcttcatgcagctgggctacaagctctttcatctatgatttggtttatgggtgagcactcccatatgtctgcagagcttgataatttctggaaaattatgagagcccatatgcaaatgctgataatgatgctgctgttgaggatattcgaactcagtgggtggatgaagtgctcaaagccgaaggtcatgaacctcctgctgttaccattttgaccagggttccttcatggaaagttattagagctgttcatggtgaattaagtttgacaatagaagaatcaacaagcccaaatttttggtcagggatttgtctacataaccttgctagaatatccagggaaacaacaacaacgcgacgagttctggaagctatatttcgttattttgataataacaatctatggtcaccttctaaaggatttgcgctgtgtgtcctgctggatatgcagattgtgatggagaaatctgaatgctcatatattgttgtctatgttagtcaagcatcttgaacacaagaatgtattgaaacaaccagatatgaatctagatatcattgaagttacttcacgccttgctgaacactccaaagctcagtcttctatagcactaatgtcttcaataagtgatatggtcaggcatatgggtaaaagcatgcaatccttggccagtgatgcaggtcctggagacaac

SEQ ID NO: 34304 - DNA, 432 bp, Zea Mays
ctcgtgcaggattcaccgtcaatggcgccgccgtggtgggtgttctccgtcaccgacggtgtgtcagggagagaagacccttccgccgtggatcaatggatgaacgattgtgattagaaggcccgcgtaccctttcgtggtcagatctatgtcgtctgattcaaatcatgtgtatggggggcaatcttagtactttaaactccagggccgttgatctcagatcctgcggtcataaaagggtaccggttcacacgatggctgatttgatcttggcggtccgatgtagatcgatcggctcacagcagaaaataccccttcgccctaaccactttactaaagagaccctgtatttattcgcatttaacccgcagtccacctcgggttaacctgagtcttagaactttttatgatgtagcccctgtattctttagt

SEQ ID NO: 34305 - DNA, 612 bp, Zea Mays
ctggatttgctttcatttgtcgatggttttggtgaattgacctggaagcaaatggaattggccttgatctggtggtcaaactagggaagaattgtgggtcagtgcatgttttatggggcgactggaatcattgatgcagtgcagtttgctggttatttacaccacattttttttatcaattggtctgtcctggtaaaagtatgatctttggatgtggaatccacacataatgctgtctcattttaatttttatgttccattgcgggaaccttgatcattctactctactagtgcatgctttatggggcgactggaatgcattgatcattgatgcagtgcagtttgctggttatttacaccacatttttgatcaattgatctgtcctggtaaaagtatgatctttggctgtggaattcacacataatgctgtctcattttaaactttatgttccattgtggcaaccttgatcattctactctactagaaatatatacaggaagaaacaggttggggcttttctttttagaaaatgaaaattatccacagtgattgtaggccttgagttcaatcatcagatttccagatagatggtcaaggaacgcttgtaaca

SEQ ID NO: 34306 - DNA, 621 bp, Zea Mays
atgggccaccgccgtctcttcgttctctcgctggggctggctcatcttctcctcatcgccaccgcgcacgccggaggcggccatgctcgaggcgccgccaccgacgatgctgtcgcccaccagggcatgagcatggtcgggtcgaggccgccgagctgcgcggggcggtgctggtggtgcggcgcccgccgctgcgaggccgtgcaggtgcccatcacgccgcagcagcaggacaagagccgccgccacgggaagagcggcggcggcggcggcggatcgataccgtcgtcaacaagagatggcggccgaggaggagcgtcgtcgtcctacgacgaccgctccaactacaagccgctcagctggagatgcaggtgcggcggtggataggatagctgatgtatatatatggatgaaccttgcagcttaattagtcgtatgagcttgatgggcatgcatggacgacggatcgtcatcagagcgcgtcttggcttgcagtgtggtgtgttgatcttgcatcgatcaatccattttctttcctgttgcggtgtgaatatagtagaagtcgctgctaaatatgcgtcttcaaaaataaattaaagaaaaggaaaaacccgtttatcg

SEQ ID NO: 34307 - DNA, 2812 bp, Zea Mays
attttatcaaaacccacacacccaccccctcaatgttgtttccttggctcccctaatgccgcctccatgcaacttagcaccgtcgtctcctcctctccatgccagcgcctccccctacccagcgttctccccaccacgccgccaatgttgtccatccccaccgcgcccacgcctgcaccctctagccccaccgcgtcggcctacgcccagtcgagcatgacatctcgtttccagtgaggcggcggtggcgaatcggatctggtgcagttgcatctggagtcggttctcttggtggcgctaggtggcagcacaactgatctgcaccacacctgctcgactctagaggatctctccttgggcgccttcagcacacaggaggaggaagcgaggcatacgatatcgcaacgatcaaggtccgtggcctcaacgccttcaccaaatttgacatgagtcgctacgacatcaagagcatcctggatagcagcgctctccccttcggcgacactgccaagcacctcaaggagaccgaggctgccgcgtccgcacgagatcataccggcgtgctaagctatgacatcgggggtgacgcgcacagtgcggtcagagttggcacctagcgtttgctgcagcggagtgaagcacacggggcagcccttgtggagatggtcagtctacaaatcggtgcacagggtgttggaggtatggcccataccatatttgatgaaatgcctctaaacatcggcgaggaagaaattgccctgttctctggtggttattctgattattcagtgtttgatgaaatgccacttggggatgtgatttgggatgaggaatatgggcatcatgatttgttggatcagccagcaccagatgcatattacttagctgccaagaggacgccctatgactccgtcccaatgaacttattcaatgatgttgcagtctctgctcccaagtatgatgatctgactaatgttgggcaggccaaaggaattgtgcactctcatggcatgttgccatgctcgcatccatggccatgccgaggtagacttctcctcgtcacgtggctctggttcgcaatggtggacggcgatggtgacagggaacaccagcaatagccggttgtggcagccgccaccgcgtcacatagcgccgagttggaggggcacatcacatgaatagatccgcgcaatcttgcatcatggcagtgccggcggcctcccgggcatggcgactctccccagtccaccaggcacctcttcgtcctttgggcccgtacgcctccgcttcctcgggcgtgtccgccggccatttggatgccgtcaaaccggttggccgtgtccgggtcatctccgcgctcctcctccaaatggccaaaccctaccttgttgtagctagcctacccctccagacgccattgtcttcctgatcagtctcgcccactacccgtctcatcaggtgtcgatgattgaagcatacctgcgagctaacaaaatgtttgtggacaagcatgagcctgagacggaacgagttttctcttcatatctggagctggaccttagtgaggtggagccttgcgtttcaggccccaaaaggcctcgtgatcgtgtccctttgaaggaaatgaagtcagactggcatgcttgcctggacaacgaagttggtttcaagggctatgcggtgccaaaggaacagcaaggcaaagttgtaaaattcgacttccatggaaggccagctgaaatcaagcatggcagtgttgttcttgcagcaatatgtagctccacaaacacatcaaatcccagcgtcatgattggtgctggccttgtggcaaagaaagcctgtgaattgggccttgaggtgaagccatgggtaaagacaagccttacccctggatctgtggttgctaccgagtacttgaaacatagtggccttcaagattatctgaaccagcaagggttccatgtcgctgcgcatggctgcgccacttgtgtgggcaactctggtgacctagatggatctatatctgttgctatcacagaaaatgatatcgttgctgctacggtgctgtcagccaaccgaaacttcgaggggcgtgtgaaccctcactcaggctaactaccttgcctcaccgcctctggttgttgcctactgttgacattgactttgagaaagagcccattggagttggaaaggttgggaaggaagttttcttgagggacatatggcctttaaaccaagagttgatgaggttgtggagtccagcgtgcagactcacttgttaattcaagaaagtgtacgactccatcatggaactcaaattttggtggttgcactagtgtggagacttgaattcatgtatacacttagttagactcaacgttagcgcaaacagttgatgaccaagttttttaattagtattttagtttggatgtatagtacacttatgtatgagttatttgacaatgcttatttatgagatattgaatgacacttgtctatgttatattaattataatgttattaaatatatgggcatgtgtgtatttctctttcaaattattataccgtggtatctcaaaaattcaaaaatgattataaattgaagaatgtactgtcatgtaagtcatttcatttaaattcccaaaacgtccaatatcagtctcctaaataagatggttcctaaaacgtccaataccagtatcttaaataagatggtttttctgtttaaaacgtctattattataggatattttagacagttcgataaatgctttgtgacttataatgttcgtattctcaaccgttgtttag

SEQ ID NO: 34308 - DNA, 963 bp, Zea Mays
atctacctaaccctagcagtcgcgcgctcccgggcttctctcccagccgccgccgccgcctctcccttccctcacctcgctcctctctgtcctgaccaagcagcaacggctgagccctggccgagccgctctcccccgacgcacctgcaccgaccctagtgccactatgagagttcggagcggaggccgagcgggaccgcgggagggggcggccggggtccggtccggggaggcggggaccagggcaacgcacaacgcgccggcggtgaccagtagcccgctctgacaccagctcctcgcatcgcatctcccctactaggcctcctcgtcccggaccgggagtgtgcttgcgcgttcggttttaccgcggggacaggacagcgatggcgcacacgggcgctggccggaagacgacgccggaacggacaaggacacgcacgcaaggcgatcgaggacaggcaggcatagtgttatgcctttgagagagccagccagacagacaggcggcaacacaccaccacgctgatcgacgcagatcagtctaggagggagcgctcggcatcaagcggagtgttatgcaatggcccttcatgctggactgtgtgatcagctccaacaagatcctgagttgtccacacccaagctgcttgtttgatgccacccttccatggactttgggctgcccctccaatccttctgaaacttttgtttgaatgcttctcgtagtcggcagctatacttatattagctgaattttggttttgtcatctaaatatatttatgtcaatgtcacataatgtgttaattagttgaggtctggccagccaggtagtctaaaaaaataaactgaaagccaattttttcacggcgattctggaacatatgcctaacaggaaaacaaaaaagtgggcacctgaatttctttagtaactctatttctatctttcggtatgtcgttccttc

SEQ ID NO: 34309 - DNA, 4088 bp, Zea Mays
caaacctccccgtcgcggcgccctccccgccttcccattcccggccccgcccgcccacatctagtctcccacctcgccctcgcggcgccggtgtagcagccatgctagtctccgtcgccgccgacgactccggctggcaggagtccccgtcgcaggccgtcctcttcgccgacgagatcgctgccgtccgcgctgtcctgggcgggaccctctccgaggccagcatcattgccgcgctctcccagtgcggtggcaacgctgagcgcgccatcaacgcgatcctcgacgacgccgaggtcgtttccgcccccaagcgggccaaggtcgagctcgacgtcggtggtgttccggtgcaggtgccggtagctgtcaaggtgaaggccgaatccatcgacgtcggggccgtggcgccggcagctgtcaaggtgaaggccgagcccattgacggcgatgtcgtggggagccaacaatccgatggctcctccgcgaaggccaccgccaagatgaagagcgagccggccgaatggtccgccaagacacccgaccgattcgtccccgacgcgcgcagtgtaggtgcgcctgtggcggtggcgagcgccggcgccggcataagcatcgtcccgcggcagaataagaggccgaggcaggaggtggggaccatcgaactcactaccacgcacccggtgccgtacctcaactcgcggcccatccgggcgctgccacccatgccacccatgggcggggacggggaggtgtacgacccgaagcctatccagatggtgccgcccctggaaatccagatgcacgatccgaggaccaccctacctgcgccgtcacccatcgacatcgagatgtaccaacaaccgccgcggccgccgcccgtggacgtcgagatgtgcgagcagaggtcgcggccccggccccggcccctcagggcggttgtgcctgcctcggtgacggacatgaggatggtggtggcgccaccggacggcgagtttggcgacttccctgtggagcgcgactggatgctcgtcggcaagtcctatgtgcccgggctgtccaccaaccgtgggaggaggaggttggacgctggggagattgtccatttcgccttcccttcgtacgagaagatctatggcgggttaaagatgactgccaagaaggcggcggctctggcacagattgttcgcttttccaccaaacgagccggagagattgggaagctgtccccagagtggacgcaatgccttgtcccgcttgtcaactcgtccaaggtgaagattcaggggaagctcgtgttcccaacaatggagctgaggctgatgcaggagatattgctctatgttagcttctacatccacaaatctgtgctagccgaaatggacaactcaccctgtgacatgctcgatcatgcaaatgttgatttcactcccagtcctctccataaattgcttagtttgctcaacctaaagccatccaacaaggatgctttctcccttgacgatctcaccactagaaagctgaagcaaattctaaggggtaacaataataatggtgatgattctactccggtgcttggccatacatttctcgagcaaggcgctgatgagcaggcgatttcagaggctgccttgaacaaacttgttggcactgctgaaacatttgacttagaggaagcagagcctcccactacccttgtctctgttctaaagccataccagaaacaagctctcttctggatgtctaaattggagaagggaattgatgctaatgaagagacaaaaactcttaatccgtgttggagtgcctacaatattgcagacaggagagctcctccagtctatgttaatctttttactggtcaagcaacaacacaatttccaagtatgactgagactgtaagaggagggatactagcagacgcaatgggtcttggcaaaactgtgatgaccattgctctgatactttccaatcctaggggggagttctctaactgtataaaaggagacacaaggtatctaggagatcgtgcgaccagaggatacacctcaacatcctctgtgagaggaggtacccttgttgtttgccctatgtcattattgggccaatggaaggatgagttggaggcacattcggcacaaggagctctttctgtgtttgtgcattatgctggtgataaaactagtagcctcatgctgatggctcaacatgatgtcgttttaacaacctatggtgtcctctcagctgcatgcaaaacggaatgcaacagcatttttcacaggatggattggtataggattgtgcttgatgaagctcacacaatcaaatctcctaaaactaaaagtgcccaagcagcttatagattaaagtcggaatgcagatggtgccttacaggcacaccattgcaaaataatttggaggacctctacagtcttctctgcttcctacatgttgaaccatggtgcaatgcaaaatggtggcagaggcttattcagaaaccttatgagaatggtgatgatagagggttgaaacttgttagagctattcttaggccactaatgctaaggaggaccaaggaaacaaaagacaagattggcaatcccatactggttctacctccagctcgtattgaagttgtagagtgcgaacaatctgaacatgaacgtgatttctatgaagcacttttcaggagatcaaaggttcagtttgacaaatttgtagcacaaggcagtgttctgaacaattacgctaatattctcgagttacttctccggctaaggcagtgctgcgatcacccttttctggttatcagcttgcacagcaattccttgaaggggtgcagcagagttcgtctggaagacagaacgtagtgccttcactggcttatgtagaaggggtcgtcgaggaaattcgccagggtgctacgatggagtgccctatctgtctcgagtcagcttcggacgatccagtgctcacgccttgcgcacaccggatgtgtggcgaatgccttgtttctagctggaggactccagacggagggccatgcccactctgtagacgtcacatcagcaagtctgacctgatcatactgcctgctcagagtcgtttccaggtggatgccaagaacaactggaaggactcgtgcaaagtgaaaacgctcgtaacgatgctggagagccttcagaggaagcaggagaagagcatcgtgttcagccagtttacttccttcttcgatcttctggagatccgcttcacccagaagggtatcaagttcttgaggtttgatggcaagctgagccagaagcacaaagagaaagttctgaaggagttcagtgagagccaggacaagctggtgctaatgatgtcgctcaaggctggaggtgtagggctaaatctaactgctgcctccaacgtttttatgatggatccgtggtggaatccggctgtggaagagcaggctatcatgagaattcaccgcattgggcagaaaagagaggtccgagtcaaacgcttcatcgtcaagggtactgtcgaggagcggatgcagcaggtccagatgcgcaagcagaggatggtttctggggcgctcaccgacgaggagattcgtggcgctcgcattgagcatctcaagatgttgtttaaataaatgatcattgccgatgtgtatagctgacgctacgccgttgatactttggtagtgtcaagtaggttgtcgagggcatgtttggtaggagtaagatctgggtttagaccattgtagatggggatggccggatgggagtgggtggaaccttgcccttccgatatgacggtcttcctttctaacgtgaatcagactggcatagagaatgggcattttggaaaacatgactacgataaatcacttttctcttgagtcttggattgcaggtgttaatctgtcatgttgttcttgttttactccctaccctttctgtatgctgtgccttttgttctctccttcagacttcccaggaatactgattctagtatgtccactaaggtatcttttgatcttgaaacatcatccttcgtggctgttgatggcatataatagaaaagcttttggg

SEQ ID NO: 34310 - DNA, 2466 bp, Zea Mays
accggcccatcgcaccttggagcggcccagctcgtgcgctctcgtcttcgcgatcgcgaacagtcgcggcggcctcgtcattgccgcagaaaccctaaccctagatccgccgtcatggatctcctccagtcctcttacgcgccggacgacgcgtcgtctccggaggcttcggcggccgcgtcctcgccggactcctcgccgctccgccttccgtccaagtccgccgcccccgccgtcgatgacaccgcgctcgcactctcctccgcggcgtccgccgcccgcccactcgacccttcgctccacctcgtcgccttcaacccaactgctgaccagctctgggctcccatcctcgggccccagcacccccacgccccgatctcgtccgcctccggcaaccgcaaccacaagctcggccacgttgaggacgccgctgtcctgccattcctattcgacgagcagtacaacaccttccatcggtttggctacgccgccgacccgtctggcctccacatcgtcggcgacgcccagccccaggcgcctgagcccgacactgtctacaacctcgccccttccgagcacaagcgccgtcgcctcctggccaaggcggacaacgaggcggagctagcccccccggaggcaaagaaccccgcctccgaggaatggatcctccacaacaagcagagtccctgggctgggaagaaggaagcgcctcccgcggagctcactgacgagcagaagcagtatgcggaggcgcacgctgccaagaaggccgagaaggaggcccgcctcgaagggaagagcgagaggacagaggttgtggtcaagaccaccttccacggcaaggaggagaaggactaccaaggacgctcctggatcacgccgcccaaggatgccaaggccacaaacgaccactgctacatccccaagaggtgtgtgcacgagtgggtcggtcacaccaagggggtctcagctatcaggtttttcccgaagtatggacatttgctgctctctgcgagtatggattgcaagattaagatctgggatgttcttgggtcacggacatgtatgcgtacctatatggggcactcaaaggcggtaagggatatatcattctccaatgacgggactaagttcttgagcgctgggtatgacaggaatatacagtactgggatactgagacagggcaggtgatctcgaccttttcaactgggaaggtcccatatgttgtgaagctcaatcctgatgaggataagcagcatattctccttgccggaatgagcgataagaagattgtgcaatgggatatgaagtcagggcagattacacaagagtatgatcagcatttaggggctgtgaacaccataacttttgtggataacaacaggagatttgtgacctcaagtgatgacaagtctcttcgtgtgtgggagtttggcatccctgtggtgattaagtacatcagtgagccgcacatgcattcaatgccatcgatgtcactgcatcccaactccaattggctggcagcacagagtttggacaatcagatactgatatacagcaccaaggagaggtttcagcttaataagaagaagagatttgctggccacattgtggcaggttatgcttgtcaggtgaacttctcacctgatgggaggtttgtgatgtctggtgatggcgagggtagctgctggttctgggactggaaaagctgcaggagattcaagactttgaagtgtcacaacggggtttgcattggatgtgagtggcatccgttggaaactagcaaggttgcaacctgtggatgggatggtgtaattaaatactgggactgaactttggcagagatattggttgagctcctgggaaaggttttgtaacaatccgattcacgccgaatgtcatggcatactgtaagtcacatgctcgacaagagaatcccggaggaaaaaacatgtgttttttgaggttacatatatgggagaaaaaggaacgacgtggtataaaattagctgctgattcaggaactgtgatgtgggcatgcatttgatgcgaacaaacatggtccagaaaggtgacaaaacagaagctcctccaccagcattggtgtcggggtagggatcggcatagcactacgcaaccccgctgctcctgctcgtcgtcgtttcttgattccctccttttcctagcttccaaggtcaaaaaccacacgggcgacgcccacgtatccttacacttgtccatttccatccggtatctgatcccatcttttcatcgtcttccatctctcatggaccagtcctccatcctcttctttcttgagggaaacaaagaccatttttgtgtatatgctttcccttgtgggtgcaaacaccatccggtccgctaccctttcgcccgccagcgccgaccctatatcttccgtcgtcaccaccggtggccggtgcacataacaatagcatactgcg

SEQ ID NO: 34311 - DNA, 220 bp, Zea Mays
gcatttttcatttaaatatagaatgcacaatgacagtggaaatcatggaactagaaaaatggtgtttaaatatagtagagacgtgaacgtgatcatagcttggcttagatattttgatcgatcaactaacaaagtgaatgttatttgtttagtctgatttaatcaccaagcactatacttaaatatatacttagtgggggccctaacattttggaggccc

SEQ ID NO: 34312 - DNA, 2758 bp, Zea Mays
gtcactgacttgtgggcccagaggccaaagcgcgcactgcccatcaccgtctcctgaatctcagaaccttatcccctcctttgctccatccctctcctctcttcctcggcgacctccacgccggtctagagccggcagcgctgcggcggagcaccaaccgagctccgatcccaccccgctcccaaccgcgcggccctgtccatggcgcgcgcggtgcggcggcgagcccccatgcattcccgccgccggagcgcggcctgctaagcgacgacaattcctctccctctcctaaatccactcccccacgtgtcttcatgggccctccggcctacaccgcctccccctgcacggggtctgccctcttctccaacacccgagcgccgccgccgccaccgcggcttcttatccgatggggcccggggccgccgtcggccgtggggaggcacggaggccgcgtaactccgtcgcaggagaggcgcggccccgccccgtcgcaggagaggcgccgacccgctccgtctcaggagaggcgccgccccacggagtcttcgtcccagtctcaccagctccaggaacggaagcggcactggaaggcgggggagttcccggggaccgctgccgatggaggaggtggcggcggaaggcgccccgcactagggaaccggcattcgaaggccggggagtttcccgggacggacggcgtccgccccgcccccgcgccgccgcaggggaagcggcactggaaggccggcgagttcccgggcgccgccgccgcccccggttcggggacgccgaggactcccctcaagaacgtcaagaagcggctggacgcccgcgcggacgccaaggcgtgggcgtgcaccgtcaccgaggccctcgcggaccgcgtcagctccaagaactggcaagaggcgctccaggtctttgagatgctcaaggagcagccgttctaccatcccaaagagggcacctacatgaagctcatcgtgctgctgggccggtcagggcagccgacccgtgcacaccaactcttcgacgagatgttgcagcaaggatgccagcccacccccgagctctacaccgccttgatcggggcctactgccgaagcggcctactggacgaggcactccagctcctcaacgacatgaagagctcccctttatgccagcctgacgtctacacctacagcaccatcatcaaggcctgcattgacgctgccaggttcgacctcaccgacgccatgtacaaagacatggcggagcgctccatatcacccaacacggtcacacagaacatcgtcctcagcggctacgggaaggccgggcggttggacgacatggagcgagtgctctccgacatgctcgacagcgtgtcatgcaaaccggacgtttggaccatgaacatcatcctcagcctcttcgggaaccggggcgaggttgaactgatggagagatggtacgagaagttccgaggctacggggtcgagccggagacccgcacgctgaacatcctgattggcgcctacgggaagcggcggatgtatgacaagatgtccgcagtcatggagcacatgcgcaagctcgcgttcccgtggacgaccgcgacgtacaacaacgtgatcgaagcatttgctgaggccggcgacgccgggaacatggagcacgcgttcaaccagatgcgttccgagggcatgaggccggacactaagaccttctgctgcctgatcgacgggttcagcagggcaggccagttccataaggtggtgggcatggtgaagctcgccgagaggctcgacgtgcccgtgaacacgcctttccacaatgctgttcttggcgcgtgcgctagagcggacgatctcgtggagatggagagggtgttcaggcgcatgaagcatacgcagtgcgagcctgatgcttcgacgtactctatcttggtggaggcttatcgcaaggagggaatgaccgacaagatctatgctctgcatcaggagaacccggctctggttccagctgattttgtcatgagctagtatagacgtctcctccaactcaaggggggtgaaagtgcgtcagcaacgtacgggtattcatctagtttgatatattccaagaaaaacaaagaccaatgcaggagaagatggacaatgtgacacagaataatctctggaaaatagatacctggaagcttcctcgtcaaacaagactattatgaagactacaaaagccgcccgcccgttcgacagcgagctatatatgagctgtctggaacacgatttcccccctctgttcctgcgtttttcatgcacgaataaatctgagctgatttctgtgaaatttatatgcgaaccccttgaaattcatgtgttccaaacacggcctaaaagaactttgtctagagaaaccctctaggtaacacagacgcgcaaaccttcaagtatcgatctcagagaggacatgcagaagatgatttgcagtttgctgcggggtaggctcctcagggcctttgggactgcttttgtcttcgcctgactccaccttttatttttgtttgaacttgctaccagctggatacttccagagaatccgtacagtacagcccttggctgttgaattccaagtcttcgctaaatgaaccattcagacatcgccatctatgatctgtgtaactactctgtagaccacctatggtatcaaggtcacaaaaaatagattgttagcttagcaactgctatacattgagcagtgtcctcaaaaagat

SEQ ID NO: 34313 - DNA, 1114 bp, Zea Mays
attttagcctctctaattctctccgggttttagacttccaaactagctctaaggtggcgcgacctcctcgccggccggcgcgacaccaccatgggcccggaagcagtgcggaaaagcctggagcccaccgcaaccgccgaggaaatcactggctccacccctgcgcggctccacttctacgaccccttcgtcctcagcggcgtccgtatcgaagccgccgagcacggccgcctcctctgctctttcgtcgtcacccctcgcctcgcgagtcccgtgggatacctccgcagcggtgtcacagcgacgctcgccgaccagctgggatcggctgtgttcttctgcagtgggatccccagcagcggggtctccatcgagatcagcgtctcctttgtcgactcggctgccgtcggggaggaaatagaggttgagggaaagttattacgtgctggaaaatcagtcggtgtcgtctccgtagatttcaggaagaaaaagacagggaaattgatggcacaggcccgtcacaccaagtatcttgtggcatcaagcaaactgtgaggcgctccccttttgttaacaagatatcaacatcaattgcgcccagactctccatactggtgccattattagtagtcagcaatcatgaaatgtttgtggcatatctttttttttcaaaaaaattcctgtatatattatatatatgaaattcaagtaagtatcattggtgcctctgatgcatatcggtctagtcatgttactttcacttgacagccatgatcagattatatatgttttcaaagaaggcaccgggttgtaagtaacttcgcaggaaactttcagttattgttggctcagtctgccaccatcttgggagattctctccgttaacaaaaggaattgatcgttgctgcatcactctattattgccctagaagatgcatggtatttaatctgggtccacacatcggcctgagatagttggtgaaagtaggcccgactgccaccatgctgtgtttttgtgtgtacgagttctaggtccttgtgggctatctcctgtctgttctgctgttggttgaccccaaattgttatcgacttatgatgataggatcccaacaa

SEQ ID NO: 34314 - DNA, 1771 bp, Zea Mays
ccttaggacctctattttatggagtggatgttatgcatctccaattgtcaaccacttgcaataagaggcctgaggattctgattacacggttgatgtccttaccagatgttctgtaactaaggacaacagtggtaagaaaacaatgaaggttgttcctctgaaagcgcgtggagaaccagttgtagtttcattgtcactttcacagattgatggactaagcagcatacggatgtacatacctaaggatcttatacctgtagaagttcgagaaaacaccttgaggaaagttgaagaagtccttttaaggtttgctaaagatggtgtgcctctattggatccagaagaagatatgaaagtacaatcgaaatcatttcggaaagctaccagacgaatagaagctcttgagagcttgtttgagaagcacgatatccgtaactctccacatatccagcaaaagctgaaagtctttcatgctaagcaagaactatcagccaaaataaagtccataaagaaaacaatgcggtcttccaccgctttagctttcaaggatgaactcaaggcccggaaacgtgttcttcgcaggctggggtattgcattttattctgacataaattgattctttgccaggttttgctggtttggtacttttaagatgaagtgccctacttacatatataatccccgacctgctaaaaatgtatgttacgagtgatgatgttgtggaagttaagggcaaagtggcgtgtgagataagttcagctgatgagcttacattgacagagcttatgtttagtggtgctctgaaggatgctacagtagagcaggtggtggcactgctctcttgctttgtttggcaggagaagctccaggatgctccgaagccaagagaggagctcgatttgctcttctaccagctgcaggagacagcaagaagggttgctaaccttcagcttgaatgcaagatccagatcgatgtggaaagttttgtgaattctttccgacccgacataatggaagcggtgtattcatgggccagagggtcgaagttctaccaaatcatggagatgacccaagtgttcgaaggaagcctgatcagggccatcaggaggctggaggaggttctgcagcagctgattctggcatccaagtccattggggaaacggagttagaagcaaaactcgaggaggcggtcaacaagatcaagagggacatagtgtttgcagcatctttatacttgtagtgtcttggatgtctggttttatgtcaggggctaggtcaaaagctcatagggatttaaattaatcttaaattgctgttcatgttgagtgttgttggcatgatgaagctgtctgatttgctgttagcggtgacatggcagtgaaagttttgttaggtttcttcaccgtgtagggtctatttgacattcaagaattttgtaggaagcaatacaattctggcagacctcacattaacagccttagcatgtacgatagatagctatttatctcatctgtcaggaatagcccagagatactgcgtgtttgtggagtataagcagtgtaagttaagtgatcgtgcttgtgtttgtaagtgcagttcaaagcaagtcggccgatggagatgtccctggatgaaaacttgtagtatttgtcttgcactcttgcttgtttgaatgttattggccggctgatggtcacgtgcatgcatgcgtgaataattcatctctgtgtatatgagcggcatgcatggtctagtcggtcaaagtttt

SEQ ID NO: 34315 - DNA, 3659 bp, Zea Mays
ggcgtccacagggggcgacacccgtgaccctgcccccgttcgacatcagcgctcctccccccgaccaccgtcgatttggtgtctgagccctcgctagatctcgcaccctcaccgaagccctcattggattcgacgccctcactggaggttgcaccgcgatgggatctaggaaccgtagatggcctcgaccacccacgtgggttgttgcctctgcggatgagacgcagcgccaaggggccagaggaaacgacgtgatggacctcatatcacagctcatgtcatggttcatgcctctcatcgcctcccgccgtggttcgccgaggccgccccatgctgcacgccatgggcagcgatgtcgccttcacgaagctcggcatggagtgctaccccaaggaggccaccgctgttggggtcaagggattccccgacatggaaaaataaccgacgacgagatcaatgccgcctccgtcacttgctgccgcatctacctcaggtccgagtctgaacctgattgcagagctgagaacaccttgaagctaggagatgtcatccagtaccatgaatgtggttaccgcattctctataagaagcgggcaccgatccatgtgtagtaccagcaaacttcccattttctatgactccaaggccttatgtcatccagcaatggcagttgccgttcagtttggactatagaattcaattatgagttcagtttgttgatattaaaggaaagatacaggtcagcctcttttacttaacaaggtaagagctctaaatttatgttagtatagtagaagtttttttgttgtaaatatcacttgcatatacgccagctagatgctcactatttgtcctctctcaaggtctcaatctgtctgatgtttattcaaccgattagctatcatcataaacctgaataacattttgctttgttcatgttcaggattcatacttaaatacttaacaaggtaagagctctaaatttatgttagtatagtagaagttttttttgttgttgtaaatatcacttgcatatacgccagctagatgctcactatttgtcctctctcaaggtctgaatctgtctgatgttttattcaactgattaactatcatcataaacctgaataacattttgctttgttcatgttcaggattcatacttaaatttatctgatgcaatttttcaactgaacgtgaacttggcaggggtgagtacggagtagtgtacaagcgagttctgcattgagctgtcgtagagagcgtagacagacactctagccaacgttgttggctgggattggaacacaaaagcgagacaagggatgagaagcacaggaggagccaggtgaggtgaggtggcgacacacaggagtcgggcaagctcagctcatctcatctcatgctctactaaaaaggattagcccatctcaagagaaaagagtaacattgtcagcccactgcaataaccacactattaccagtcttgaaattcactttttgtttgtttgtcatagaaccagggattcatgacaggaaatgatctccttctcaagataagaaaattgcatttaagttactaatcagtgtatggtttactagtttggcggaggcctcaatccgggtctagaccaaggtcatggtggcgacgaaggtggaggccgaggtggagggtgatgcttccactctcagtcttggggtggggtcgtggggatgacatatgagagtggggtgcagtggtggctcgtcgacatcagccattggcacccttcccctgcccagttcgatgatgcaccctccctcctactacttcacgatggcaccaccatctccagattaagagtgatgccacatacttagcgatggggtgcttgatatcctagatattgtactagcttcagacctcgccgaattgacaccttcgaagaaatgaagtcgccagattggtaggctttgagtgtttcaccagaggaagtatgtagtgcagttaaggaaggaaatgaacttccatcagacttgatagacacactactaaagtggatcccaagcaatgatgaggagcttaggcttcgactgtcctcccatagcaccgccacaccgcatgcgtccgcggcggcgtccgcctcggcgccggtctcgcacaccgctccctagctggggaagttcatcgcctccgagcccttcaacgtggggggattcgattgggcgatctacttctaccccgatgggaagagcggcgaggatggcgttgtctacgtctcgctcttcatagccctggccagcgaaggcaccgatgtgcgcgcgctgttcgaggtcacgctcgtcgaccagagcggcaaggggcaagacaaggtgcatacccactttgggaggtctctcgagagcgacccatacaccctcaagtaccgcgacagcatgtgatgagtctatgtacaggttgtttcctacggtatgcttatctatggtggaaagaaaaagtgattgactcatacttgaaaagaaaagatggcctttgcccattgacgcctgagacaaccagaaatttgccatgacctcgttcctgaccaagaaaaactgtcaagcacagaatcacagttgatatattgggattccaaggtatcagaggctgatatggatgcaatgtggaaacatcctgatgtgtataaggagtggataaaatctggtgagagacgtggaaatgtacgattctcccatgatgcaaagaacatgccttacctttctcgcgtcgaggtgaaggatatgattgccttctcatgttgtgtatatgatggtggtgatgaggagaaggaaatggatgcagccagagaaataggttggagagggaaatttactaagagaggacgtgtaataagaccaggaattattagaatgagtggaaaatgtcctcttacacctttggaggttgggttaatgcttcgtggaatggatttcagcaataagactgcaatctttttggcatctggaaagatttacaaagcagagaagaacatggcttctcttcttgaaatgtttcctctcctacagacaaaagagacactggcatcagaagaggaacttgctccattcaagatggctgctgttgactatagtatttgtgcccaaagtgaagtttttgtgaccacacaaggtggaaatcccgcattttttatgggtcacaggagatacttgtatggtgggcattcaaaaacaattaaaccagacaaaagaaggcttgctgtactcttcaataatccacgtatagggtggacggcattgaagcggcacttgcttaatatgagagcatacagtgatgtcaaggggatcgaaatgaaaagaccaaacgaatctatatataccttcccgtgtcctgactgcatgtgccgcttgaacagaacagaacactcgaaatccaaacagagtagatagtatatttcgtatgtagaccaaatggctaaaaccatccaatattttcatagactgaaaatgcagagaaagcaacaaaggtgtatcaatacagtcgtacaagcttagtatcggatggtttttaatttgtatagcaaagcacgggcacatacctatatatcttttaatgtatgtaaatattcttaacctttaaaagatactaacaagcaggtataacgataattaatgtttctata

SEQ ID NO: 34316 - DNA, 344 bp, Zea Mays
gcacgaccacttctctcccgtcaccgagctatggatatcactcaggttctgatagctgctcaatcaacaaatgctaaccttcgaacagtggcagaaagcaagctcacacagttccaggagctagatcttcctaactttctcctctccttatcaataaatcaagcttaattgtatacattttatatgtgcttgcaatcgtgtacaagtgatcattgctaaaatttacataattgcctgaaaggttgtagcaagtaacaggttgtacctacgctatcaatatatatgtggaggttatagtagttgttaatttggatctgcagactaaaatggttgcggagctggac

SEQ ID NO: 34317 - DNA, 3412 bp, Zea Mays
aacaaacccgaactgaacactgcttagcagctagtattctatttctcttaatcccgtcgtctcgtccagcgaaaagaggaggaaaaaaacacacggaaccgcaggcaaaccctcgctttctccgatcgaattgctcgtccccgtgcaaccaccaccggttcggccgctccccaccaccagtcctccccgcccccgcccgccggacgatctactaggcctctcgccccgcgcgtgccgatttcccccacctcgagcgccgccctcctcccgcgcccatggcgagcacctgaggatacggtcagtgggctgtttctctgcgagagtcccacgagtccccacagaaacagcccgggggcatcagcgatcgattcggaacgccttggttcggtctgattgccggattggtggtttcgtctcggcctcggcttcctcaactatctagcttggaagccaagtctgggcttgcttcgtgtggattgcatctggggaggcggtagcgtgcacgggtgtgattctcggaccggcttcatgcgggacggcgcgccggctcctcgcgccggcgggggcttcttctcggcgcggtcgctctccaactgcatgaggatcgtgtcgtcgggggcgtccacggccgcctccacgctgcgctcggccggggcatcgctggtcaactcgatggccagccacgaggaggatgcaagtcgtgaccaggtacagtgggctggctttgataaacttgaatgtgggggtggcttgctacggcaagttttgttgctggcttataaatctggtttccaagtgtgggatgtggaacatgctgatgatgtaagacagctagaatccagacacgatggtgctgtttcgtttattcaagtgctgaaggatccaattttcacaacagaatctggagacagatttgcagacacacgaccattgctagctcttgcctgtgaaggaactcacacaggaagtggaaagaaccatgatactaatgttcctgtttttgatggaaccaatggtgctttccatagtataggcggtgaaaaccttcctactgtcttactattttattcactgagaacccatgaatatgtgcatacattgaggttcagatcagctgtttattccataaggtgcagtccgagagtcgtagctatttcacaggctactcagatacattgttttgatgccgcgaccatggagagagaatatactgttcttaccagtcctacggttgcacaagtttcaggctatggcccacttggattgggtcctagatggattgcatattctgggaatccagttccggttccagatactggacgtgttagcccacagcttcttagtctatctccctctgttccacctcctggttcaaatggtagtgtggtggcatattatgcaaaagaatcaagcaagcaactggcagctggcattgcaacacttggtgaggttggatataataagctgtccaagtactatgcagatttcattccaaatggtaatggtaccataaagcaaagaagttctgtttacaaagcaaatggtgtaacaaatggccacctcattgacagtgaatatgctggaacggtcatagttcgagatattgtctctaaattattgatagttcagttcagggcacacactagtcccatttctgcactttgctttgatccaagtggaactttgctggtgacagcatctgttcatggtcaaaacatgaatgttttccgcattatacctccacatgggacatcagaagctggtcaaattggaacctatgttcatctgtacaaactgcaaagaggcataaccaatgcgatcataaaagacatcagctttagtgatgatagtgactggataatgattagctcttcaagaggaactagccatttgttttcaatctctccatattgtggatcaacaagattccgttacagtgataacaaccctgtagaaaatgattacacagtggattcatcagttaatcatactgctcattggtcccaaaattcagcaacctctttgagtctgagtcagaagactctcttcgtatctggaccccctgtcacattgtctgttgttagtaggataagaaatgggagtaacgtgtttaagggtgctgtccatggtgctgctgcatttgcaactggtgcttccactccaatttctggtgcgattgcttcaacttttcacaaccgcatggctggtgacatcgattcagatggcagtttgcgcatgaagtattatttactagtattttctccatcaggaagcatcatacagtatgctctccatctctcagctgaacaggattctggattggatttccggacaagccccatttcttatgggccagagagagaaactgatacaaaatttgttattgaagctcttcagaagtgggatgtttgttataaaagaaatagaagagacagtgctgagagttttgcatatagtgattttgagaatggagaaaataataaacttttgctgaaagctatgtggaaagggactagtatctacccatttgactgttctgttgaaaggcaaaagctcagtgctgatgaaaaccgtaatctctatatttctcagaatacactttcaagttatggagggtgaaactttagaagcagacaatgctgatgtaatttcaggggaagttgaagtagaaaaagtccagacccacaacatagaatcaaggtcaaagaatctcataccagtcttcgactccctccatacatcaaggtttcaacagacaaggttgaacgctcctgataacagcaggtgcgggctgctgcagcgacagaaatctgggatttcagaagatggtagactctctcgcagaagcagctgtagttctttggactgcatgtctgaagggcccaaaagctctgatgacggtgctttcagtaaatatgtagtagatgataacagttctgctgtaattaacaacccaagtgttaaatttcatgccgagcttgtaaataatactgggagcctcaagtcagaggcccagctcggatttgtaaatagcgaggaggatggtggaggtggagagcaactcccagacttgtgatgttgactatgtcaagatggtcgatggtgatggaggagcctctttaatcgctgaagtcttcattgtgcgtgtgtagctgaattctttcatttctccatcctgagttctttacctctcttctatctatagttctattcataggcattcatgaaaattttaccgagagaaaagataggaagggaggtttaattctggccctatgggtgtggaagctttggtgatgttagttcgatatcttacaagttgtaaataacatgcaataatagcacgtaatttgtgaatatttaaatcataatgtgtccaactgaggtacgagacatcttccaccatttcaga

SEQ ID NO: 34318 - DNA, 1894 bp, Zea Mays
cggctggacactgcgctgcatgccacttatgtgcagtgcaggcggcgactgtgcgtgcactcgctacgctagctcctccatccctggattccctgcacactgcaccaccgcgctgccgccgtcctcgccctgctcctgctgcctatatatactgccgcgtgactcgcagggacggagcagacctagcaagtcggccagcacgctcgctcgctcgcagcagtcgctagccagacagcattggcgccggcccgcgcgtgcgcgccatggaggaggcgaggcaaaggcggcggctgtgcctgtgcctgctggtggcggccgtgagctgggcgctgctggcggcggtggcgcggtgcgacccgcaggtgccgtgctacttcatcttcggcgactcgctggtggacaacggcaacaacaactacatcgtgtcgctggcgcgcgccaactacccgccctacggcatcgacttcgccgccggcccgtcggggcgcttcaccaacggactcaccaccgtcgatgtcatcgctcaacttctgggtttcgacaacttcatcccgccgttcgccgcaacgagcgcggaccagctcctgggcggcgccaacttcgcctccgccgccgccggcatccgcgccgagaccggccagcagctgggcgggcggatcccgttcgcggggcaggtgcagaactaccagacggcggtgcagacgctggtgagcatcctgggcgaccaggacacggcgtcggaccacctgagccggtgcatcttcagcgtgggcatgggcagcaacgactacctcaacaactacttcatgccggccttctacaacacgggcagccggtacaccccggagcagttcgccgactcgctcatcgccgactaccgccgccacctgcgggtgctgtacaactacggcgcgcgcaaggtggtgatgatcggggtcggccaggtcgggtgcagccccaacgagctggcccgctacagcgccgacggcgtcacctgcgtcgaccgcatcgacgacgccatccagatgttcaaccgccgcctcgtcggcctcgtcgacgagttcaacgcgctcccaggcgcgcacttcaccttcatcaacgcatacaacatcttcgacgacatcctcgccaacgccgcctcctacgggttcacggtgaccaacgccgggtgctgcggggtgggcaggaacaacgggcaggtgacgtgcctgccgtaccaggcgccgtgcgccaacagggaccagcacatcatcgtcggccgccggtcctaccgcgccgagtcgcccaacgacgtctacccgatggacatcagcacgctcgcctccatctgattctgattctcatccctccataaatataaacataaaaatatatgatataatccacccaccactgcgcaaaggctgcaatattaaacagggctccaagaggaggtagccgtgcaattctttcctgtgtacaagctcgcgccttatctgtaatttttcatgctttcatacatttgcatcgggtacttagaaaatatccgatcgaatcactttttttttcgttttcaattctcatgcacacctgaattccgcgaaagattccacaagtacaccaccagatttgcagcttcattcaaaccatgctctctctctcatggccccatgccatcttttgattcttttcttgaagtgttggcaaggccagacgtaatgatcaaacaaacacgcacgcgtaccatgtctgcactgcacaaagtaatcacacgagccaggcatcaggctgcttcggttatccattcgcattgcttcgccttcaccccatctgaattctgaagccctatggactgaatcccttaagtcacagcgcacgctaagctgctatgccctcttggcttcctgttcagcct

SEQ ID NO: 34319 - DNA, 2064 bp, Zea Mays
ccagcgtaccgaaaaaaaaaaggcaaaggggagcctgtctgaccgaggacgaaagaggcgcaggcgcacatcctccccctcccttgccgtcctccccctccccttgctggccgtcgcctgctgctgctgtcgcaggcgcgccagcgccaccgacccgccgatgagcgtctagctaggcatcatctccgcgacgagtcgacccaccacccacccacccactggcttgcctgcgaaccacccctgcgccgatccacctccgctgcctgtctgcctgcttctacatataatcgcgccggcctccgcctcgtcgcctgcgacccccaccacagaaccctccccctcacctccgctatcctcctccccggccgctccccgacagactccgatggccatcgtcgagactgccgctgccgctgcggctgccgctgccgctgccgaccacaccgcgccaccgcgcgaggaggaggcgccgggcgccgccgccgacgccggggagcgcgaaatgcgggatctggaggacctcctctccaagctcaaccccatggccgaggagttcgtccctccctccctcgcctcccccatctccggcgccggggccgggcacggggccctcacgcccgcgccgctctccccagccgcctacggcttctacccggtcaacgccggcttcgcggtcgcctcgccgggccaccgcggcgtcgtcagcttcccggcggtcgccgacgcccacgccggacgcggcatgaagaaggacggagccggagggttcggcggccacggccacggccaccccggcaggcggcggaccaacagccgcaccagcatggcgcagcgggacgaggccatccgccgcaccgtctacgtctccgacatcgatcaccaggttactgaagaaaacctcgcagcactatttataaattgcggacaggttgtggactgtcgcatgtgtggggacccaaattcagtccttaggtttgctttcatagagttcactgatgaggagggtgcaagagctgctctgaatctgtcaggaaccgtgcttggatattatcctgtcaaggttctgccgtcaaaaactgccattgcaccagtcaacgaaacattcctacccaggtctgacgatgaacgtgaaatgtgtgcaaggactatctactgcacaaacattgacaagaaggtcactcaagcagatctaaaattattctttgagtccatatgtggtgaggtctttcggctgaggttgcttggcgactaccatcattctacccgcatcgcttttgtggaattcgtgatggtcagctaagcataccttcgccttcaaatttgcgcagcttcttttttttagggaagtattttttgcgcaaaagttgcctggcttttagcatcgtttgatgggcgaggacacacatcgcctccaaatactagaacgctagggatatttgttctctcaaataaagctttacctgtaagaagagctgttagtggctggagtgaatagaatttggttggtcggtgcctccaagttgtttggtctgccgttcaaatgcatgattattctgcgagctgttttaagactgggcctcaaatttttttttccaggcagaaagtgctactgctgctctcaactgtagcggtgtggtactgggatccttgccaataagggtgagcccgtccaagacgcccgtgcgtccccgcgtccctcgccacctgatgtcgtactaggtatacatacatgaggtgctgacgatgccactgctcatatataagtaatagagatagacatgtatgaaaagggtcttttgtttttaagttgtgggctcggcctttttttctctctccttgattcaccgttggtcgaggctgttcttttttttaccttgcacatagaggagagcttcttactaagaaggaagaatgaagaaggaagcgcgtgggggtttttttttttaccttgatgcttttttaacctgtgttcagttgattggctgcgtctggttgctactcaacaaacaagaacacaagctaaaacttggtgatcggagactaccttttgcttgcttcgatgct

SEQ ID NO: 34320 - DNA, 2775 bp, Zea Mays
ccacacccacagaacccaattccctcgcgcgctcccccttcggcccttgagcccttccaccctctcccaggcatcacacattccaccaccaccgccgccgccatcaccactgtgaccaccagccccacactcgtatgtgattattggcacccggacgccaccgcctccgcctccaccaccgactgcgccatgggcgactcctcggtggccggcgcgcttgtgccgtccgtgcccaagccggagaccgcgccgtccggtgacaactctacggcggcgctggcgctgccggaagaggcggggacgcgcgcggcgtcggcgtcgccgcagggacctgcggaggaagagggccccgccgatagggacctcctctgcccgatctgcatggccgtcatcaaggatgccttcctcaccgcctgcggccacagcttctgctacatgtgcgtcgtcacgcacctcagcaacaagagcgactgcccctgctgcgggcactaccttaccaaggcccagctctacccaaactttctccttgacaaggttctgaagaaaatatcagcccgacaaatcgcaaaaacagcgtcaccggtcgatcaatttcgatgtgcattgcaacagggaaatgaaatgggagttaaagagttagatagccttatgactttgattgctgagaagaagcggcaaatggaacaacaagaatcggagacaaatatgcaaatattgttagtcttcttgcactgccttagaaagcaaaagctggaagagttgaatgagatccaaagtgatctacagtacatcaaagaggatataagtgctgtggagagacatagggtagaattataccgcacaaaagaaaggtactccatgaagctgcgcatgcttttagatgagcctactgcacaaaaaatgtggccctctcctatggacaaagctagttgtcgctttcctcccaactctcggacaccacttggcggatcatgtccaggaactttacagaataagaagcttgatccgaaagctcaagtaagccatcaaggatttcaaaggagagatgctctaacttcttctgaccctcctaactcctctattcaatcgggtaatgtcattgctaggaagagacgagttcaagcacagttcaatgagcttcaagaatactacctgcaaagacggcgtactggagcacaggcacgcagacaagaagaaagagagaccgttgcaatgaatagagaaggctatcatgcaggtcttcaggatttccagtctgtgctaacaacattcactcgatatagtattgaatttgatcgtgatgatgaactatttgctactgctggagtctcgaaacgtattaaagtcttcgaattttctactgttgttaatgaaccatcagatgtgcattgcccggttgttgaaatggctaccagatctaaacttagctgcctaagctggaacaagtactcaaaaaatattatcgcaagcagtgactatgagggtatagtaactgtgtgggatgtccagacccgccagagtgtgatggaatatgaagagcatgagaaaagagcatggagtgttgatttttctcgaacagagccttcaatgctagtatctgggagtgacgattgcaaggtgggtggatatatcagacaactcactgcagaaatgatagtagtttcagatggtcacagtgattcatgaatgcaacaacaggtttttggtgtatgcatttttgtgtgaggttttcttgagtaaggtgaaagtgtggtgcacaaaacaagaagcaagcgtgatcaatattgatatgaaagcaaatatttgttcggttaaatataatcctgggtcaagcttctatgttgcagtcggatctgctgatcaccatattcattacttcgatttacgtaatccaagtgcgcctgtccatgtttttggggggcacaagaaagcagtatcgtatgtcaaattcttatctaacaatgagcttgcatctgcatcaacagatagcacgttacgtttatgggatgtcaaggataatttgccggtacggacattcagagggcacaaaaatgaaaagaacttcgttggattgtctgtgaacaatgagtatattgcttgtggaagtgaaacaaatgaggtttttgtttatcacaaggctatctcaaaaccagcagcaagccatagatttgtatcctctaacctggatgatgccgatgatgatcctggttcttatttcattagtgctgtctgctggaagagtgatagccccaccatgttagctgctaacagtcagggaaccataaaagttcatgtacttgctccttgatgtcgtggagggcgttcaagagatttacagccagcgcgtgtatgtcgtactgtccaggtgttccctttcgtgccattatattccccaaaagcgagaatggaggcattattgatctccggttagggcatgaatttttgcagacgatggccagctgacgtagggttttgaggtatcagaatgtgcataatcatgtttatgttgtacaggtgtaaatcagccaagttattgattacaagtgtgacatgagaaatacacattaataaaaactccagctcggttgtacagagattgtgtttgaacccagaaattcatgtggttatgtcgtttgataatatatgtacctggcaggggtgaagctaggcctttttttgtcagctggccttgataattttctggatatctaatgaaaaaacgatgtcaataacaagagttgtataatgaagatctagtagataatactagataat

SEQ ID NO: 34321 - DNA, 1233 bp, Zea Mays
gctaggcaacttgggtccccagtgcttaacgcaacaaaggactggccagtgcaagtagtctcaatctgaggcgacttgtggtgatacgaggggcaactagagaagtccatgggacatgaaaaattatcgaatatctgaggaaggatgggaagctacttaatcattgtggaatgacaccacagaagctccctgaccttgttgaacataatccacttatagctgtcgatgttctttcaaagctaatcaactctccggacgtggatgcatactttgatgctattgtccatatggatatgagcttgcattcaatggaagtagtaaacaggctcactactgcagtagttttaccaccaggatttgttcacgactatatctcaaactgcattcgatcatgtgaagacattaaggacaagtatatgcaaaatagactagtgagactagtatgtgtctttctacagagcctcattcggaacaagataatagatgtgcaagatctcttcatcgaggtgcaagcattttgcatcgccttctcgcgaataagggaggcagtggggttgttcaggctcctgaaatctgtagaatgaagagcgctctgcgatctgttggctgctggattctataaatagaaacttccattgtgtacattcatggctctgcttttgtttttccagcgtccaagagttgaaaagatgtggtggccttggtccagggttgggtgtaaatggtatggatattttccgatgatattcgatatcaaatccaattaggcctagtttgttttcgcctgaacagcccgttctgggcctctttctgggtggaaccaatcagcctggtttggtttagtctgatatagtttgctggagctgttcgtttgtcttgggccacaaagccgcctgtttttaactcctctgcctcaaatccttagcccaaaatgaacccaggtgagcaaccattcggattgattcctgtgctggaagttggctgccgaccaggaatgagtgacagcttatgatccactcaatcctgggctggtttggttcctggcttgcttcaatcctggcctgccaaacaggacgagttctctagagtttggatattcaacttatctgaatactcaaattgctatcgtatatttatgatatcgatatccagttgtatcctatccgatatagttgacactatccaaatttgaacatgattcgaatggcaaacaaatataaacaatatttgatc

SEQ ID NO: 34322 - DNA, 2228 bp, Zea Mays
tcactgttagcgtcatgatctgtatatctgatgtgaacaatgtacattggacatcaagactagtatgttatgtaggagtgcaatataatacaatataatataatataatacagggagtagtacatggatgttatggtggtatttatatatgcctattaatctatcaataccatatattcagaatttgtgatctgatgaattttggtagtgttgctcgtcatcaaggtttttgcacacggaggggaggggcttctgatcgtccatcctcgcctccatcagcttctccttgaggctctgcttcagcctgcctccccctccccctacccgctgtggcaatccagagccgcctgacgagctgcactgctcgcctgcgacggctggaggaggaagcggcggcggcggcccttccgcggtcacgctcgacatcctcctgtccgaataagacggcgaccagtcggcagctgtcctcccggtcttcttcctgctctcggtgatggcggacctccagagcctgcgtatgagcgcggtgttcttggttgaacgccggctcgcgcctgacgaacgagcctccgtcgtcaccccgccgttgccgttggccaccgaagctgagcggtcgctggtgccgacccagctgcaggaagccatttccaggtcggccgagctgccaccgtcggcgaacatgtcgtcgtcgtcgtcgtcgtcgccgtcgccgccgtcggccttggccaagaagaggtcggtcgcggggctgacggactgcagcatgtcgctggatttggacgacgcggggctcgcgggcctgctgttcctgcgcccgtcgccgtccctttccctttccgcagcggcagcatgttgcctttcgctttccttgcggcggaagtggtccgagcttgtggctgcagcggcgtcgcttatgaggcgcgcctcccgcagcacggcggagtgggaggctgactcgtcgcccttgttgcggaggaaggcctccatctccgcctgcaagcggttgaggtgcgtgtacttgttctcgagcgcgagcttggcgtcggacagcttcatctgcacgcgctcctcccgccacacctcggccatctgcagcatgcggcgctcctcctccatctcctcccgcatgcgcaggcactccccgcggagcagctccacctcggcctggtcctcctccacctcccgcgtgagctcggagcaggcgtcctccatcagctcccgcgccttgcgctccatctcgtagctctgcgcctgctgcttggccgccgcccgcgcctccgccaggtcgcgcagaagcctggcgttggcctgctccagctgcctccggtgcctccgctctgcgcctagctcgtcctggagggcggccacggcgtggcgggccttgtcccggacccgggacttccacgccgccttctcctcggccagcctccgcaggaagcggtccaggcgcttggtcataaggcgccgctcctcctccagctccctggcttcgcctcgcgccttctccagctccgcctccatgagcagcagcagaggggaagacattgctgatgtcgaggcgaagaagatgttatgcgagtggttggcatcccatttggtggccttctccatggacgaggagccgtccaagcacgcgtcgatcttgtctaggatgccattcctagtgctgctgctagtacatcggcaacggcagaggtggtggcttggcctcgtccggctccgtcccatgagcttttgctgcgggacagacaaaatagatcagtcttcatctacagaaacagatcgatccacataaagatgtcatctccgttcgtcccattatgtatacatgttgggttatcaattatcatggatacagagtgctcttcttgaaatggagtcagtcatctgcagcaatctttttttcttcttcccatttatcagatctcgaatcctggatgcatacctaatgatccaatccccagaatcacttaggagttaggagttatataagaaagagagaagaaaaaaaacatctttgggatgggatgattgttcagtaaaaaaaaataatcggcttttgaccagaaatcagaatacgtcaatattagtttcaaagttgcggtaacaaaacaatccaatccgtggcctcttgtgaatttgtttttccacccaaaagaaacagagggcaagaacacagatcaaatcagggagaatgggaatggcggggtgaagcacaaggaaggaag

SEQ ID NO: 34323 - DNA, 4555 bp, Zea Mays
ctggcgactggagagagaagacgcgcgccgcgaaatccaaaattccaaatcccggccagtttctagcagcagtgttttccctccctcccaaattcccactctctctcctcctctctccctccatttttcgagacaatccaatcacccagcgccagcgatcccaaacaaaccctagccaccaatctccgctccggcctgcgccctcgccatgcccccgcacggccccgaagaagacgccgccgacgcgcacctcttcgctggcgtccgcttcgcgctccacggcttcgaccagatctccgcgtcccagtttcggttggagatagagcggtgcggcggcgtccacgcgggaggttgggacgcagactgcacccacgttatagtttccaacaccttatatgatgatccagtgtgtgtggcggcgaggaaggccgggaagaaggtcgtcgttgatcagtgggtggaagacagctttgatctcggagaattggcagatgcagatcggggtaccagaagaattggcgcgacgacataatgaaaatggtttctttgatgggagcaaacttctccaagtctctggcagcaaacataattacccatctcatttgctacaaatttgaaggtgagaaatacgaacttgctaaaagggtgaatataaagcttgtcaatcaccggtggctggaagaatgcttaaaggcttgggaaatccttccggtcgaccattatacgaaaagtggttgggaagtagagataatgggagctcaagctaaggactctgaagatgaaacagaatatgctggtacatgctcattaagtagcagacgtattgacagaaggacccctattagagagatcagcacaaaatctcatgttgactctgctctacatgcacccagtggaggtcctactgtctctgctagcaatgtagtgggtgctactggaaaacacttgagcactccagagcagtttatgaaagcacacgatgcgagcacaaaatcatctgacattagaactgactcaggaactgcccctgacacaaagtgtgctgcaatgtctgttgataatgatactcttaaacctacccgctctcacatttaccacaatgagaatgatgaggttcctgcagataaggccagtagggatgaagctaaagatgatcacagaagggaacttgacaccagggatagtacccttcgtactcccagtgtacataaaagcattgcacccactattccaggagacaatatagagaacactaacaggaattgtttccatggtttcagtcagatcaatgtcaacagtgatcttcagttaaactcttctgaagaaaatttctccaagaaaatattacactcaacaaacttgagcagaaaggtagaccagaaggatgacgggcatgtacctgatcccaaacccaacatttctcagtcatcagttgaagaaaacctaaacatgtgtgagtttaatccaagatcagaaggcaattcagcatcaagaaatgatcaacccttaggctattcaagaaggcgatcttcaaagtcaggatcacttaatgttcataggaagaaaagcattctttcttcagtcagttcaaaggcaccaaatgaagccccagactcgggaagtggaatatcaagcgcaactgcttctgatgtgggtagaagccccaccgaacctaccaaagttgatggtcatgtaaacagtggtccaactatgaattcaacagagaaccagatgtccggttgtaaaagcaacctgttaagttataggagaacatctttgaagcttgtaagctctgctgaagtagaaaagcttcctgaaaattctgttaatgataagaacatggtggagccagatgtagtaaagacaccagcactgcacgaggcaacaactgaggagccttccccttccgtctgttctgaagttagaaaagaaagtttaggtgttcatcagaatagggacgctgaaatgactgatgctcagctgctaagcaaaactgaagatgcagctccttgctcaaaacctgataaagtggtttcttgtcagaactcgggactagaaggttgtaaagatgtcccagttaacaagatcactgatgaacatggaatatttccctcgaaaatatcaacttctagagtgaagaaggttggtgccaagcggtctcgcaatgccggcagtaaagctgctagtgaatttacaaatagtagaagtgaggttgcagctttgaagcctaagcatgataaagttgcttctcatgaaaacgtggaggcacaacagggagaaggatgttgtagtccaaatgctgctgaatgtacaccaccatctcctgcagaagccctgaacaacaaatcaacgaatgaagttctaaccagctcccagggccccaatcataagacaaacgaatcactagtggcttccaaggcggagtctgttaatatgactctgcaaagaaacaagaaggggaaccgcagaaagcttccaaacacttcaaatgcagatgaaaatcaaagaagttcatctcggacagtaccaaattccaaatcaggtaatttggttgcaaaggggtctcggactgctgatttcaatatatctgactcaccaactgtcgatgaaactgagacagtgccatcaaattcgagttttaatgaggcagttcctccaggaaatggtgaagaaaaacataaaaggctttcaagcagtgcaaacgcagatgaccctgaagcatgtacagcaaataaagtaccaaacaatagagtccgtaaggtcgtagccaagaggaagctatctgatgtccaaagccacaaatctggtagtgagccttgcaagactgcgaaggtattggtatctgaagttaaagttgtgtcaccagccagagttgcgcagagttctagaaatgctaacaaggtaacagtggttcaagacctgcagaacaccaatactggtaggacgaacgatacagttggatcattttgcaaagatgtcacggaagactgctcaaaagacatgcagagctctaaaactagaagcagcaggagacaaaagattgcagatctagtggatggttcaacggaccatgacaaggagaacatactagtcgatagtaattttacttccaatacaaaacgtggaaataacagcatgagttccaaatccaacacaaagacattacaaagtagcaaagctgtgcttgatgagagtagtgtgatcaaaaggaatggttatggaaccttggatgtgccagaaccaacatggtttattctaagtggacatcgcctgctgagaaaagagtatagggctatacttagacgtttgagaggtagagtttgcagggattcacatcactggtctttccaagcaacacaccttgtcaccactgagatgcgcagaactgaaaaattcttcgcagctgctgcggctggcaggtggatactgaagcctgattacttgactgctagcaatgaggctggcaagttcttagaggaagagccatttgagtggcacggtgaaggccttaatatcggtgatacgatcagcttggatgctccaaggaagtggcgccagctgcggcagcgtactggctatggcgctttctatgggatgcaggtcatcatatatggggaatgcattgctccaacactggacacgttaaaacgcgcgatcaggtgtggtgatggcaccatcttagcaacctccccaccttacacccggttctttaagtccagtgttgacttcgctgttgtatccgcgggcatgccaagcgcggacgcgtgggtgcaggaattcatgcggcatagcatcccctgcatcagcgcagattacctggtggagtacgtgtgcaagcccgggcaccccttgggcaagcacgtcctcttcaacatgcacgatctggccgagaggtccctgcagaagctcatgaagaaccaagaagatgctcccgggagctgttccgcttgtgggtcagacaaccgggaagtgccgatgctggtgtgcggcggcgacgggaggagccagtcttccggctgtggggtccggacgcatgccgattgctgcaaccctcccgtggaaggctgcgatggtggcgagtggctgtgcggtaggtgcgaccagcagaaatctgcaaagaaggctaagaagaccgctgcgaaaccgagggtgctgaaacagagatgattctggtttggcccgtacaagcgatgcaaaaggtcgtctcccaaggtaacgacgaatgatggcagcgggggtgctcttgctctctacaagttgatgacaactagctcgttgcctttggaaagcacccgtgcatgtgatctgatgaatgaaaacaaagtgatgggtgtaaacgtataaggactttagactggtgccaataaatattacgtatttatgtaaatgcacggatctgatggaatgctgtgatcaacttgaacatatatggtgcccatcaatctgggcattgggcgctgtcgaatgtccggtaaagcgcgctatttccggatcgtccttcatggttgtgtgcgtccgagtaaaggcaatggccgtgcaaaagtttcttcgacgg

SEQ ID NO: 34324 - DNA, 954 bp, Zea Mays
tggacttgtgcttcggagctaacgggatctgggttttaggtggtatacaaggcagcttagtatggatgaagacggcgacgtggctgatgagttcttggatgaaattatcccagaaagctcagtcaacaacgccaaaagcccagtcggaaggttccaagtgaaatataacacgaaacgaactgctctagcattgaggaagcatgtcattgctgtcgatggcgagatccgccatagcttggaacaccaagggcaactgcggtgggtgtgaccgagtctgttgagcccatatgaaagtgcaggttgggcagaggcaggcgcgcacatgggcgaagcgaatgacctaggttacccatctttgaagtggacctagaggtagttcattgctgatttatccatcgttctccgctcagtgtgttggtacgcctgatctcgaggttattcagacaccttgtaccactagtagtttgtcacgatatacctgaggatagcttccagcctccaggccacgaagggaaagcatgcccaataggagaatttctgggccagaatgggtcctgtaagcggtgcagtggagagtttttctttttctgttggcagtagtgaacgggtttattatatatatgggagatggttcgtgtggatgagactaggctgggaactgaagattgaaccggctgcctccgggagggcgctcctccagataaatctccagtgattcgtgagaggaaacgaacaccgggagcggtgttcagattcctaccgagttcttacatagttgtacattattgaacagctaccgctggacaaattgaatgtgcttggctggcaatggagccaccgaatccgtgcatcagatgatgttggttagccattcattcatgtatgctgttcggccaatctgcgagctgacagactgacggaaaaaaaaaatagaatgtgtgaatgtattccttc

SEQ ID NO: 34325 - DNA, 5171 bp, Zea Mays
gggagaggagagccgcccgcatccgcgcaccgcaccgcaccgcgccgcgccgttcagagagggagaggaggggacgcgaggaggaagaagaagcaggcaaacagcagcagaaggcagaagccccgtcccatccccggcagccccctccatccaagtgatttcaagtagccaccgagaagcggagaaggtgaccgcacctcacgcaatttgcccctgcccgtcgattccatcgcctcccgccgtcccttccctcctctagggttgtcttgtgggtgcccgtgcttcccaccctaggggcaggtccagggccgggccttctcttcgccccgcctccgctgctcttttctttgctgctagggttaggttagggttcgacgctgtggggaggggcatcctcctccctcgccgccgccgccgccgccaatgcctcccggcggtaggcgcggcgccaagcagcgctccaactggaccagggaaccccagctaggcgaccttgtcctcgccaagatcaagggatacccgtcctggccagctaagatcagcaagcccgaggactggaaacgtaagccaacgccaaaaaagttcttcgtctgcttctacggcaccggggagattgcctttgtacctctggcagatcttgaggaatttactgagaagaaaaagaacgatctgttagatcgagctcttaaagttcaaagaaaatatgttcaacaatttaatgttgctgtggagcagatctgcaaggcttataatgaattgccaaaaacatctgaagccgcaaatgtagcattgcctgatcagagtgaaaagactacagagcacctggtgaggtcacctgatattggtgggactccaggactgggacaaatggaagatgatccccctactgattgctcaagtacttcagggcaagggtcagggaccgaggaggatgtcaaagatggtggtcatgaaataggtgataattctttggcagttcctcaaaagaaagcatctttacaacaggatcctaagcatcccaagacaaagaagtctgctgcatcaaagtctggttttgacatgtacacagaacaggagcattcaccaacatctctgcgggcagaaaggcagattgaagaggtgaaaattgaagaagagagctgtcatctagaaggttttgttttggaacctaacttggaggtggtttgcgcccttgaagtgccaaagaattttaaatccaacaagctgttgaggaatgctgaaagtaaggaaaatgagcatgttggtgttggtagtcctactggaaggattgctgttgaggccgcatctgatgttgtattaaacatgagtgctgaagaagagagcagagaatttaagaagtcaaaaatcatgacaaaacaatcactgactactggttcagagaaaagggataataaaattgtccatggaaagcctgacaagcaattgactggaaaatcatctgcagggttttctctcaatcagaaatctctgacaggtagcgggcagcacaagatggacagtagtgctgatacacgtccggcaaagaaggcaagacttatggacagggctggtgaaacagataagacagttgccaagagtgagacgaagttaaacatcaattatgaaaatcataatgctgtgaaacatgagcaatctactgctgtggaaacatgtaaaaacacaattcttaagactggtatcggtgatgatagggcacggaagtcaggtggtgctgtatcacccatatcaaagcttcattctgagatcatggaaccagcatctggttcttctgtaactcagtctactgttgctgattctcttaaaaagggttccagcaggaaggaggatgtctcacgtgttgataggaaattggttaaacctaagagaagagcgtgtcgttttgatgatgacgaggatgaaggacagcaaacaccacttcatagaacttctgccaaatctctctctacgcatatagtcccaactgagaaaccaggtagtcggggaaattttgcttcgcatgttggcaacgcttctggaaaaaaaccaggccctgccagagaagagaaatcaagaagtgttaggatgtcacctgtgaagcatgagccagttttttcttcaccgagtcaggataaagtgcatgctagacaccagttaatggggagaaatctgatcacagggtcggttgagactcctgtcattggtaacaaaatgagcctggttgatggcaaatcctctgctcaagtaaaaatgccggcatgctctgaggtgaagaaacttcatagtacttctaaaccattgcaagtaacatctgggaaatcccattcccgaaactatcctgcttcagaaaagatcgccttggtgcccaagtcagaagaaacaaaggctaaatctaaaccagctacatctgttgagcataaggtggccaccactttgtcaactgaacggactgggaagcgggaccacctgaaagaggaaagatcaagttctgttgataaagcagcttattctgaacctaaccctgactcggccaagtcaataaaacatcttattgcagctgcccaagcaaggaggaaccttatggcttctgctcttgcaaaatttgatgggtcttcgactgataatagtgctattacctctacatcatatggtttgccaagactaagccctagtcctgtttttcgcattccatccccacctagaattgcttttcctgagagtcctggtcaacgtattctgaaaagcccaatggagcttgataatggtcatggaaagagtcccaaatctaggcaggccagcggttcacctagtggtggttctgatgcagcaattgctcgtgatgctttggagggaatgatagagactttatcaaggacaaaggatagtataggccgtgcaacacgccatgcaattgagtgctctaaatatggcattgctggagagattgtcgagcttctcatacagaaattggagaacgagcataatttgcatcgcagaattgacctcctttttcttgtggattccataacacaatgttcccattctcatagaggttttaagattgtggcttgagagaaagattatgccagaagacatactccgaaagtacatgggtgacattgaggtgccaaatgatgatactagcactagtttaatgttaaagcgaccatcccgttctgaacgttctgtagatgatcctattagggagatggatgacatgcttgttgatgaatatggaagcaatgcaacttttgagctttctggaattttatcatcaaaagtgtttgaagatgatgaagacttccctcaaaacaatgggtcatcatcatttgtttcacggcctgttgaaggtggtgtcatacatgaaactgaagataatattgctccagcatctgttgaggaacacattattagagtagaacatgtagctactgatgctgctatggaagatgctttagagttacttggcaacaaccaacagactcatggagctgtcattattgaacatgactctagtcaaggtccaggttcagagcaggcattgatcgcccagaatgagcttccccctctacctgatggccctccaccacttccatcagattcaccaccacctccacctcctttgcctccttcaccaccacccgctacaccgccaccaccacctccactctctccagcttcaccacttccgccaccacctcccccactaccatctggaccacctcctcagcctgcaccaccacctctgccaacccaggacccacctcttccttctattccgctgcctgtttcttcatctccgttgtcattgggttatcagcctccagcgccagagtacttcatgacgcccaatggtaatcaattggcccagatgacagtaaacacatcaattcaagctattggaaatacaacaaccttcattcctggtggaccagttaatggacaagctgcagttaattttgttacttcaatgccggcagaatttggaaatactagcgtatttatggcgcaagcttctaatggtaattaccagtttcggccaactggtgtaccttttcagcaagggaatttcagtgcctttccatctgcacaaacacctccagttcatccccattctcgtatggcacacatgaatcccatgggccaacaagctgttgcacctccacacaatccttatgctgcacagtcctttccaaacagtcagagccattatccatctgaagaacattggcggatggcatctggtaacttcagtccagatgaccagcataattggatagcaagtggcagatcattaccttgctcagaagggccatttgtgcatgatggatattcaagatcaaacattgacagatcttcaatgaatcctatgaatcatcaacatactgttctgaatcatttgccatctggagcaccactaccaggccatatttctcagatgctaccagccaggtctgatatgcacactcttaattgctggaggccctcttgatagagttgtaaactgaacttcttgtttgtgattttgacatggaaagctcagggcattggaggcaatttgaattgagttcaacaactggtggctgttagtctgagatggagatgcacttgccagggtttaacgatgagatctgtcatagtatgtggaatggacattttacaatgtaactagtcctgacaacagtatccagcagacaatctctcttagtgtgagctcatcttttcacatgacgcaaatgtcctccagttttttagatgttgcttccagtatggatcaggacagcgaactgttcctatgctatggtagtaaatatcttgtgcagatacattaattataaatagaggtctggtagtaaataccaggaactggtatcatcaaggcattttgtcacggtgcctatgctatggttcgcttttttctcttaactgttgtgctcaatttgcgaaattcatttcaaatttcagttagctaatcacatatattctcaacaaccgtattttatgtttggtgtttagactagaattgtgcttagacaacatgtacatcactgagtttagatttaagagcggaagttagttttgattctgttaggacggcgaaatatgtgctgatatttaagagctctagtttattcttgtttccaaagactgctgatagcgttggttttctaagc

SEQ ID NO: 34326 - DNA, 437 bp, Zea Mays
ccgagaaccacgcccggtccctgcggggtggaaaatatctcacgcaaaggagctgaggcatcacaaatgaagggcacgaggcggcggcggtggcggcgacggctctccggcgttgatctaccctgcgtccgtgttcttataggagtggcccctctggagttgtatgtggagttgtaaactctcttttatcctagaagagtttctaaggcgcggtataagtccatgatcatagactaagaggatttgactctaattactatccgttttatttatgtagtcctatgagaacatagagtatttgcacattgctttattagtttattaaagttaaagattgtatgtgatgagtatgtatcaactcttgttggaagtgtcttgcaatttccaaccatatattgtgtgtgtatatatatattgtgtatatacaatggaagctt

SEQ ID NO: 34327 - DNA, 3744 bp, Zea Mays
cgattttggtctgggaaagtattccctggtgccgactaggcgacgggaccaccaaaaaccactctcttgtgcgcgagcatcgttaaaattggccacgccgccgccgccggccggcgaggagccggtactgtctgcttgctcttcttttcaccgaaccaaaacgcccgccggaaagggtcaaaggggaaacagagatctcggtttgcagtgatgaagcttcgctgatgagctggcgcccgtccactcgcaacgacgctggacaaaagactagccgtcccgtcccgtcacggcccggcgacctggcaaggagaactgcagcgacagcgacagcgacctctggacaatcggctgtgacggtctttctcgtttgttttatagataggaaagaaataaagataagggttaaagctttctcgtagcctcctcagaacatacgggcgattgtcttttcgccggtgagccattaattccgtcgagctgatttcttcttgctggttttgccggttttatttttttcttttattggtaattcttggccgtggcgactgacgattccttttggcgcttgtaatagcacaagcatagctaaagtcgtcccgtttcctcctggtttcaatctgtttggaacttttgttagttccggtccatagggggaatcgtactatcctgtggtcaaaattgtcgcttctttcttttgtcgctctctctatacacaccaaaaagaaggaaaaaaaaccacgattttttctcccaactttgagtaattaccgagtgtttcttcaagtcggagctcggctctgtgcttagccgggaccctatacttggggttttggcgggtccatcggaatggtcagcgggaatctgctctaccggaggaagcgctcgtggcgtgccgatgagttcgtgagccggagcacgctgcaattgctcgactttgatgatggctcaccaccagagcatgcatggagaaggaaactaagtagtcatgctaatagattgaaggagttcaatgtcacattcagagaagcaattagaatgatgaaacttggtctccgactttggtcatacattcgggaagaagcttctcacggaaggaaagcaccaatcgatccattcactagagagggcaacaagccctcagcctcgcaaggagtacctcttggtgggatggggagtggtagtatttcaagaggctttaggggagaattcaagcattggcagataactcctggttcttgtgaaatgtcacctgtgatggccaatcaattttcgatctttgtcactcggggaggaaccaagaaatacgcttcagttttgtcgcctggtcaacttgatggtttgaagaaatctactgatgatggtatatcatcctgggactggaaattaaagggtgatcgttcaacgtatcatgctttgtttcctcgagcatggactgtttatgatggcgagccagatcctgaactgaaagtatcctgccgtcaaatatctccatttattccccatgattaccaggagagcagccttcctacctctgtttttgtatacactctagtgaatactggaaaggaaagagcaaaagttagcctattgatgacttgggcgaattctataggaggactttcacatcattctggggatcatgtaaatgagccattcgtagggaaaaatggagtttctggtgttcttctacatcacaagacagccaataataatcctcctgtaacatttgcaattgcggcatgtgaaaatcaaaatgtaaatgtcacagtattgcctgtttttgggctttctggagaaagttctgttactgctaggggaatgtggggcacaatggttcaggagatatacaaagttttatggaacttctccaagatcagcagtaaatttggtagaggacgctttgatgaagtataaacattgggaagaagagattgataagtggcagaccccggttctccaagatgagaggcttccagaatggtacaagattacactctttaatgagctgtacttcctagttgctggtggaaccgtttggattgatagtggatctttggtgtctgatgctgataacaagtcgaatccagaggaaagtaatttgtcacatgagatcgatgacaaagaaaatgttgggaaatttttgtaccttgaaggaatagaatacttcatgtggtgcacctatgatgtacacttctatgcctcctttgctcttttggatctgtttcctaagattgaattgagcattcaacgtgattttgctagagctgttttgcgggaagataacagaagagtcagatttcttgctgatggtacctggggtattcgtaaagtaatcggtgctgtcgcccatgatcttggagcacatgatccttggcatgaattgaatgcttacaacatacatgacacaagtagatggaaagatcttaatcccaagttcgttcttcagatttacagggattttgctgcaacaggtgacaagtcatttggcaaggatgtctggcctgcagtctgtactgctatggaatacatggaacaattcgatcatgatggtgatggtatgattgaaaatgatggatttcctgatcaaacttacgatgcttggacagttcaaggagtaagtgcatattgtggttgcctctggcttgctgcccttcaagctgcggcagcactggccggaagccttggacatgatgactatgctgagaggtgcatgacaagatttgtgaaagctaaaactgtatttgaagccaggttatggaatggttcacacttcaattatgacagtggtacaagttatagtagccgttccatccaggcagatcagctggctggacaatggtatactgcatcgtcaggtttgcctcctctatttgatgaggataggataaaatgcacgcttcagaaaatatttgactacaatgtgatgagggtgaaaggaggacgtatgggagccgtgaatggtatgcatccaaatgggaaggtagatgaaacctgtatgcagtcaagagaaatctggacaggagtaacatatagtttagcagcaacgatgctgctccatggaatggagcatcaggccttcactactgcagaaggcatttatactgcaggatggtctgaagagggctatgggtactggttccaaactccagaagcatggacaattgatggccattacaggtcactaatttatatgcgcccccttgcaatctgggcaatgcagtgggccttgtcgcctccaaggtcgatactggaggcgccgaaggtaaatacaatggacagagctcacatttctccaggcaccttccaatttctccaggatagcgttagaaagatgacaccaaaaaacggttgttttggaaacactgtaattaacttggattgctgatgtgacggtagcacttgtatctcgcactgtccaatgtatgtttacggagcacctcatttagaaaatgttgagtgtgaaacgggtgctatattctgttcagcctttgcagttatgtggtgtacctctctgatgtaaattgcatctcacagtgggccggactttgtaaattgttgtacagaaaacgtacatatgataatgccgtgttaccctgatattcatgacaccgtttaccacaaaaatctgtacagtttattgttcatatagtattttagaacgagtacttgtcagattggcgtaagacaatgtcctcttagcgctgtactcttgatggtatatatagatgtacatgtgaatgattt

SEQ ID NO: 34328 - DNA, 1507 bp, Zea Mays
aattcgcctgagttccttggaataaaagaagatttgcgatccttaagcctcacgttccttgatctgctggtgtggaagttgatcttgatcatgttcccgttcgtcgtcttcatggacaatttgatttggagatggggccggaaatgatagagcaggatggatggtaggaaaaggaaggggaaattcaggaattctctcaggcgtatggctatggagtgcctgtgctctggtgagcagttgaaggcgtcagatgagaccatgcggtcatctgattctacgatcacaaaggatttctcggccagtgggtactcttctcggaatggagagattgagcagtaccttgataatggcaacatagaggaagccgagttgtcgctccgggagggcatttgcctaaattatgaggaagcaagggcattgctaggaaggctagaatatcaacggggtcatgtagaggcagcactccgtgtctttgatgggatagacatatctgcattagttcctaagatgaaaatctcaattgctagaaaaacagaccgtcggaagactcattcacagtgggattccccaccaatgcccttgcatgctgtcagccttctcatggaggccatatatcttaaagcaagagcacttcatgatcttgggaaagataaagggcaacaaggatgataaaggcctggaaacagagacctggtatgatctagctctcttatacctaggtatggcacaatggagggatgcagaggtttgtgtattgaagataagatccatcagtccttattctgcattggcttggcatgctacaggaaaaatatatgaagcaaaaggtcttagaaaagaagctttgggagcttttttcagagccttagatcttgatcctaaacatgtcccaagtttaatatcaactgccactgttctacaacaacttggtgacaggccattgccttctatacggtgcttcctgactgatgcattacaactggatagaactaatcatgttgcgtggttcaatcttggccttctttacaaagaggaaggtggcaggtcagcagctgaggctgctgaatgcttccaagctgctgcttttcttaaagaaactgcaccttcagaacctttcagatgacatctacaggggctatagatgtaagctgctgtatgtatttttgatatatttcactgatgaaatagtggattacagagttctaaaaatgatcttcttgggagatcacagcattggaaactgttggaaaaaatgtttaacaattcaatctatagttccaattgttgcctgtatagcaacaagaaagacgatgatcttcgccttgtgtaggaacagtgcttactgtgatatatatatatagatagatgaccagtacattgtgtatcttgagtaaaatggtttcacatataaggtatcagactactctctccgtttgttaagaatttagtcaagatataaaatatgttctggggtccttcagaattcagttcagtatttactatcaac

SEQ ID NO: 34329 - DNA, 9458 bp, Zea Mays
cccgtctcgaaccgacaccggccaggcgggccagccagccacacaccaacccgacacggcgcgggcgcgggcgccggtccaaacccgaatctctcctgtcgattcctccctcttcttcctcctcgtccctcccaaatccccgaacccgagcgcgcgactccctcccgcctcccagatcttccagaacccgctacgattcgggcaatccgccggcccgcgccctagtaggtctccgcgggcgggattggttgatgcctccccgcctcgcgtgaccgctgcccgagggctggaccggagatctccgcatggatcacaggggcggcggcggcggtggcggaaacaagaaccgcaccgatctcctcgctgcagggcggaagaagctgcagcagttccggaagaagaaggggaagcggggtcccggcaataaggccgacgccgatgctgacgcggaggccggggagggggcgcccaaggcggcggaggagtctgtgcccgagccgaaatcgcctgttgggttgaagctcctcgccggggagggcggcggcgggagcactccatttgaggaagcggagaggtctcaggcggagcagtgcaacggtgaggggcctggtaccgcggagtccagctctgtggagagttccaatgcggtgcaagaacaggagacggtgcaagagcaggagacggatgatgtctccgatgcacatcatgtcggtcctagtgagcaggggatttcggagcatcctgaaagccagacagctggtggcagggatctatcacttcaggctaccagtggagacagcattggtgatgataatgtaggacgagctcagctgggtgatgtggatagcatggagctgaatgcttcttctgaaggtaatggagcagatggtgattgcaatcaactaggggaacaccagcaggtggaaatggatgctgttgaaaggccaacaagttccagtttcgaagaattcaccgagttgccaattcattctcaaggcattgaagccgataatatccacggtgaaggggctcaggaaatggtgatggatgtttctgggaggccattagatggagacatacagcatgacatcgagcccacagcttctgctgaaatagatgccgagactgcacttgaagagtcaactgttgcagcttcaattgtgattcctgagagtactgcaagaggtactgagtacgaaagagacactgggtatgaaaccgatggagtagacaaagaggctctcctagaagatccaagcatggtgcatgtaagtgatgaagctgtcactatagatgatttgagtgttcaggccaagccaacagcatcagcggatatgccactttgtgagcagaagggggatccagctttatctagaagtgcggtattgcaaggcattatgccacttcacttcgaggatatacaaaatcatatgttctctgcaactctgtcaagggattttctccagttgcagctagatgaggctgctggcctttattcagattttacacaacagtcttctgacaataccacacagctccgggtactgctaaaagaaactgaagaaagcaaactagcagttgacagagagcttcatcaatgtagacatgagctctccaaggtgaacatagaaaaggggcaacttgaactgaccatggcttccttgaaagaagaaatcaacactagcaacacgaggtgcacatatttggagagtgagctacattcctccaaggagagcacagaacaaatccacagtgaactagctaacagcagattgttactggaagctctgcaaaaagagaacatggagcttactgcaagccttgcttttgagaaagaagccaaaaaagaagttgaagaacagcgggaccatctatcttctgataacaggaagcttttatcggagttgtcaggtcttgagcttagcttagcttctgtgaaagaggaaatggatgctagcagtagcagatgtaatgtttttgagtgtgagctgcgttcctccaatgagaatatgaatcatactttgacagagttggcaaattgccaggctttattggaaacattacagaaagataatttggagctgtctgcaaattctgcctccgaaagagaagcaaaaatgaaactccaagaagacaatttgtatctatgtaatgaaaagggcaagctttcttcaaatttacgtgaactaaatgacaagttggaagtttcgtatgccaagcataagcagcttgagtcacatgtcaaagatacagaaacatactttggacaacttaccgagcagctaattgaggaaaatctgtacacaagtattagcatcgatatttaccaatctacaaccaaagacttagacactaagtacaatattgtgctgggacaattccagaatattatgcgtcaagaacttcatttggactcgtctgaagtcactactgagaatgctgaaagagccattatgacccctagacatgatagccatggtaataatcagtgtttgcttaatctggtaaatgcgaatgactcatgtaactcaactgctttgctgtcgctgaagggccatctagaggtggcaaaaagtgatttgcataaccttgaaaagttgctagagaggatctcctctaggtctgatggacgtgttctggtatcaaaactcattaaatcctttgagtcaaagggaagtgacgatgatactggactgtctgagggggagcatgataatttacaaaagtcaactcgggagatgctatcatgcctaggggagaagtttatagcaatgagctcagatattacaaaaactgaagaatatttggctgaactgtgtaacaaaattgaactttacgtcaagtctactgtgcagcatgatagagatagacaatgtactgttgttcttgaggccaaaatggatgaacttgctggcaagctgagcaactacaaggagacaattgacaatctgcacaatcaggttgctattgtgcagcaggatgcaaacagtaatgctggaaagctcattgatcaagcagaactgttgcagaaggatgcggtagaaaggatttccattcttgagaatgagagaatgtctttatcagatttactcagtgaagtaacaaacaagctcacctctttgggagatgctgtatttcctagtggttccagtgaaattgaaggtctcaatttctgcactttgagctgtgtggaccttgttgctagatcatttcaaagtcttcaggagaaattagaggctgctcaaatagataatgctcagctcaatagttctctggtggagctcaggaaggcaattggtgttgctcaagagaggagtgaacatgcagatggaattgtcaagaaactgtatgattccctacaggaacttctatgtgattcacttggaagttcaaatgaatttggggccagatatagtgttgaggaaccaattgaaagtcaatatggaagactcattgcgcatttaaagaatttgttgcatgaccaccattccgcgctgtcaactaatgctgaacttgagttgagtctgttaagtaaatgtgaagaagttgaggagctcaacatgagatgcagttctctattaaaaaaattggatgaagtttgtattctaaatgaggagcttaagtcagcttcttcaagtaaaaacgtcacactggataaactacacagtagatgccttactgtagcagaaatgttggcttcatgctcagcaaatcattcctcgacagttcagttgatatctgatattggtgaaggatctagcaaggaagatcatattcttaccacccttctcccatgcattgaggcggacgtggcttcatgcatcgagaaatttgaaaatgcagctgaagaaatccgtttgtctaagatatgcttgcaagaaatcagcatatttgaccagatttcatttgaaaaatggtcttaccccttgcccacattgattaaagaggaagttttaccaaagatatgtgatttgcaagacagattcgaccagctcaatgcactaaacattcagctggaaactgaagttgcagtcctcaaggatggcatgaaagagctggatgaagatcttggaacttcgcgatctgagcttcagaaaaaggtttctgaacttgaacagttagatcagaaattttcatctgtgaaggaaaaacttagtattgctgttgcaaaaggtaaaggtttgatagtgcagcgtgacagccttaagcagtctttgctggagaagtctggtgagatcgagaaactcacacaagaactgcagttaaaggaaacattgctgaaagagttggaagccaaactcaaatcctatacagaagcagatcgaattgaagccttggaatcggagctgtcatacataaggaattcagctacagctctaagggattcatttcttctaaaagactctgttcttcagagaattgaagaggtcttagaagaactagatttgccagagcaatttcattctcgagatattgttgaaaaaatagaactgctgtcaaagatggccattggcactcctttcactctacctgatggtgataagggatcctctgttgatgggcattctgagtctggtgtggctatgaatgtcatagacgatgagcagaactcaaattcaaattcagtatctgatgaagtaaagagcaaatatgaggaactgaataggagattctgtgagctggctgaacagaacaatatgctggaacaatctctagtggagaggaacagtcttatacagaaatgggaagaagtccttggccaaattagcatccccccacagttcaggatgttggaagcagaagataagttagcatggttaggaaacagattcttggaggtggaacaggagagagattcattacagttgaagattgagcatcttgaggattcctcagaaatgcttattgctgatctagaagagtcacataaaaggatatctgaactcagtgcagaggtggttgctataaaggctgagaaggatttcttttcacaaagcctagagaaactgagatttgagttccttgggctctctgagaaagttgttcaagatgagtttgttagagataaattgcgaatggatctatctgaactgcgggataagttcgctgaaaaaaccgaggagagcaggcactaccatgaaatggacaccgaggtccacaaactgctgaatttggtgcaaaacacattgcaggatagcactaactctgaaatttcatctggaggcatttctgctgtgttgtgcttgggcaaaatgctgaagaaacttttagatgactatggcactcttctgtacaagtcgactgaaggcaattttgccgagagagacattcagttagaggatatcaagccatctaaggatgcctctaaatcggacactggtgcatacgagaaagagatggaactaaattctttaaataacgagttagatcatgctcacaacaatctggccttagcgcaacaggagtgtgatgaagctgtggagaaggcacaatcactaatgatggaaattgagaccttacatgctcaaataagtaaattgcaggaaagtgatgctgaacaaatgcaaaagaaagagatggaactaaattctttaaataacgagttagatcatgctcgtaacaatctggccttagtggagcaggagcgtgatgaagctgtggagaaggcacaatcactaatgatggaaattgagaccttacatgctcaaataagtaaattgcaggaaagtgatgctgaacagatgcaaaaatatcagtcgcttgtccttgaactagaaagtgtgggtaagcaacgggacaatctacaggagcggttaaatcaggaggagcaaaagtgtgcctcattgagggagaaactaaatgttgctgtcagaaaagggaagggtctagtgcaacacagagacagcttgaagcaaactatggaagagatgaatgtagtgatagagaaacttaaaagtgaaagaaaacagcacatagaatcacttgagaccgagaaatcatcgttaatggatcgattggctgagaatgaaaagagcttgcatgaaacaaaccagtacttgagtggactattaaatgctttaaatagagtggatgttgctcgggaatttgatatggatccaatcaccaaggttgaaaagatggctaaatttttccttgacctacagtcaacagtggcttcatcgcaaaacgaagtgatgaaatcaaaacgagcaacagagctgcttcttgctgagttaaatgaagctcatgaaagggctgacaacctgcaggaggaattggtcaaggcagaagctgcactttctgaatcttctaaacaatacattgttacagaatctgcaagagctgatgctgttcgtcagcttgaacttattatgcatgcacagtcacaaacaaggaggaggcaagcagatcatttgctggagttaaactccaccagcagtcaactaagagaagtctgctttgaactttcacactgtcttgttaatacattcagtaaggatgtggaccttatctgctatgtggtgaacttcatgaggtcttctggtaaattgatggatgacacaaatacgatggacataccgattgcctctaaacatgttttgtccaaccgcacaaacaacaagaaggctcatattccaaatgctcctttggaaattaagacggatgatacggatgacagtcagtttttgcatcatcttgctattgcatgccatgctttatctgattgtgttaaggactgtaatgatctcaaaagaaacattgatgagcatgacttttcagttgaacagaaagcaaccgagctatttgatgttatgtccaccttaaagaataggttcacttctcagcataatgagttggaatctttgagagcaaaatttgttgaactacagtcagagatggaagaaagagacaaggagattatatttgcacaaaggaatatgagcttgctatatgaagcatgcgcaagttcagttgctgagattgaaggaattagtgatatatatcctggtaaacacagctatgctgttgaacattctgcagatgaatgtataaaatcaatcgttgaacagttagttatggctgtaaaaacttctcagaacagtaacgaaggtagcacaaaggagctgaaggctattgttcttgagttgcagcaggagcttcaagctaaagatgtccaaattagcacaatcagttctgatctatcatatcagttaagggtggctgaatcttctgcaaagcagttctcagttgatcttgaagatgcaagaatggagctccaaaatttggagaaacaagttgatgtgttgcagaatcagaagaaggatttagagactcaattaaatgagcttaaaaatatggaatcaatggcaagtgaacaacatggaagaattgagaaattgactgatgaattaagcagaaaagatcaagaaattgaaggtttggtgcaagcactcgatgaagaagaaaaagagcttgaaatcttggagaataaaagccttcagttggagcaaatgctgcaagagaaagaatttgccttgaagacctcagaagtttctaggaccaaagctttggcaaaacttgcaacgactgttgacaaatttgatgagctgcatagcttgtctgagaaccttcttgctgaagtggaaaaccttcagttgcaattgcaagaaagagattctgagatctcatttctgcgaaaagaagttacaaaaagcactaatgaactgctaaccactgaagagagcaacaaaaattattcatctcagctaaatggtttcatgaagtggttagaaagagaactgttgcagttcggcttccattctgagagtgccaatgattatgattacactcaatttcctgtctatatggatatgttggacaaaaaaataggatctctgatagccgaatcagatgatttaagggttacagttcaaagcaaagattctttactacaggttgagagggccaaaattgaggagttgatgcgtaaatcagatggtctagaagcttcattgagccaaaaggattcccagatagggttacttcgccgggacagagcatccaatcagcagagcagatctataaatttgcctggcacttcagagattgagcaaatgaatgacaaagtaagcccagctgcagttgtcactcagattcgaggcgcacgaaaagtcatcaatgaccaagttgctattgatgtagagatggagaaggacaagccttttgatgatgaagatgatgacaaagcccatggtttcaagtcattgactatgtcacgctttgttcctaaattcactcgaccggtatcagacagaattgatgggatgtgggtctcaggcgatagattgctcatgaggcaaccgaccttaagactcggcgtcttgatatattggattgcactgcatgctttgcttgctagttttatttgaactctgtaaagttgtagcgatgttctgggcgagtgactgtacagtactcttgtgtctatagcaagttatctaaacagaagcagattgcactaataccgtgattccttttgaaaatgttaccgaatactttagccgtattggcagctgcgagacatcttcaggatgcatttcacccatcatcctggtgcttgatcctgtctagcttagtttgtgttcaattgatacaaatggtggaagagaactgaaggaagcagcagcaaagaaccccctgtacatacatttttgtttgctctattctttgcttttagaaaaagatgggagggattctacatgctagcgactactgactacactatatggtacaggattacagatgtagccatctcctggcgagtgactgtacagtactctgtgtctatagcaagttatatctaaacagaagcagtttgcactgataccgtgattcctttcgaaaatgttaccgaatacttgagccgtattggcagctgcagaaatcttcatgatgcattttcacccttcatcctggtgcaaatcctgtctagcttagtttgtgttcaattgatacaaatggatggaagagaactgaaggaagcagcagcaaagaaccccctgtacatacatttttgtttgctctattctttgcttttagaaaaaagatggagggcattctacatgctagcgactacttactacactatatgatacaggattacagggaagtgacatgtagttttggaagttagggttttgggatggtagcaggtcatcccctcccttgagttggccccctcaatcccatcatgccttctaatctttttcgtttacatgtataacacagtgattatatcatttattgtaatccacatagtgtgcaatgggggagcttgcacattttattaacgtcaagtgaagcctgagtgctgaaagttcatgtcaggtctgatttggggagtgcgttgagccctggcgtatgctgtgaggcttcagcggttgttttgctactgttgc

SEQ ID NO: 34330 - DNA, 2451 bp, Zea Mays
cgactcccgctgatccaaatccattgagcgggagaacccgacatccaaaattccccaaaccccctcccaagtcccaaccctagccggctagcctccttccccttcagccttcacacctccgatttctcgcgccttcgtctcccgcccaatttccagaagcttctagaaccaggtttctaaccctaccgcagaatgatgctttcttgcgcctagtagcctggggcggaggcatggacggcggcggggaggggggctcgagcggcgggaggttccctattctgcaggcgaacagggaccccgagtcgaattgggaggtggacgttgccaagagcctcgaggattacctgctcaagatctgctcaggggaggtctccggcgaggacggggcccactctgtcaactttgccgaagcggcgttattactccaaggatcggttcaagtgtacagtaggaaggtggagtacttgtactcgttggtgcttcacgcgttagagttcctctcgcaaaagaaacaggaacaactggaaaatggctcagctcaagctaatcaaaacaaccctagcattattcccagtgaagaagatgatatatttattgggctagatgatgtcccagtggaaacaagaatatctctggataacaatgtcgatcgagatgatttacaaagaaaaattgtgaggccaccagcaaacctactggtgtttgaaggggactgtctggatagtgaagcaagcgagctagattcatatttgctgtttttgactttctgcaaggaaaacattctggtaaagaaaatagtgtggctcatcaaggcagtgcagcaccttctaaaagccaagccaatattttcacttccccgaatgcaagatcagtgggcacaggtcgtaaatcagcccctggaaaagtcctaggaggtctagatccaactcaggagaaccaatcttcaactcaagaaaccagtccagataacaaacattggtctgatcctgttgaacctagctttgctgatgatgttgaaatgcatcccccagatgatatagaggaccctgttggagattattctgatgacgaggatccatggaaacctttgaatccacatgaacctggcaatttaaagattcggccttacaggagagtgaaaggttctccacggggtgttattggcatttcgaaaaagaaaactctcaaatcactgtttcctattgcaaagatggttggtgtcgtcatacctgaacatgctaaatcttttgaagcacagcagtctcaggaggaacattatggttcccaatcaccccctcgttttgaaaagtttttgagatcatttgaattaggagaagaaaatcccaatgtgtttggagatttgaaagatgacaatgcatccaatactggcattaattttgattatgatgacccagacatgccaaacgacatagatattgatcttgatgttccaacatgtcctgatgagattattgctataactcccaaaggtacacaggatgacatagatacacatgaaaacctcgacgacttgtgtcggtcacatctgaatgctctccttgccagcattgctgaggttgaaaagcagagtgagatggacgctcgtgtttcaacatggaaagaaagaattgagattgccttggaagagcaggatagaaacccaccttttgatatcggttcatatggggagcaaatacttgacacactttcatcaagaactaacaatacaggaactgcatcttttagtgagattgttagcggcagaccaaagtttgagattgccagaacgttctctgcccttctccagctggtgaacggcagaagtgttgatctggataaaggaaaagccacgaatgagttggtgtgttacacagcagagaatccatttcatgtaaggcttattggtcccaaccggaggccagaaatggaggcacgctttgctcggaagagagtcaagtccccactgcaaaatgcaggcaaagacggtgagtcctccctggcacaacatgagtgtcccaacaagccgttgcgtaaaaatggcaagattccagtcaagacagcgaccaggctgaccccagatgggaaacgaaggcgaaggtcatctgctcacctaatgcagccgatcaatctggaatccagcggatgaacgccagtgcacactgattcttctaattattgtaacttcagtggcggcttcataggcaggatgagcctgtaagttatgacataggcgtagctagcgggtgtatatgtacagttcaactgtaatgctgacagggcaagatttgttcaacggaattgcccttttatagcatttgccattgtttcatttttaatccaataagctaacacgatgccaagtctgttgttgtaaactggtgcctagctgtatcgatgttgccttccgcgatttgagatttatatattacgcaaaaaaaaactatttcagaa

SEQ ID NO: 34331 - DNA, 855 bp, Zea Mays
gggagggggcaaaacaacagcggaacggaaggggggcccacggcgcctgtttttgtttaatccgctggtacggcagccttccgcctccgcctccgcctcgccatagcagtaccgccccctcgtgagcccgcctgccctctctcctccctccctctccacacctcgtcccgtcgtccccctcctcggctccggatctcgtcctgccggccgcggccggacgaggcgcccgcgacctggtccgagcctccctctcctcgccgaccgtgcgcctgtcgggactcacagccgacttacttataccgctcgcattgccgggggcttgctccgtttgtccacccgctcgccgcgccgactcgagggcggtcccggtatccggagctcagagctcggaccttccaggcgccgcctccccgtggcgttttcgatctgaggccgtgtcgcgggattggcttcgacgcttgcggcggtgatggcgattgcggacctgctgctcggcggtgacctgctgccgctggacgcgaggactcgatggccctgaggttgattgtggcttcggggaggctttactactactagctcggtagctcgctcctgaggaggaggaggcggaggcggaggagaagtacagcgcgtgaagatggcggccggcggggcggggcccgcgcagcaccaggcgccgaacggcgcctccgtcagcatcagcaacggcggcggtgccgccgccgccacgccgccgcaaggctcggcggcctccaccgccaacggcgccgccgccgacgggtacgacagcgacggctacagcttcgcgccccctacaccgtcaactttgtcaatgtccatacctcctgagcttgc

SEQ ID NO: 34332 - DNA, 2534 bp, Zea Mays
ctgcttatggcaacacgactgattgttgtagtggtagtttctcttcacaaaccatgttgcttagttatgaatttcagaacggctgatttctggcttccaagtccgaaactgcggcgtatgatcacgaaaacatgtgctatatgcttgaccacaatgaagcctggtcagggccacgctctcttcacagcagagtgctcgcacaccttccacttccactgtatttcagcaaacgttaagcacgggagcagcagctgcccggtatgccgtatcaaatggaaggagctcccgttccgaggtcccttgcctgctgaattgccccaaggaaatgcgaggatcaatccagttcatgggtaccagaatgggggccatatgaccataccgcggccacttccacttcctcgcgcacgctcttttggccggcttcatcatctggccacgctgctgcctgacgctgaccctggcactttcaacgacgacgaacccttggatttgtcgtgcgaagaggctaacggcactcagcagggctgtttgagaacggtagagataaaagcatatccagagttcacccaagtgcctgaaaatacatcagaaagaaacttcactgttctagttcacctcaaggcaccgcctgctcagcaccttctgcagtcatccagcgatctcggcgacggcaacggagtaagcacgactcgtgcccctgttgatctcatcacggttcttgatgtcagtggaagtatggctggtaccaagctcgcgttgttgaagagggctatggggtttgtcatccagaaccttgggtcctctgaccggctctccgtcatcgccttctcgtcgtccgcacgcaggctcttcccgctccgtaggatgaccgagtctggccggcagcagagcttgctggctgttaactcactgacggcaaacggagggaccaatatcgcagagggcctcaggaagggctccaaggtgatcgaagagcgtcagtcgaagaatccagtgtgcagcatcatccttctatcagatggccaggacacttacacggtctcgccgaccgctggtgtacacaaaggagcgacagagtattgcgcgctcttgccatccacgaccacgaatggcagccagcaggtgcccgttcacgtcttcggattcggcgccgaccatgactcggtctcgctgcactccatctcgcagacttctggcgggaccttctcgttcatcgagacagaggccaccatccaagacgcgttcgcgcagtgcattggcgggcttctgagcgtggtcgcgcagggtctgcatgtgaaggtcgagagcctccaccctgacgtgcacttcggctccatcaggtcaggcagctactctagcagagtctcggatgacagcaggaatggctccgtggacgttggggacctgtacgctgaggaggagcgggattttctcgtgtctgtgaacgttccgccaggctgtggcgagacggcgctcctcaaggttggctgcgtctacaaggacccgctgatgaaggagacggtgaacatgtccggcgtgcaggtgaagatctccaggccagcgttcgtctcggcgcagagcgtgtcggtcgaggtggaccgccagaagaaccgtctccacgccgccgaggtgatggccgaggcgaggttgtccgcggagcgcggtgacctggccaacgcggtctcgctgctcgaggactgccggaggatgatcacggggtcggcgtcgggacagtccggtgaccgtctgtgccaggcgctggacgcggagctgaaggagatgcaggaccggatggccagccggcagaggtacgaggcgtccggccgggcgtatgtgctctcgggcctgagctcccactcgtggcagcgggcgaccgcgcgcggagactcgacggacagcgcgagcctggtccaggcctaccagacctcgtccatggtggacatgctgctgcgctcgcagacgatgagccgcccgtcgacccctcgaccagctccgcagatcaggcacgcgaagtcgttccccgcacgcccgcagccaaggtaaactgcatgcagctgggtgttgccgccgagaaggatttttgtggcgggaggacggcaccagggtatagtttgtgtgggtataagaggggatgtaggtgtaaatttggtgtggggtggtggaggtaaatggtgagaggtatgatattttataattgggggtaggggggctggtatacgtcctgggggaactgggcaggatggtggcctatttatttttgttttgttttttaatatttggtggtgacttggtatactctagtattgtactagctcctttgtgtggtgatgtacataagggaagggtatacacttggactctttgaggagggatggatacctgatcctggtccttgtccttgcaaggtttgtttcctcaacctagaaatggaagaaatggaaaaaggtttgctgccttttactgcaaatggaattaatgatgatcttgggtgcgttttcttgtggatatatcacgtggcatctcctcttggttca

SEQ ID NO: 34333 - DNA, 406 bp, Zea Mays
gtatacacttatatttagtaactgctaataaaatttgaccaacttattaaaagcaatgctcagctttaaccattaattgttgatcagccttacactacacatgaactcccacctttggtgagttcatgcacattattccccacaacttgttagctatgatcttttgtgagctcatccttgcaatatataaactcccccacaggtgaagagcaggtagtccaagaggaagtctacaacgaggagtacgagcttatctaggtggcatctccgagtcagcttgatggcgccaatgaataattattagttcgctttattgttatcatttatttttgtaagacacttccgctatgtaataatatttgtgacatttatctctatacgcttggtcattatatgtgttgttctt

SEQ ID NO: 34334 - DNA, 2135 bp, Zea Mays
cccgtcggcgaaccgatcacagtcggcgagggccgaggggaggccttttttttttttttgacgcggacgccagaaatcccgtcatgtcaggtcccgccgtcccggcgcagaggagagcgcgagccccgagaagcgcggagcggaattgcaagagcagacgagcagtgtagacaacgggacagccattgacttccccgcctaccctgccccgtcccgtccgtctccgtcccaatcggatccacccgcccgtcgtcgcctataaactctccctcccatccgcctctcgaggggcccggcttcctcccaactgccaccgatttgtttgttcggcttcggccccatctccagtcacccgttcccacttcattggtcgctgctccctccctccacggccgatcccgtgccggcgagagggaccatggcggggaaagggaaggaggtgtacgtggccgccatcgaccagggcaccacaagcacccggttcatcgtctacgaccgccacgccaaacccgtcgcatcgcaccagctcgagttcaagcaacactacccggaggcagggtgggttgagcatgatcctatggagattatagagactgttaaggtgtgtatgaaagaggcagttggcaaagccaaagatggtaaacacaatgtggttgctggtttgaaggccattgggatcacaaatcagagggaaaccactgttatgtggagtaaatccactggccgtccactgtataatgctattgtgtggatggatgctcgcacaagccctgtttgcaggcggtaggacccacttcgtggagacatgcgggttgccaatcagtacctatttcagtgctctgaaattattatggttgatggaaaatgtggatgctgtcaaggatgcagtccggactggtgacgctttattcggcacgatcgacacctggttgatttggaaccttacaggaggtgttgctggtgggcagcatgtcacggattgctcaaatgcatctcgtacaatgcttatgaatctaaagacacttgactgggataagccaacacttgctgtgttaggagttcctgttgagattttgccaaagattatcagtaattcagagaaaatcggtgtggtcgccaaagagttcccgtttgcaggagttcccatctcggggtgtcttggagatcagcatgctgctatgcttgggcagctgtgccagaagggtgaagcgaaaagcacctatggaactggtgccttcatccttcttaacacaggggaagagcctacccaatcctcccatggccttcttagtaccattgcttacaagcttggtccagctgcacccactaactatgctcttgaagggtccattgcaattgcaggcgcagcagttcagtggctgagggacagccttggaatcattcagtcagcagctgagatcgaaaagttggctgaaacagtgccagattcaggtggagtgtactttgtgccagcatttaatgggttgtttgcaccatggtggagagatgatgcgaggggaatttgcatcggaatcacaaggttcacaaataaggggcacattgctcgagcagtgctcgagagtatgtgttttcaggtgaatgatgtcctcagctccatgcacaaggatgctggagaggcaggagaagtaaagagcgcagaaggagagttcttattgcgtgttgatggtggtgctactgttaataatcttctaatgcagatccaggctgatttattaggcagccctgttgtcagaccagctgacatagagaccacagccctcggagctgcatatgctgctgggttggctgcaggagtttggaccaaggagaaggtttttgcaggtttgcacaaggagaacacgacagtcttccgcccgaaactggatgaggcgcacaggaaaaagagggcggattcatggtacaaggcggtttcaagatcattcgatctggctgatctttctctgtaaatttatcctgccagcgctcctctatctggttttggaagctgcaaatgaataaattggtcttcgctgggactaatcttaactgcttgttatttatatataacatcacgatgtttataaaagtgagtacatgaatatcctcagattttcagcaggaagtgtttttctaga

SEQ ID NO: 34335 - DNA, 2318 bp, Zea Mays
ctcagggccgcgcccgaacttcacacgaccggaccaattcgcatcggcatcgaacacctctgccctctgtaaggagacccaaccccaccgcgcgcatccatgcccccaacgacggcggtgcgtcgggctccctcgccgcacgccgcgggcggagcgaggctcaccgcggagcaagcctctggtccgtgagaagcatgtctccgcaggaggcacggcaacgcgatcggtagattgcaacggcgaagaggaggttattgtgctgttccatatggctgattatggaagttaatggtggttgagtgcaagaaaagaagtataactaacactgtaacgatcaaggtatacagaaacagagctattagcactagtgatgaaaacagtctcatgagtcgtgaaaggtagcttctacctccctcatctattatatgatttcctggaagactgctaacaggcggcaagcttcaaagatcatgttcacattgccgtatcctttcttaatcggcgctgtccttgtagatttacgtgaggaacgtggacattgagctatattatagttggaatcttcatgtttaatccttttacttaatccaacatgatgctatcttgtagaaggaagttctcattagtggatgacaaatgatcgcaagagtttcttgtggctggcgccactgtgtgtcccaggttcagggtgcttttatgttttgtgcaacagttttgggttgtagttggtgtttcttggtgcctaaacatggggctgttgtaacatttaaactttattccttattgaatgaatacgcagagcttctgacttcctgccgtctattttcgaaggaaaaatatattctttattctaaaatccttgacagatatagatgtaggttacaatttctttctttttagtatatatcactgggatatagtttgaatagtggtatttcacaatgctgatttcgtagtactttgagctattctagttacccaaatagttgtatttgttcaaaaggtggacaaaaagggtgctcatgcagtcatgtgactcaccatgatagatttttttagcttgctgaggtgctaattgctatggggtgtcgatcccattacctatggaaacacataatcatgtatttatgtagcttctcggcataagattcttcccatttgacattttgaacattgactataattttttacgcggtaacaattttttatatggctcaatgaattcagcagttatgatccaaaccttttgggcatctttttaaagcatctctgaaaaaccagcaagcagcagtggtgcagaatttactggactaattagagatatgacattattgtggacaaagtgttatgaattttaatttgggttactggaatgacaaaaaaaaattgcactcattggatcagctgaaaccttgttacaatagatggttgatttttcagaatatttttttccatttgagttgctttgcctgattctgtatgtgatttttctgtcagtaggaaaagcattggtataatactctagcaaaaacaaggaagattcagttatgctgcatatgtgttatctatattaattttatgttgtacatagtattacttacttagttataatctattgcttgccttaaacactagagacagctgtcagttctttttaaaagtttgcatttggtggcctaataattgatcagccaactaaacgactttctgtcttcagcttgatggtcactgcttgctgactggtttcagactgttgggtgctccaagggcagcaatagggcttgtctagaaagtgaggtacagacgtaaggcaacctctcattcctgatcaggcaggaaaagcatgtctctgaccaaacataatcgcttggagtgactagcggagaggtaaggtaaagctatatgctcactccagccgccagagaccagcaccaatgtttctctacgagctgcctttctgccgttccgctggctcgacccgatctttctggcatgacaccagtcaccagggggttgctgtcgtttaaactcgtctggatgcaatgttcaccaaaacgcaaaaccgtaaacaacaagctatacggccatttaaacgagcaatatggccgatttaaaataagaacatatacttttactaaataaaaatatacctttgcaaatatttctgaattaatttgacattttgactggctatggttgatgtgattcttctcttttgcttgatttgggtgattgagtgcgctaagtttttttttaaaaaaaaatatgtttatatccaatcctttccacaatttgtttagacttttcttgcattttcc

SEQ ID NO: 34336 - DNA, 618 bp, Zea Mays
tcaagtaaaactcctccagccccaccgccacctcccctcatgacaggaaagaaagcgcctgtgcccccacctccaccacctcaagcaccaaaacctcctggagttgtgcctccaccaccaccaccaagctcaaagatctcaaatgcaccagcaccacctccattattgggaaggggacgtggcaacacaactggaccaactaaaggccgtggcattggtttggcacaacaaagtaatcctcccaagaaggcttcactgaagcctctacattgggtgaaagtcacgagagcaatgcaagggagtctctgggctgatgcccagaaacaagggaatcaggctaggtctcctgatatcgatttatccgaactggagagcttgttctccactgcagttgtaaccagcacaagtgaaaagggggcaacaagacgtggttcagctattaacaagccagaaattgttcacctggttgacatgcgacgagcaaacaattgtgagataatgcttacgaaaattaaaatgcctctacctgatatgattgagaactgcgccccattatatattaagcagataaagaaaaggtctatagaagaccctccttacggaggccaggcatacaaa

SEQ ID NO: 34337 - DNA, 1387 bp, Zea Mays
ccaagctcgcattccttctcgcgccatgtccagtgctcacttgctcagctcagaggagacctttgaccggtccttgggagttccagtgcttctgaatttaggagggaatatgatggcgcctcccttcagatgaggatggcatattgccctgctgcccactttttcctttttcttgtgcagtggacagactgcaaccttgctggtgcacttgggctgttgaggattctaatttataaggtttacgctgatgggacaaccaccatgtgtactcatgaaagaaaagcaagcattagggaattttatgctgtcatatttccctccttgatgcaattacatgaaagaatcaatgaagtggaggatagaaaacagaaagcaatatgtctagagaggtacagaagacgagatgaggatccgaaaactgtggtatcagagattgatgataatatagaggaggaatgtggcatatgcatggaaataaatgtcaaagttgttcttccaacctgtagccacgctatgtgcattaaatgctatcgtgaatggtacgaatctgcactcccgtttctaaaggttttgataattttagctattatgttgttcagacagttatgcactcctgcctgctcaagatgaaatactacgacatgtggaataatttctagtgtaacatgttgggatacatgtatattgttatgaatgttcaatatgagggcactaggcctgaatatatacaccgagaggatagagaccgtgtacaacaaggacttcatatatgagacaacatacaacaagacatatgcatagacatctaacacccccctcaaattcaaggtggatcaaacataccaaatttggagagataaaacctatgctaagttgtggtcttcttcttcttgaagaaatcaatgaactaaagctttgaaggcacatagcgaagatcattcatatcatcctatggtggctgcatgtggacctcttcacgtggctcaccattgagaaaggcattcttgatatcaagttgagagatgaaccactcacgagcaagaagagtgcaaacaatggtcatgtgagcaataggcgtaaaagtcccatcggtgtcatgaccatgttcctgttggaagccacgggtagctaggtgagccttataacgctcaaaagagccatcagagcaggtcttaatctttatagacccacttgtgatatggcagacatgtggtggacaaggaacaagtttccacgtgccggtacgctaaagagctgcaatctctttagccattgcatgttgtcatttctaatgaagaataacatcatgataaatggttggctcaggaagaagagtagcagcaaaacctaaaggaaagtattggtcaggttgctaacaaaatgatga

SEQ ID NO: 34338 - DNA, 4107 bp, Zea Mays
ccttccctccctttcgcctccactcctatggcggtgccgctgcctcagcagccgggcccctacacctccggcagccttggctacttccacctccgtctcgtgggcccagcccccgcattactcctcgtgcgcaccgaccgcctctactcgctctcccactcccgccgctgtggctaccgcttccgcctccgcctcctcgccaatcctcaccgccggcgcgcccccgacctcctgctcagcacctacggctgcgaccttcgcctcacacaccgatctggcatcggctctccgagtgtcaatggccgtcccctccgcgcggggacccccaccgagctggccgttggcgacgaggtatcggtgctgcgctgcggcgccaggtacgggttcatcgtcgagaggttcgtctcatgcggaggatttgaggttgatgcggcttcaacggcggggtcctgcgctgagggtcttgtttttagggccgagtctctgcggaaacggctgagggcgatatctgagagcgaagatcctctttcgttattaagggattgttctggaattggcaacctggatgtggatattggacctaaaaaatggaggcaggatggtgctgctgaattgtgcctggacaatccaatcactcccgcttctaaggagaatgtgctgcaaggtgattgcaattttgagcgagacaaatttgaccacgactttgatgttgtaaatgatggcgacccagagctctttaatgggagtaaaggatgcagagatgacagttcagagaagccaggatgtggaagcggtaacgaagagcagtatcacagtgagggctgctactcagatgggagcacattcttcttgaatcgccttgcggatactgggtctaacacgcaaacggaaccacaaagtggtgtgacacttccacagcttctccatcctgttaacagtttggtttctcaactattgcaagattccccagcatctaccagtgacaatagcatgccacaacaaggagagatgctggagtgcaagcagtgaaaatagaacagcagcgcctttcgaaagccatcctaagctgctactagttttcccccgattccctgaagatatagcatttggaaaggacaggaagaagcaaggagttgcttgccaccatccaaagctcatagtgttacagagggaagacagcatgcgtgttattgttacttcagctaacttagtaccgagtggcatctcataacaaacactgtgtggtggcaagacttcccttgtagaacttctccggactatgcagcactttttagtgcagccaagaaacaaaaatctgattttgctgctcagttagtgtcattcatagcatccatggtcaatgaagtccgtagccaggcatattggataactgaggttgctaagtatgactttgaaggagctggtggctacctcattgcttcagtacctggaatacatgcacaaagtccttatttggagtccaattatttcctctcagctaaacataatgtacacacaaaatctgcacataggatgtcttttggctctgttcaaacgtctgtagttggcatatctcatcggtttcacatcccatcagatgctggcaaacaactgagagccttatctgcatttcttggaaaatgccgtgaaaatatgtatgggactactgaagtgatcctgaagaggaacaccaatatacctgcagatgctaatgctgtgagtgttcttgttgctgatctggataaattttctgaagaagattctgtccaacttggtttcttgcctagagaggttgctaagtgggtagctcccctcagtgactcaggattcttcgatttctctggatttatctaccctagggaagccctggaggctgcatttggagtaactaatactaaagtacagttgcttctatatgtatcaaagggtccagagttttctcaaatttcaaggctgataagcaatgaacattttccaccactctgctcactgatagcatccttgcagcggtgccttggactttggcggttagaagaggtgtataattttatatgatgaaattatgtgcatctttgataaaagcatgtgatatataaactaaactaacatttgttaaggtgatcatattatttggtgaaatcagtgtatacttagctgagtttgttaggtggtatctgtagcattcctcaggtcctgagttcgactcctcgtgggaacgaatttggctggggctaaaaaatcccctcgtttatcacacgacaaagcacagatctaaggtctgacctggtcgcggtcactctcatatgggctacggtgccactgtgtagtggtatgaagctgatcgccataacctaatacatttttaatcgtcaaaatctagagaaatacttccatttttcttagttggaagacctttgtattgccttttgcatttgtgacatcaaaacataaggagtcaagcaacgaatattacgtcttcagttgtttttgcctcaccgctctgcatttgtgacatctaaacataaggagtcaagcgacgaatattaggtcttcagttgtttttgcctcactgctctgtaaggacatataaaattggtatttgtactttctaaggttctccttggaatggtagagttttacagggaaccttcaatttacaaaggaatcaagaaaattttctgcctttcaatcagagcctaaaacagagaaagaactgtacattcatcagaatcaattcagctttcacacttatttcttgttgcttgttcagtttggtttcttgaattgcactttgtattggcaaatattaagtggcctgaaacactcgaggctgattttatctacagtgcttcatcaattgggacttcaattaatccacagttcattgcaagctttgcttctgctgctggtaaacgacctcatcaagatttcgactctcaagaatctgatccagagtggggttgctggacagcaaaccatgagctgaagaagccatcaatcagtctgttgtttccaacaattgacagggtgaaaaaaggggcttgtggaattcaattgtgcaggaatttgctttctctacctgagaaaacatggcaaagactgagatctaccggtatatttcatgatgcaatcccgcaaccaaatgccaggatagggtatcctatgcatgttaaggttgctcaaagacgcttcaagtcttgttttggtgagcattcattcggctggacttattgtgggtctcataacttcagtccggctgcatggggacagccgctgtctcctccctccaaagcaaatcctagcaaagccagatcagcaccttctagtccaatgctacacatttgcaactatgagcttggcatcatactcattgctctgccaccaggcatgtcaaagcatgcaagtgaaagtaggcacaggatcgaggacatcgccctgccctttgttgtccctccaccgcgatataaggggagtgataagccagccactcggctagccatgcgagaggctgtggctgaggcttgtgttctgcagggtaacgatgttgtagatttgccagatgatactgacgaagatgtgccagatgaagacgatgagcaggtggttgagctatctgattgttctcaacaagagaaggaagaagagaagatttacgcagagacgttatgggggcaggtagattcttcacagagcctggaaaaggattaagtgaagctggcgtccagttcttggtgtagtcctatggatctatttcgccctgatagttcaatggagagggattataaaagagagtacagtacccaaggttgatatgacagtcatttttgaaaaggtgttggaagcttcggattcgcatattacaagcgaactgaactttgtgaaggactgttgtattgtctgtcgaccaggaagagaggcggccagagccacgattcttcgttgccccatttttaatgtttacatttatgttgtgtagatatcatgtaatgtttacatgcattctattttttaagaatctattcttgcattgaaaaatatggtttgctcattcaactaatgagagaatgtatacatgatctgctgagtgaataacatactgaaactgta

SEQ ID NO: 34339 - DNA, 75 bp, Zea Mays
gaggtttgggacctcacgggtgtttacgggccccaactggaaaatgaaaaaatgatattcctctctgagctccgt

SEQ ID NO: 34340 - DNA, 2624 bp, Zea Mays
cgtcgccccacccccgcgcgcgtcttcctccggcatgcgccagcccccccgagctcgcccgcgcaccaatctcgccgtcgggtatcccgcccgcgagcccgcgcaccaagctccttccccgcgacaagctccctcccccgcgacgcgtcttcctcctcgccctagatcgccgccccagctctctcctcaccccgcaatccccgccgcccatgctccgctctctactcgccccagatcgtcgcccctgttcgcgtggattgggtaccggtcccaactatctccatggattgcgcgtccgcgacaacccaatctcctcccggtctccatggaaggcgcgtcctccccccgtgattctcgattccccgcgtccgcgccccagatccactctcctctctcccacaatccccacggactctgccccgtatcaccaccccggctccttagaacgtgatccactctcctctctcctgcaatccccgctacctcaacccagatcgccgccctcgctctcgatcctcgcccacgctctccatggaaggcgaggccgcgatgctcgcgtggatctatgtagaggctgcgacgctctcccaggaagactactgccagtgctccgtgctccatgcgccgcgctggaacgccaccgtgcggtccatgtcctcgtagtatcgcccagactcgcccatgtagtcccacctgcatccaccgaccaccaagcacactctcactgcagaccagagaggattgccacgaataggtgtgtgcagttctactctacccctgcatcgagccggtgtgcgtccaccagaggccggagttgaaggagagcacgtcggcgtcgcgccatgactcggcgttctcgtagatgtcgtccagcatcagcacctgcttcccctggaccacgtcgatgtccaccagggtccacggagacgagctgcgtcggcgactgcagcgcggcggcgtgcagcaggcagacgagcgactcccactggttgcgccccagcgagtcgcccacgaacatcaccgtcttccccttcatccgtgtcaggaagaccgtggcacaacgcctgatgtcacgttgtcccagcggcgccgcggccggcgtcacgccacgcggatggtcacccacgccacgtccctagaccggtgtggtacgccggcgcccacagcgtcgatgaggaggaggtcggagcagcagtagctgtcatgggcagtgccgcagatgtggagcagtcgaatgagaggctagacgggctggagcaccacagcaggctggtgtcgctgttggccggtagccgctcctcccccaccggcaccgagagggacttgtgacccaaggatctgttcccgggggatgtggtgtttgcgctcgtcgatgatctcaggctcaaccactccaaggacccataggccatggggttatgcaatccaaaggtctccatcgccaatttcattttgtagacaaataagttagctcttctgatggcataccatttatagattgccaacgatctgaaggcatatatgaaggcttgttatctcttctgtgtttaattgatcagtgactttgatttggacctggttatcagcttgttatttctatctgaattttctcgctttatttgtactacactcgtgctaattatgtgagaatgatttgtgtcactatggtgttcatctgttattttatactattatatgtattcatctgtcatgttgttgaactcctgttatcaattgcagaaggaaattcctgcttgagccaattacagaaggccctgatatttgtcaaattgatggttgtagtgttaaattggaatacaagaggaggcaagtcaaatatggtaccaaacggcgcagcagcagttgatgtgcaacccgagtgtactgccgctcgaggaggccagtaagtgccaacaacatgaatagccaaagcagggaaatagggctggcgggggcacatgggtaacttggtcctggagcattggagaaggagcataccacaaggaaaccaacacgcttcttactctagcagagttccttgcttcctgaaggcctcatagctcagattactgggttaacgaacaactcatactttgatggagcacatgaggttcgacattatgtcaggaagcattcgaatcttggtcgtattgtgcttgaagttgctaaggactcgcaaatcccccgccaagcaaactgctagaaatcttttcagaggtggagatgatgaagatgatagtgctgatgccgacacaaatgatcctgttgtaccttggtcattaggtagagtaggagttgggcatatggtgtacatctccggtttgacttgtgccttgagttcaacaaatatgaaagtgctgagagaggtggcatctagaggacgtcatgtcgaacgtgtgaagaatttttttagaaatatgtatatttgtgcgaaactttttagaaacttgactccattttattttctatgttactctcggctttgtttcctatcctttccaatgacttgctatgcatttgcactgtatttggcatgtttaaaactgctacacaaaacttgctatatattttgtccaaaaatactatatccttgttatgattgattgatctttattttgtctgct

SEQ ID NO: 34341 - DNA, 1099 bp, Zea Mays
actcggctcttgccgccgcctctgttctcgattctcccgcctcgtgctcgccgttccgcgcttcttccctacccagtcctacatcacctccccgtccgcctttggcccgcaaccggcggccctcgccgctgatggactcccactcccccacctcggcggcaccgccggcagctgctgaaacggcgcggtacacatacagcccgaggctgcggtggcagccggaagtggaggagtacttcaacacggcgtacggccgcgaccactttgcccgcatctctgaggccctggcgcatccttcttgttattcttgtatccgtgtcaatactctgaagtcttccactgatgctgtcatgcataaactgctggatttagtatgcaaaaatgagctctctgctgtaatcaatggattggaggttgttgaactgaatggtggagaccaatcacaagaagggtgctctctggtccacaagtgcccctatgcgggccttgaaaatgttttgtttgttcagggatcaggaccacatgtgctgcattatggtagccaaccagatcaagctgttaaggaagtagttgtaagtcgaaaatgtgcagagtcagttcttcggggtgcccaggtgtatgttcctggtgttttagcatgtagttcacatgttgaaaagggtgataaggttgcagtgtcagtcgctattgagcagcctgtcaaggaagatggctgggctgtgggcataacacgaggaaccgttttacaaggattgcaatcagatgcacattatgaagaaaggaagggtctgtacattggtcaaggaactgctgcaatgtcaagatctgcaatatttcgtgttcctcatgggattgcagtagagatgactgagagggtatacaagctcccatctttcaatgatgtgcttgaaggggaaatatttcttcagaatttaccaagtgttgtgacggctcgtgtccttgatccccagtcaggagagcgaatactagatatgtgcgctgctcctggaggaaaaacaacagcaattgctatccttatgagggacgaaggagaagttgttgcccttgatagatctcacaataagactattgatcttca

SEQ ID NO: 34342 - DNA, 2808 bp, Zea Mays
cgccgggcctggaagcttctccgcggcgctgcgtcgccagctcgcagcgatttcaaggtgctggtgaatctggcttggccacatagatcttttttattgttgtcctcagaagacaggtttgctgagactgctttctgtctactgtaaattgatgaaattttggtgatcatatactatggaaaaaaagacagttcacgttccggctgagggtaatggtgagattgaaaatggtacgagctctagtcagaatcctgagacccttgagcatccagttttgctgtctgcatctcaaactgtgccaaataacttggggataaggaaaaactataaaagggcagcaaacagaggtaaaaagggttcccaaggactaacaggtcaggcatatactttgaggtcatctgatattgatgtcagggtgcttcgctctacatcaggttcaaagacaacatctactgagcatgtgcagcctccaggacaaccagctgccaagagaagaaaaaggagcagagcctcaaacaaaaattcgacagatgagttctcacaaattcgtaaacgggttagatacattttgaaccgaatgaattatgagcaaagcctaattgaagcttatgctagtgaaggctggaaaaatcaaagtttggataagataagacctgagaaggagcttgaacgagccaaatcagaaatcttacgatgcaaattgagaatacgggaagtcttccaaaatattgattctcttctatccaaggggaaaattgacgaatctttatttgattctgaaggagaaatatcttgtgaagatatcttttgtgctacttgtggttcgaaaaatgctacattgggtaatgatatcattctctgtgatggagcttgtgacagagggttccaccagaactgtctaaatcctcctctgcgtactgaagatattcccatgggagatgaaggatggctctgcccagcatgtgattgcaagttagactgtatagatctaataaatgaactccagggcagtgacatctccattgaggacccttgggagaaagtttttccagaggcagctgctatggccaatagctctaagcaagatgaagcatttgatcttccatctgatgattcggatgacaatgattttgaccccaatatgcctgaagagcatgtggctagtaaggaagaaggatcttctgaagaggaagaggatgatgacggaggatcagactctgacgactctgacttcttaacctgttctgatgatttggaacctttgatagataaaaagaatgttgatgacctgggattaccttctgaagattcagaggatgatgactatgatccagcaggtcctgattcggataaagatgtcgaaaagaagtcaaattctgatgagtctgatttcatgtctgactcggatgatttttgtaaggagattaaaaaatctggtggacatgatgaagtttcatcgcctccattacccgatgtcaaggtgggtgatatggaaaagaacactgctcagtctaacacaacaagttctgctgacgaccctatggagactgaaatagaccagagtgtggttttaccagtatcaaggaggcgtcaagctgaacggttggactacaaaaggctgtatgatgaggcatatggtgaagcatcatctgattctagtgatgaagaagaatggtctgggaagaacacaccaataaaaagcaatgaagagggtgaagttggttctcctgcaggaaaaggctctagagttgcgcaccataatgaactgactacacaaaacactaaagaaagcttgcattctcttcatggttcagtagatgagaaacatggagatcttacttctaatggcagcaatatcaaagataggaaaggacattttggtccagtgattagtcaggtcaacagatggtttgaaaataggcgtcattttgcaaggttagcttcttccaggaaaggcatcagtccagataagcatagcccccaaaatactaatagcccagtgacacctagtatgcaacctaaagaaccagaggggactgtgatggaagaatctaatgtatgcataaacagggatgctaccatctctaaaaaagcggtttcttcaaaagtcggatcaagaaagaaccttagcaagagttcccctaaaagccgggtcagaagttgattctgccgcggatcagaatctgtggcctgaccttacagagaaggcagggcaggcaaaaagcaatacagcaggagttgaagaagaaaatgggacgatgaagtttgtagacaaagacatgagccagaatttggactgctcctgaaatttgcaggtctatgggccttgaaacttggcttgtatgactctacactggtagccaaaaaacatagatataccattgcaagtcagctagctctcattagatcatgccaatcaactaacaagcacgtcattcagtttttttcttctttttttttcctgtgggggctattgattcccgttctttgccaactgagggcttcctctgatttctgggtcgctctataggtattagctatcctacagatttgtttgcagcaattactgtcattgcaggaagagctcaattacaaaaccctaaggttcagtaacgacagcacgatgctgctatgacaggatgcagaagatgcattgttttcatcgatgttgattttcttgtaagatggaatgttgtaccaaacctgaacagatcactttgttgtgattcagtgtgcggctatggcctatggatttgtacttgttggactcacagagcatcgcgctttacatgcaaacggattttcggt

SEQ ID NO: 34343 - DNA, 1449 bp, Zea Mays
catcttcactacctgcctgtgcttgctgatacttattaggccccatcctgctgtctggcgcctggtacatggactggctgtcgtttacctcgttgctcttaccttcctccttttccagaatcgtgacgatgctcgccagttcatgaaacaccttcaccctgatcttggagttgaattgccagagagatcttatggagctgattgccgtttgtatgttccagaaaaccctaaaaacaagttcataaatatttatgagacattgtttgatgaatttgttgttgcccatatccttgggtggtttggcaaagctgtgatgatacgaaatcaacttctactttgggtattgtcgatcggctttgagctaatggagacatatgttgccaaactttaatgagtgctggtgggatagcattattttggatatcttgatctgcaattggtttggtatttgggcaggaatgcacacagtccgttactttgatggcaaaacatatgaatgggtcggactgagccgccaacgaagcatcatgggtgaaaagatcgctgagccagttcacccctgctcaatgggacaaggatcagtggcatcctttcatggggccactgcggttcatccaagttctgttcctctgtgttgtcttcatgaccgtggagcttaacacattcttccttaagttttgcctgtggatccctccaaggaatcccttagtcgtgtacagattgatcctctggtggctgattgccatcccaaccatccgcgagtacaactcctacttacaagacagcaaaccggcgaagaaggttggagccttctgttggctctctctggctatatgcatagtggagctgcttatctgcatgaagtttgggcatgggctatttcatgacccaatgcctacctggctgatcatcttttggagcttggttgggattgcacttgtggttttcttgctttcatggtcatggaggagtcacagaagattcaggagaaaacggctgtgatagatttcaataactcaccttagattctttcaattcgcttcttttcttttccctttctctttctttttcatttttatatacgatatggtatgatatgatatgtgatgtaacctacgttttagaggagccccatttttctgctgctcctggcaggggactcggtttgtcaggataggtcattgttgtcaacatgagattgatgaataatcaaggtagctgcagcatcagcaccaagtgtaattaaacagtaaagcaagatcactgtgcgtgaattgggcttaccaaacttcttctgggccagtaatgcacagttgtgtaataccacctatcgctatcttggatggtgcatcatttattcagtttgtctcaccggtccagtcgaaggtctatgacatttttctcgaacatgtaaaatatttatgcatcattgtaattgaggtagaagat

SEQ ID NO: 34344 - DNA, 838 bp, Zea Mays
aagcaagcagcaacaccgccaaaccctaaacaccaaagccccgcatataaataccttcccctcccatcttttcccctctcctgccgccgccgccgctcccgctcccagctcgtgttccgcttcttgcagccgtcgccgcgaagcgctccagagaacttccgtcaacatggggaagacaaggcatacaagaagagccatttgggcaatgagtggaagaaacccttcgctgggtcatcccatgccaagggcattgtcctggagaagatcccaactccgctatccgtaagtgtgctcgtgttcagcttgttaagaatggcaagaagattgctgccttcgtgccaaatgacggttgtttgaactacattgaggaaaatgatgaggtcttgattgctggatttggtcgtaaggggcacgctgtgggagatattcctggtgtccggttcaaggtcgtcaaggtttccggtgtgtctctgcttgcccttttcaaggagaagaaagagaagccaaggtcttagattgctcttgctaccaaaatcagcaagcgtggagttgaaacgggagggcgttagatgattaagaagaatggttgcttgctatgtttgcagtgcattcgtgcaattgttaacctaagattttgttggtgaaaacgatttcttttcagacttgcttctgttgagtgctatcattccatatcaatgtacttcctcttctagaatttttgttgcccgcaagttcatttatttgttgtccgccagtttattttttaaactaaaacgatacaaataaaaaagaacagagtgtaattgctttgtacaattgcatatcttgatagagctta

SEQ ID NO: 34345 - DNA, 1154 bp, Zea Mays
caaaacccaccaaagccaaggacactgcaatttacacaaacaccccttgctcgccgcctatttgtattttccgcgcttctctccttcgctcttttcttttttctccaaaccatcgtcggctgcggcactcctgaagggaggaagccccaagcccttgccgccgcagctgccgcagccagcaacgaaccgtacataggcagggacgaagcgatggagggagccaatggagtcggtgggtcggagtccgagcggaagccgctgtcagaggtggtcggcgactgcgtccagcgctggttccaggacgcgtacaaggaggcgcgcaaaggagacatcgccaaccaggtgcttgtagcgcagatgttcttctcgggttatgggacccccaagaacgagtacaagggaaaacaatggatggatagagcatcaaggttcaggtcttccgctttgaaggttggcatgaaacgtccaggatacaatgcaagtgactcagactctgatgacgatgcaaatgatgacgccaaccaataacactcaattacaaattgagttattagttaggagattcacagggagggacccaattacatacccacactatattcaagacatgcgcatcaagttgacgagtataaggtttccagcgccttctaagtcactcttggagccatgaggtattcgttagcacgtccgcggtcttcgatcgggtcctcgttgtgtggccttcgaaatccttgatggacaagacaaccataaactcaatcaactatattgacggatctaactcccatgggggtgaagtcttcacggtagacctcatgaccttcggtgaaccctgcattcataggaatgaagcctaacaatcgatcagacagtgttgatcggaccagtgatcaaggtcttgctgaaccttatctccaacaatgtccctctaggacgaggctcaacttgatgtctgatcatagaattgtggcattttgatctagagtagggatcgatatattatgtttcaccaaaacaagagtcatcatgcatgaatcttacggaagaccaaaaactttgttcccgtcacatgccgatcttttacgtcagcacccatggatttatcggtaacactaaaggagttgattggaacttatcaataatgttgacttgta

SEQ ID NO: 34346 - DNA, 663 bp, Zea Mays
gcgtcaactctttccctcgtcgactctcgtttccccccttgcgccgtcagctatcccggtccattatcgaagctgtactgctgggagcaaagaacgccgcaatagctggtactgtggttgcagttcccacgttggttggctgccgtgtccttccttgggctaaggcgaatctcaactacactgcacaagcactcattatatctgcagcctgtattgctggcttcttcatcactgctgacaaaaccattctacggaacgcacgacaaaacaccatcgggaagcttgacaagtcaacctgatgcagagatgtagctgaagctgaaaaggttctctggttgccgcggcggttgatagggtgtcttttgccccatatgcagtggcaccatttctcttcgtggacaagtaatttttgggtgtttggctattcaaaccagaggttgttctgtaatgacttgtctaactgatggacccaactattgtatccagtttactccgaatttgaatcagaataaaaggtggttctatatgttcgtagacatggcttagacccttgttctgaacattcacttgacctggaatttgtgatgctaaagaacggggattagcgatgtgatttctttctaattaccgaatagagactagacagagcaggttaatgttgga

SEQ ID NO: 34347 - DNA, 1915 bp, Zea Mays
aaaaaaaccaggcaagcgagtcgcggttagcacatggcacgtacaaacaaaaggtcacagtgccacggtgaagctcataccatctgtacatgaatttaacgtgatagtgcaagaattgaaggagattgaagttagctgtacgtgagcatgcgagatctttttgtccgggacaggacagcgtggtgcgagacgtacgtggatattttgtgggcggcgccgtaataaatgttggacgactctgaaacggctagaagcgtggccgggaacatgcatggggtgctgtgcagttgggggcgccgcgcgccggacaggtacaggacagggcaaatcaatggacaatgggtatgggaccgtacggccacaagtcagtcaaggaacagtgctgcgtgtcagcggctcgttggcctgacatgagtgtccggcgcagaagagtgatccccacccgtcccgtggatccgtagccgttcaagttgcagtactgtgactgtccattagccgttggatcgtcggttaccgcctctcgtcgtcggaatcatcatcaacggctagctagacacctttctctgtgtagccgagccggcggcggcgagcagcatgcacagcgccaactgtgctcatcagacgtcccgaaatcacattggtggggtggactgtgacactgtgccaactgctaattgccgtccagccgatttcccatccgaaacaggcaatcaggcattctgtccgtgtgtgaggccgatttcctaccggtcctatcaaaaccccaactgccgctttgttgaatacaacacgaaaccgatttcaggaactcaaaggttaagatcgctacttcaaggaaaaccccccctgacgtaaaccgtccgtgccaagacaacgacgtctgcgtagtagatgtagatgtagattggtccctatcgccatcgcggccaaaagtcatcgaaacagaaacagttggaccgcgtgcacttcgcgccatttcgggtaaacagcaaccttcggattcggggcttatgaaacttagtacaagggaaaccttggcttttggaaagagtttacctggtggtgctcgggcagaaggtgatggcgtatccgatgccggtggcgcaggtgaaggtggaggtggagtcgtcgtaggcgtagctgtaggcgcgcgggcaggcgttcttgaagaactgcgagtacgtcgacggccggtcgtacagctacgcctacgacgaccccaccagcaccttcacctgcgccggcggccgcgactacaccatcaccttctgtcccgtcgcgccaccaagcctgaaatcgtcgagcggccctggagcaacggcggcggcaccggcaggcccgacgccgcagatgccgcggctggcaggtgggcaaggcggcggcccggacgggcagggcgtgatgctgggcgacagctcctggctcgccagcctcgccacgggcgccgcgccgccggggccggcgctccgggcctcgcccctcgtgccgctcctgctcggagtcggcggcctgctgctggtgctgtagtgccagcggcagcaacccacccccgtcacggacacgcacgcacatgcgcgtgaggcgaaagctctggtcaaagaacagcgcagcgcgggggcactggcgcacagcgaagccgtgcgctcgggttgccgccggccgtgccgacgcggacgccgatctgcccccatggaatggaagggtggtgccgtggtggctggtgtcgcgcgcgctggatgggggctgcccgtgctgggtttgtgcggggagtcgatatggtgccatttgtaaaatccgccattccttgtttttcttcttcttcttcttctttcttattgggtttgtaccgttgtgtttcacaaaagaaaggaacgtttcgcagattacagaagactagaagcaatgattatgcacg

SEQ ID NO: 34348 - DNA, 2531 bp, Zea Mays
cgcgatcgtgccgccgccttctcttcaacagcactcatctatcgcgctagctccacttcacacggtcaattcccctcgcgtaagccaagcgttggggtgatcctgaagaaaccggccggcctgcaggcgccatataatcccaaccacaccgcatcgtttggatgtgcagttcttcgtatccacaccgcatctagctagcttgtggccaagtgttcgagatagcattgccggccggggggagcaagagatatgggtagcttgggagaggtcggtgatggcaaggagatattccatggccatggccattctgaccctgtcgtcgacgagctcaaccgtctgcagaatctcctcagagaaaaggaaagagagctaggacatgcatacagtgaaatcaaaggcttgaaggtgacggaagctctgaaggacaaggctattgctgagctgagcaaggaactaaagagacaggacgagaggatgagaagtatggagaaacaacttgagcagaagaatctagaagtgaaaagactaaataacgagcgtaaagaagcattgtctgcgcagttcgctgcagaggcgacacttagaaggatccactcttctcaaaaagatgaggaatcagttccattcgacgccatcatagcgcccttggagtcagacataagaaaatacagacatgagattgcagtgctacaagatgacaagaaggcactagaacgacatctaaagttgaaggaggtggcgcttgttgaagcaggcaacattttgcacaccgcgcttgaaagggcactcatagtagaggatgttcagaatcagaacattgaattgaagaagcatatggagatataccatgaagagaataaattgttagagaaggctaacagacagaaggtgctagaggttgagaagctcacacaaacaattaatgagcttgaagagtccattctcgcaaccggaggaaaagaggacccttgagagggagctagctcgagcaaaggtttatgtcaatcgtgttgcatccacagcagcaaatgaatggaaagatgactctgacaagctcatgccagtcaagagatggctagaagaacgaaggctcctgcagggagaaatacagcgattgcgtgacaggataacagtagcagagaaatctgcaaagattgaagcccaacttaatgtaagcaagctagtgtttatataaaagcaactattttaagcaatttaaatcgaacaaaccttaaagtatattttctttaatgttggtttgtttcctaggataaactcaaaaggaggctcaagtcgcttgaagaggatatgagaaataaaacatccaattcgtctacaaaagaaattaataaacaagccactcctaaaagatcattgtctcaaccaaaacaacctaaaacaatgagagtgttacctcaactatattcacctgaagtcgttgacaagagaaggcctatatctcaaccaagggcatcaatggtagggaaagtattgaagcaacctaattcagaaatcgagcctacaaagaaaagtacagttgttaagcgatttgatagccctggaaggagaacaatttctagtaaagaagagtgtcccatgaaaaatcaactatgggcatcaaaaaccaaaacagatgttattgttgggaaagagaacaaagtacaaaagccaaattccaaggcacgtttaaatgcttcacattcacaaggccatgtggacacaaaagtatttgatggaaatgatgaatatggacttcaaaatagtgaacatcatgaagccatggcaaatgagagaaatgggaatagctcgagtgatgaaagtagcccttagaacaacaagacaagttggagtgttggggtttacttttgcatgaagacacaaaatggaagcacaaataacattattatgtacaggtaaatgttctaaattctccattatatgcttggtacttcttgaataattcatttactagttgtctttgaagttgatgtctcttttcccttttattttgggactgtggaagctgaaattcttcaagtcattttatataaaaccttatgacacctaaaacatttatctaaaactatttatttatctctcttccttacagatgtagcatgacttattttaaaggaagcgtgtgcccatctacatctattttattctgcccgggagattgcttgaacaacaaaactagttgtggtgtcatcattttgttttgtctctttgttctctcatgtacatacaaactatacctcaaactttacaaatgtaattttgtgcgactattgaaaaaatcaatatgtgcttttttgaggaattggttactttataaaataaaaaggtgtctaatgtaatagaagcaacagagaaaaaagtgaagggtgtgaatcaataaaaccatggatgttgaatgttgatgtttctcgttagctttctcatttgtaaccatgtttgagtctgtcctatcctatttgcctgtctttgagttccatttaatataaagccacacaaatccaaatgtacaagag

SEQ ID NO: 34349 - DNA, 668 bp, Zea Mays
tgaaaacccgcgcggctgtattctcttcgctgttgagaccgcgcgcgtgcgcccgaacgaagctacccgcaacctcgccgagcgcgcccgccgccacaacccctcgcggcgccggcaaatttctagggtccgtgtccaaacagccagttcacccgttccttatcttccgtggttcagccggcgtcctctctctctcgtggcgatgactgggtgacctccccgcccccgccgctctacaccaggtgcccaggtcttcctcgggcccttcgccgaagagcagccaacaggtatgcacaccccttctcttcccttcccgccgtgtgaagctgaggacccaaaccctagctgacactgttttggctatttgcgtttggatcggatctaatttcaggtgtatacatgtagtattatgctttctaacttgattttcttgcaaaataaaaacatgggtccgctcatctcccctactgggtccgcctggcatatgtaggaattttagctatcttttagccgattgaatcaacttctagaatcactacataaacttgtattcgttgagatttacttctttaggttggtgacatattttgccagattactgggtatattgtcagctatattagtttactaatggattttgccttttcttggtggtagctttaactgcg

SEQ ID NO: 34350 - DNA, 6336 bp, Zea Mays
aataaacccctccaggcatacgcgagagcactctagtctcgagcacagcacaaggccgccggtcccttctctcccactcccactactcgcgctcgccgctggatcctccacccgccgcggcgccaggccggagatccagcagctgggaccacggaggtcggccggttgctccgttcccgctggtggttgctcttcggccgctggagatcggcagacggaagcagttgacgccacagggcttcgtgctgccgaattccccagatattctgggggttcaaccgaacccccatgcccgacaacactgggcttgaaattggccttaaaggctccaagggagccccaatgccaggaacggaaggaagagtggcaaaggatttgaagaaagctcctgcctccttggaggaaagcaatgcttctcgtgatgaggatcctggcggagggcctgccttgactgggaagaaaaggaaggaccggaggggttccgcggatgacaacaggaatgtgacaagaagggtgttgaggtccgacgccatgaagctgcgtgctgaggctgaggcaccatgtggagcgggtgtggaggttagcaaaactgatagtttggagaggaaacactgtgacactactgtggaggctgaggcttgcaaaagtagtgtgctgatggaagttgcctgcaatggtggggaagccaacggattagttaacttggatgcgagcgatgtttcggaagaatcaactaggtgttctgataataatatgggaatgcctggtgttcctgcaacagatttttctcaagatggtggcttagctcaaggtagcattgcagaatcagatgataagacagtcaagtcagatgaggtgtccgctgtaactcattcagagcagaatgactcccaagctggaataaacagttataatgctgatgaggcccaagataacaaagtgagacatgggccttgtcaggatgaggtcatagactcagcaattactaatggtgccaacacaagtacagatttaaccaaaaccagccctaccagtggatcagaatctgttaagcaggatgatagtaagcaggagaataatttggttcatactgaaggagtgatactccacagtggtgatccgaaagttgagaatcattctcaaattgaggacacttgtacagaaactgagatttctttgactgggaatggaagatgtgcagctgataaccacactgatcgaactgggtacactaagcaggaggagaggggcagccctgtgaacgaaaccaatgatatttcggcacatgacattgtttttacaaggagaggtagaaaatcatgtgaggcaaagcaggggacatgtgaagaggagtcacggtttgagaagcgagttacgagatcagctacagttagacagagagaagtttctggaagcttatgcaaaactaccacgaatgagactgcactaggaagcagagggaggaagggagatattattgctcactatacaaggaaagtgagcagtgcagtatctccaaaaggtcaccatgctgagctgggagaatgtaataccagtatggagaatcaaacagtgaaacaaaaggtggttgatcgaagagattcaggtgccactaagaatgataatgatgcgaatgacacaaagaataaggaatcagaaaagacagagatcaatctgaagacgcaaccacctgttggaagtgttagcattgtaaataaaacaactgtaggagctgtttctgtggtgggtcagagtatctctggttcagccatcactgagagaaatgatacagatcatactgattctgatggagttaaatatgaaaatatgactcttgtgcagaaactactactgtctgttggcgcgaagattgttgccagcaagaagagggtattggaagcaggtcctgataaaaccactggaaggtcaccaattgctttgccatccatgaaaaagacaagaaatacgtcttctgatcctgagatagatcaacctgataagtcttctggagagaagcttattggaaataactgtgatttgggcaataaacgtgttttgagggaacggcagcatcagaatcaaacatatttgtcaagcaggtcttctaaccagtctaatcaaaatgctatcaagcagacacaggatcaatctgacgatgatgacatcagcagcgatacttcctacaggagaactcgtagcggacgtcgtcgtggtgctgcccgtcttgccgtgccaaaacaagaggactccagtgattctgaagaagttgttgttgtgaaaaagaatcgacggaaacgtaagaaatctgtgcataaacacagggctggatctaagttgaagcatacttctggtagtcctcccaaaacaggtcgtttgggtagacctccacttgtcaaatctgaatgtggctgcttacctctgcagccaggaaaagggaaaatgaatgtgcctgaaggtacaggagctctacgcgaagaaaaacaaaaaataagtgatcagataaaggccatgcttctagatgctggttggacaattgatttaagacccaggaatggtagaaactacatggattccgtgtatatacatcctagtggcaaagggtcttactggtcagttacaaaagcatattacgtgttccgtgcagatatggaatctgagcagaaggaaagttctaaagaccatattctgtcaaaaaaatctgttggtagccccggcaaaaggcaggtctctagttcttcaggctgtactttaacagatgatatccttagcaaattaaaaagagttgttgtaaacaaacgaacaaccaaagtagagattcaaaggttgagacagaagaaggaaaagaagaatactacaaattcaacaagattgcatttaggcaatgaaagaaaaaagagaggtggctgtgctctactcgttcgtggatcgaacaaggagtctggcagcaccactgatggttttgttccatatgaatggaaacgtacgatcttctcctggctgattgatctgaatgttctatcagtcaatactaagctgaactgtttggatgaaagccactcaaaggttttactagagggttttgtcactagggatgggattaactgcagctgctgtagcgaggtcatttcagtgccagaatttgtgactcatgctggttctgaagtaaataagccatacagaaacatacttgtggatgggctagacattgaccttttgcactgtctcattaatgcatggaatatgcagtctgatgctgaaagacaagatttctttcccgttagcattgagggagatgaccccaatgatgacacctgtggtatttgtggagatggaggcaatttgatctgttgtgatggatgcccctcgacatttcacatgagttgtctaggactggaggcacttcccactgattattggtgttgttccaactgctcatgtaaattttgccatgaacattctagtgatgatgctgaagacactgctgatgttgattcttcattgcatacttgttcccagattcataacatatggtatcatgagtcaggtatcctttccatgacttctgctgcggacgatgtacgcacatggcgtgaggagctcgctcgtgccagggcagatctggagcaggcccgatctgctatcctccagctagtgatctactcacggcaaaggtggagtctgactgccgatcagcggcgacaacgcgactgcaggaggctgtgcatgggttcctggcgtgacgtccagtgtggcagcggcttgccgtcttcaggctacgacacgtggcttcctggcgcggcgtcaagcacagcaagcagcggcttgccctcttcaggttgcggcacttggcttcctgacgtggcgtcaagcacgacaagcggcaacacggttgcaggctacggccttcagcagggttggccgatccttagccatgtggacagcaagaacaagtctggttgggtggtgctgtctccactggaactcgcggtagctcaggccgtaagactggtgagctgccacgtcttggcctttgcagcctggaagaggttgttcccatgggatccagggtggcatatgttaggttctttattttatttgttaataaattaaagcggagatgtaaaaggcttatagttagggttgcactttcacatgcatatcaagttagacagcaaggttgtttccatgcaccgagaacgagctgtcttcaaagggtgggggaatgtcatgtggtggcagcccagggcatggaggcccatagggataggctcagggttaggattagtgaataaagattagataagattgacttagatacttgggattagattagataaaataagattgagttagttacttgagagccgagtcttcgtatctatacaaggatgggctgtacctccttaagaagaaaaaggaatgaagaagaattagtcccagatctctccaatagtctggtctctctcaagccgactccgcctgactaccttccggcgctgtttatcacccctatgaactaggattcaaaacatatttgaactattatttagtgacttgagaaccttgtcattttaatccagctattaaaagctctactcttcttttggattgagtcgctatatttttatttctgaaactagacagttggtatttagtcataagaaatgtgtaatgcaaaaacaccatggaagttgtgtatttttgaaaatgctgtattaaacactattttttaccatcaaatcaaacacacatcctgtctagatcctttctatctatttgtggttttatttatcttctagtttattaatgtatgtataccctccctacaagccgcaactgacccaagaacttccaaacttcaaatggtatagttgcataatctgaaattactagttctgtgatgcagctgtttgaggaattgcagaatcttctcgcagtcaagaaggatcttgaaccagaatactcatgcagagttgttcaacgcatccatgaagaggtaccagaagaagtccttgctttggacaaaagagttgagtgtaactccaagattgctgttgcactctcattaatggacgagtgcttccttccgattgttgaccagagaactggcatcaacttgatacgcaatgttgtgtataactgtggatcaaattttgcccgattggatttccgtggattctatataattattttagaacgtggagatgaaataatagctgcagcatctgtccgaatacatggaaccaagttagctgagatgccgttcattggtacccggaatatgtataggcgacaagggatgtgccgccgacttgttgatggaattgaaatgatcctcagctctctcaatattgagaagctgatcattcctgctatcacagaacttgtggacacctggacatctaaatttggatttagtccactggacgattctgagaagcaggaagtgaaatccgttagcatgttagtttttcctggtacaggtcttctccaaaagccattgctgaagacctcaccatcggaagatcaatgctcccaaggagacaaaactgaaaaatcatctgatgtagtcaatgaagattcgctttgctctggtgcaagtgccgaccccctaggttcggtggtcaaagagcatggggacaccagcaaagatgccgatggtacttgcaacggtgatgtttcacagcgatctcctctttcctgatggtaagatttggttgcagctttctgggcccccccaagctttatatggacgaaacctccgtttgtttttgtacctctcgagttttgactcagcagccagcatgacaaccatccgtttggcagaaagaggcttccggttttttgcagattagttgccggggcacccctgtagttgtactcagaatttgaccattgactcgtcggcctgggaaaagaatcagcccgtgcagtactgaaaagcgtttactccaaccaggaaccagctaacttactgtgcagctgaaaagtcagtatgcagaatgtggaggataatatcacttcttttgtttttttttggtcgttaacttagaactccgagggcgagtcgtcgtaaatgttacaccagttgttattttgttaatagctttttttttaaaaatgttttcgctagcgcattcctagaaccttctcatttctgtaagatagttctcgcctctgtaagataaactaatgtatgcgcaagctagaaatagtccgcctgatccgtcacgcggaattggttacctaaaccctgttaatgtttcgttttgcatcgtgttggaatgtgtgtgttcttcctgtgaaggaaagcttttgcgggtcattatactagag

SEQ ID NO: 34351 - DNA, 1664 bp, Zea Mays
ctggtcacacacacgcagcaaccaccgagcccagcgcccggcccagccagccagggccaacggcaaggcaacaccctcctcagcccgacgccgacgctcgccgtcatcctcgtaaatccacagcgcgcgcctcccgtcctcccaggcctcacccctagcgatgcgccactcccggcgctcgtgatccatggcctcactccccgttcctcacactcttccgcgggtctcgccagcgatagtgggcgccgcgagggggagggccgcggtgcgcgtacgcactgccaccgcggcattgggcggtgggtgcggcggcggcggcggaatggagcagcgccacggggatgccccgcacagcccagtgaaggagaagcctgtaatgtcaaacattgggaaatcgactaatattttatggcacaattgcttgattggacaatctgatagacagaaattgctgggacaaaaaggctgtgtcgtatggataacaggactcagtggttcagccttttggcacacccttcacagcttggcgccaccagctttgatgatggctgatgaggaactgaagccaatctgagcttctgtaggattatgtaccaaacctggcagggaaaagtactcttgcatgtgcactgagtcgtgagttgcattgcagaggccacctcacgtatgtacttgatggtgacaacctcagacatggcctaaatagagatttaagctttaaggcagaagaccgtgcagaaaatatacgaagagttggtgaagtggcaaagcttttcgctgatgctggtgtcatatgcattgctagcttgatatctccatacaggagagatcgtgatgcatgccgtgctctacttccacattctaactttattgaagtatttattgatttgcccctaaaaatttgtgaagctcgtgatcctaaaggcctatacaagcttgcacgtacaggaaagattaaaggtttcactggaattgatgatccatacgaaccaccaattaatggtgagatagtaattaagatgaaagatggggaatgcccttcacccaaagcaatggccaagcaagttctatgctaccttgaagagaacggatatttgcaagcttagcatatgtattttgagaagattgatctgattcttgtgtgtccattacttgtggacacaataagatctgttgttggtcacatgaataaaaggcatcaacacgtaggaagtaacagaaggtaccgttcattcagaaacggaaatggattcattcgtttcattgttgatgatatttgtttcgcgtgtattttgcctgcatagctgtgattcatctgcatcagcaattcaggatgcattcggttaactcgcgttgaccgttcgcgtcaattcgggtagttgttctgtgcttgctagttgggttctgttggcaatgtatttgttacaagtaaatacggacaatgtgtgtaatttgtgtatcactttttttcctcttggaataaaaaccgaggaacattgtaacttcttccattgaattcatgcttttggcttttgctgcctctttcattgttgcagtttctgaggcagtaagaacgggtttacgaacccttccacagaaaaagctgccattttatcttgttatatgctcttttttcatacaggaagttatattctcaacttctc

SEQ ID NO: 34352 - DNA, 2928 bp, Zea Mays
aaaaagaaaaaaaaagtcctcataaactatagaggtccagttaagaaaatgaaccttttttcaacactaaggcccattcgataaggaggccgatgcgagtcaggccacatgacaaaacaaccgctcctactcttcagtggcaagcacatgttcactcgagcctgttcgcggtggagagtgatagctggggagtggagagtggcgaacccaagtggcggctacgtaaaagagaccaggaactatggggctccagctattggggcaggacgtggtagatgtagcttctgtggaggcaggatgggaccaaggcgtgaatttggtgagggcaatggcaatggtgttgagggaggttatggtggtggtggatttggagatagtggtttcccgcggagggaggaaggtgatggaaaggctatgggaagaggccatggaccacgtcagccttaccgtggtggtggtcgccgtggtggctatactgatagtgaggctggtgatgagtctggtcgcccccctcgccgggcctatgagcgccacagtggcacaggtagaggttatggaatgaagtgtgaggtgcgctggccgtggcatctggggaattgtgactgatgaagcccttgcacaagaaacagtagaaactgagggggctcctgctgtggctgaggctgaaaacaagctggaagaagcaccacaatctgaggttgagaagggcaaagagggcgaatcaactgaagtggaggagcctgaagataaggtacaagccatactatttatctcatgaaatcaatttgcatgtattgtactgttgtgggcttgtcgaaatatcatttctccctccataaatgatattgatgcgttacaatgtgaagaaactaatttctttaagcttgaagtttatcttgttttctagtagcccaagctttaatgacacattcttaaaaatagtttcagtgctagaaacgtccaaaaatagtttcaggataccggatacccttcttgcatgtaatagatagtacaagtaaaggttttatgtcttgtttcttatctactactgtcatgtttaaaaagtgtaaaactttagcatttggtgcctgctagtggtgtgccacatcttatcattcttgtataccggcaaacaacttaggttgtttctgcaatttagggagaaatattttagatgccaaatatctgcactaaaagctgttgtggattcctgtttagacattggaaaatattagacagctagctgagctccctgaagcttttcaggatagaaggctacagattataaagttgccacatggaaaatgatgtttgtactcttggttcacgtgatggaagcacatgtgatagtaattagaagttgcatgaaaggttattgaggcaactgagtaaatcctttactagggacaaatgtggtaatccgaattgttaggacaaatttaatattttaaaatagacatgtataaaatttgatgctgatttttcttatattatcaaacatattattacaaataagaatacatttttgcataaattgttttatgcattacttgctctctacaacaaaaaggtaaaaagataaccgaatttgtatccgaatccatatcgaattttatttctatcatttgaaaaaatatatgataaatttgaggtttacactttatgaatctttacaagctcaatgctaaaaataagaatatgaatttgcatagtggattctatatcctatttattcgcattcatagaaaaagacaagctatccgaataattactattttcatcctgttctcatccctgccgtttcctataacttcatgtttgctttgtgaatcaattgactcttgagtttttagcagcatataattgttgatcctctcaggtagttgatatttttaaatggtaagtgctgaaactgcagcttagatatgatttcatgtctccgatttcctaaagctatcatgcaattcttgtggtcgttgatgttgtgtgatagtttttttggaggccagccaaagctgttctcccaagtcttaactaatctcaatattctctgctaaactttcaatatgtttgtacctacaccctgatccatggagcagcataagatgagtgattcataaatactgttgctgaaatcgtagaagaccatggatttaaaaaattgacttattctccattcccactataatacttgctatcttattaaggaaagcaataatagagcctctttctaatcactaatcagttatagaactcatactgtattactatttggtttccaattaatgtggtttttattcttctcatgcacacttactggtgaaaagatgtaacaatacaatctacagatttgtcattatgcttaaattaaccagtaacatacgagtattggagtctttaccattataatcaatctggtattttctgagctgggaagatgccatctgccacatctgtgtcctgtgcaccacctaaagtatttggaactgttgcataactatgtaactgaatgaactgagtgattctgtttatttgtgcagttaataccagttttttgtgttactgacgatggaaaaatatctaggctctgcacagccgcatcgcagtgtttgacattattttcagaaattgtttgccatgctcttgttttttggtgatgatctgttactgattatgggctgattgatccagtgagtcttgcacattcaacaaattgttggctctgcaagtgctcaatttcacccagcctatagatagcttaggtagcagcgtcaaggaagctgctgcacatttatggctctctattaaaaatacgaacacacttgatctaccgtaggcatgtcacatggacatacaacatacctcagcatttttttgagagcatgtgttgtgtggtttctgtttactaattgagtttaatgagatgct

SEQ ID NO: 34353 - DNA, 1131 bp, Zea Mays
tcatctagataaatgagcaactcggatttggagctttctgtagcacttaactctaagaaagtttggaatccactagaaataacagaagctaaggagttgcttgtatcctttgaggaagaggctgattgggcattacttgggctatgttcactaatcttgcatcggtatatgacctcatacttcttgtacaacctttccaattctttatcaatggcatctatttctttttgagctcttaaggagtcataaatctgaccaaaacaccatctaatgtatctcattttgaacctagggtcaaggattttgtagcaataaccatgacattgtttctcacttcccaatatttatcaaacttgttcaacattgcatcagccatactcatcatatatgcatcacctgactgttgtgccagtttcaatgcaatcttgactttaattatgtagaggtaaaatacattggcagtgggataggttgatgctgaaaaggcagtatttgcttctgccattattcccaatattggtttgattttgtcatacaaaagccattgggagtctgaaggtttccattcgtagttgttgtctatttcagaatagtaaccaaaggcctccttatagtcaaggcaagaatctagcattttgtatgttgaaccccaccttgttttaacatcaaggcacaacccttgtcctactttaacagaatattggttgcaaacttctacaaacttgtacatacgggttggagacctcttaaagtacttcactgtgtttctaagatcagttatcaatgaatcaattggttgcaacccatcattcacaaccaaattgactatgtgggcagcacaacgaacattaaagtacatagggtcaaagctcgagttctttctagcaagaaacttggacttcagatttgtaatagcagaatcattactagaagcattatcaagagtgattgtcaagatcttatcctcaattttccattcaaccaaacattcaaaaacagcctgagctatgacaataccagtgtgtggaggatccaattcaataaagttcagaacacggcattgcaagatccaatcaacatcaacataatgtgccactaaacacatatactgaatgttttgatttgatgtcc

SEQ ID NO: 34354 - DNA, 3107 bp, Zea Mays
caggcgcctgcaaggaaaacacaagacactgacaagtgggcccattactaaccctattaggccagaccagagctgaagcagagcggagaggtctgctcgccggccatcgaatccaggctcctccaaggtgatctctctcgatcgcttccggcctcaccgtagcccgatccacgcaggctcggccacgacccgcggcctccgcacgacctggatctgacgcgcctccccctgcccccgccctccgcctcgtacttcctcgctgcggccgccgtgctcgcgctactcggcggactcctactctatatgcttccccggaagcggggggtcgacgccggcgaggaccaggacttgcacaacaaggcccttcgcgccgccgcagttgctcaggacaaggagaaggtggttgcggagatgggcggcagggcgccagagatcgatgaggacctccacagccgccagctcgccgtctacgggcgcgagaccatgaagcgcctcttcggctccaacgtcctcatctccggactgcagggactaggcgctgagatcgcaaaaaaccttgtccttgcgggtgtcaagtccgtaaccttgcatgatgatggcaaagttgagctatgggacttgtcaagcaactttttcctctcagagaaggatgttgggcaaaaccgtgctctagcttgcgttccaaagctacaagagcttaacaatgctgttatcatctctaccataactggtgatttgatcaaagagcagctttctaattttcaggccgtggtttttactgatatgagcatagaaaaggcagttgagtttgatgattactgccatagtcaccagccgccaattgctttcattaagtcggaagtttgtggcctttttggcagtgttttctgtgattttggtcctgagtttactgttttggatgtcgatggtgaggagccacatacaggaattgtggcatcaatcagcaatgacaacccagcacttgtttcttgtgtggatgatgagcgtctggagttccaggatggtgatctagttgttttctctgaagtgcatggaatgaccgaactcaatgatggaaaaccaagaaagattaagaatgcaaggccttattcttttactctagaagaagacaccacctcatatggcacttacattagaggcggtattgtcacacaggtgaagccaccaaaggttcttaatttcaaaaccttgaaggaggcaatcaaggagccaggagaatttctcatgagtgatttctccaagttcgaccgcccacctcttgtgcatttggccttccaagctttggacaagtttaggactgagttgacacgattccctattgctgggtcagctgatgatgtacagaagctgatagaccttgctattagtattaatgaaactcttggtcaggaggttgttaaagcatgttcagggaaattccatccactgtaccagttcttctactttgattctgtcgaatctctgccagttgaaccgttggagcctagtgatttgaagccagagaacagtagatatgatgcgcaaattagtgtctttggggctaagcttcaaaagaaactggagcagtcaaaaatcttcatggttggttctggggctcttggatgtgaattcttgaagaaccttgcgttaatgggtatttcttgcagtcaaaatgggaagctgactgtgacagatgatgatgttatagagaaaagcaatctcagtcgccagtttctcttccgtgactggaacatcggacagcccaagtccacagttgctgcaaccgctgctatggcaattaatcctaagcttcatgtggaggcccttcagaatagagcaagtcctgagactgaaaatgtgtttaatgatgccttttgggagagtttggatgctgttgttaatgcattggacaatgtcactgcaagaatgtacattgattccagatgtgtatattttcagaaaccacttcttgaatcgggtactctgggtgccaagtgcaacacacagatggtcattcctcacctaacagaaaactatggggcatccagggatccaccagaaaagcaggcacctatgtgcactgtacattcatttcctcacaatattgatcactgccttacgtgggccaggtctgagtttgagggtctacttgagaagactcccactgaagtaaatgctttcctgtcgaaccctggtggatatgcaaccgcagcaagaactgctggtgatgcacaggctagggatcaacttgagcgagttattgaatgccttgagacagacaagtgtgagacattccaagattgtattacctgggcccggcttaagtttgaggattatttctccaaccgtgtaaagcagctgacattcactttccccgaagatgcaatgactagctcgggtgctcctttctggtctgctcctaagcggttcccgcgacctctggagttctcgtcttccgactcaagtcaccttaacttcttgttggctgcatctgtattaagggcagagacatttggaatacacatacctgattgggctaagaacccaaagaaactggctgaagctgtggacaaggtcattgttccggatttccaaccaaaacagggtgttaagatagagacagacgagaaggctactagcctatcctctgcgtctgttgatgatgctgctgtcattgaagagcttattgcaaagctggaagaaatttttaaaacattgccaccaagattccatatgaaccctatacagtttgagaaggatgacgacgacaatgatgtcgacgtcccacttgtgtccatttactttcggtaaagaggggctcaccgcccgtttacatgttgatcctgtgcgatatttgtcaatgtttgtctcagaaggatcaagtgtataatttgcgatagcaaccgtgaactagattgtgtttaagcacatactgatgatttcctgtgctgccatctggttagacttggctgggaattgtcgctgagatttggaccactgttatggaattcttaagcataacattatgatagctgttgcatgatactgtcgtcgctaaatgttgttatcttggtatttcaatgcatgtactgctgtgactcgtattc

SEQ ID NO: 34355 - DNA, 1065 bp, Zea Mays
gaacaggactccgactcgttcgggctattccatctctgctctctccctatatacgactaggctaccgccgccgccagatgcgcaggtcttcgtcggctccttctacttctcaggcaacgagcacccggcagaactagaagaatcctctgctcggctcgaacttggaaggggggaggcgagggatggggtccctgctttgctgcatggggtgctcggaggacgtctcggcagcgccgcccgtgagctgcttgtgcctactatggcctttccattattaccacaatttgaactcgggctctgctgcttgtcacagatgtgatacacgggtggcacctgatggtggaaggagtcctcctgcaaatcaagtggattcattggatactttgggtctccctccaaggcctttgccttacgatgatcctcaatccagccctcgcatggtgcaacacccacttgtatcaggacacgacaaagcaccaacgcatgtccagaaactaggacagcctgcagaaactaagaatacccatactgggtcaacttgcacagctcataaggtttctgcgtcctcaccaaaacagcactcagaaggttcaagaatggatgatggagtacaattctgtgattcctctgacagtgaggatgactgtccagtatgcctggaagaatatgattatgagaatccgaagattgcactgcaatgcaaacataatttccaccttagctgcatttacgagtggatggaaaggagccaggcttgcccggtctgtgcaaagactatgttgttcaatgaggatgaatgaccccgccgatggaagtcttcccagacggcaagtggaagacccaagctaaatcctgcgtgttgtgtacatagcgctgatcgtttgctgaaacttacagcattgcgaaaatttatttttatagattttttcttgatgttaatgtccgcaggggtgcttacaataggttttcatgctgaaatctcaggttctgaaaaccacagctttcggttgaaatcaaatcaaatatacagactggcctctatttacaggacataacccatgttcc

SEQ ID NO: 34356 - DNA, 1598 bp, Zea Mays
cgatcccgttgcttcgcgccagcacgccacgcggcccggcccagtttgcgaggacgatgcgggcgcacgcagcggcatcgcaggacgcagcaaagccctgaaaccgcccccacgtccccctccccgcaccgcagagccagtcagaacagtaacaccggagcggcagctgcagtggccgaggccggagcacgcaaggcatggatagataccaaagggtagagaagcctcggaatgacacaccaatcagccagaatgagattaggattactactcaggggaggatgaggaactatatcagctatgggatgtcgctgcttgagcgcccctcccccgcgcccgcattgtccagcgaaacaagcacatgcaagcacgtgaagcccaactctgcatgtccgacacatgcagcttgcatgaaaatggacacgatgagattagtatcaaggccatgggacaggccataaataagacagttatggttgttgaattgattaagagaagggttggaggtcttcatcagaacagtgccactgaatctgttgatatcacagacacatgggaacctttggaagaaggccttctcccactagagacaactcgccatgtgtcgatgatcactgtgacgttatcaaagaagcctctggatacatcatctccaggataccaaccacctatcccagctgaagaagtgaaacctgcttttgactatgaccatgaagattcgtatcctactggccgtggaagaggacgtggtggtgggagaagaggcaggggaagaggtatgagcaatggtccctctccacccgcttatggttacaatgaagagtggggtgaggaaggagattactataatagagggcgtgggagaggaaggtcacgtggacgaggcagagtgcgtggtggctactatggaggcgggaggcgtggtggctacagttatggctatggtgcgagaggcgggtactatgaagagcaagacgaatactatgatgatcctgaagaatatgcccctccaggccgtcgtgggcgtggcagaggaagaagggggatgccttggcgtggccgtggagtctactactagacgatgcgatgcgatgcgatgcgatgcgacatgccaaacgggtgtgctgaagctagcaatggcgtgcttggttggttatctgttctatggagttccgacccagactagaattacccagcagggtccttccaggtgctgtgcctgtgcaactcgtctgggcaagttttgtggctcgctcgtggttttgtagctaggttaagcgagtgaagtttaatcactcggtagcagtgttttcccccttcggacggcatgcatgttgtttattttgctgctaatctacctaccttccaattttgtatggatggtgatggatactggatgcatcagtttcatatttttttttctcctggtaaatctgtagtttttataaagacggttacactgatacctgatgacaagatgaggcaggaagtttgttatgctgcagaataagagcagcatgaaaaaaaatgaatacagctatcgttgttagtgtactagcatttatcttagcgctagattagtttccagtataatcatc

SEQ ID NO: 34357 - DNA, 512 bp, Zea Mays
ctaccttgatcttgccgcaggattagatctgcatcaactctccgtcaagctggcaggtcactagcctagccaaactgtcctacacgacaggcttcgatttaccatctacgcaatcacacggtaccatatattgttgttaatgtgttcgtccgaaaaagcgaatcagtggtcgaatccatattgccaatcacgaacacacatgattggtctgtatcgcgtgctgctggtatgcatcacgtacaggaacgtcgcgccgtgccgcgccggaggtcgcacccgtgcctatgcgtgctagctcgcgtcgtcagccgcacccacgtcggaggccacgcgcacgcgcctgaagccgtgcccgcgtcgaggtcacattgtagccggaggcacgcccgcgccatgccggagcctcgtcgacccaagggatcggatcacgcacagttcatcccttcctctgattggctacctggtttttcttcaatttgagatcactgtgagccgccatcccgaggccgacc

SEQ ID NO: 34358 - DNA, 744 bp, Zea Mays
gcaaggtctctgcgacgaaggctctagtagatggatcatgtcctttacaaaggtttacaatcacaatacaagttatcacgggccgattggtcatttcatctttaagtcggtgcatttggaaatatactctgaaaccctctgattaatagcttcggctttgtgccagtcttccgaaggtgtttcttcttatggaaccttcggcgacgaaataggccccaacagtgcgcaaccaaacgggcttgctagctactagtgagctacgccacgcgcctgccgggtgatgaaacgtttaacggaacgatgatgtatgtatgtctgtctgaccgacctgacctacacgctatcgcgttagattttgcactgcacgcgatgcgacggacaacgggacaagctagctagctatagcgcgcaccggcaccggcatctatagcgacggcgacggcgacggcgacggtggcgcgcgcgggccatcttgcggtgtgcagctgcgccggtgcgggcggacggactcggcgcgcgggccggccggccggggagcgcgtggatcggagccgcgcgtcgccatcgcccgccaggccgccaccacaccaccgtcgcacacctggaccggctcggcgcaacggacggtgaccgccgagagcgaaaagccgctttcttccctttcccgtcgcgcccaagcccaaccagtgcagccaccctcgcatggcgggttttttttgaccctttcgtcgtcgttcgtttccg

SEQ ID NO: 34359 - DNA, 997 bp, Zea Mays
cttggattacgcggtcagggcccaatacccgtaattcgttatccgtaggccgacgaaggccgaaggccgaagcccaaacccttcgaaaacccttctcccgtcctgctcactcccgtctccgagcgccgccgccgccagcgccgacacgcgataaacaagaggaagaagaggccaaccgatccagcagcgatggcaggcgggggcatggtggggggcgctttctgggcgacgcgggcgctggaggtggtcaagcggaacgattccccgggcctattgtggaagcgcatcaagctcaccaccacccgcaagaacaacgccaagaagcgcctcaagcggctctggcagaatgaggcggttataagagcttgtggtgcatcagcgtctgacgcggcttccacagctgacaaacaacagtagcttggagcacaactggagcaggtcctgtgacctacctatgcttgataagctgaagccttgactttgctgtccacccccagtgttttgattttgctgtcctcggattgaatactttctccatccagaggacaacatcattgcttgttaccagctcgccaccccattctttttcgaagcttgcaagtttggttaaagacatgttggaagagtccggtgcccatcaatggaccggatgctgccccatgtactctctcatgtagtcatgtgctgcgttaacaaaacatgtggtgtgtgtggtgatggtacaaggaagcacgcaacggaataccatgctgcgtgtgccgacgaagcaggacccgattcgatccgctgatgaacgggcacacggcaagatacggcgtcgtattttattttcctcgtttcatattttttttaaaaaaaattaattttaatttcgcttttatatgctctgatggattgaaacaacagttcggtcaacgcgaaccgtaccgatattgcatagggtcccactgtgtagcacaatgctcatgctcagttcctggtgcccactgccagagac

SEQ ID NO: 34360 - DNA, 3520 bp, Zea Mays
ttccatctgaaatcctctctaaaggctaggcttatctgcacactctgtgctgagtaggagatgccaaataattcccagcagaacctcttggctggtgcctggtggagtgagaatcaaaagaaagtgccacttgcaagttgcaacagaattattgcctcaataacatgagaatgtgcatcagggctacccaacagagacattattgcgtttccttaaagctagagagtggcatgtgaataaggctcacaggatgcttgaagattctttgaattggaggatgcaaaatgaaatcgatagtatattggagaaacctattatcccagtagatttgtatagatcaattcgtgatacacagcttattgggttatcaggatactccaaagagggcattcctgtatttgcagttggtgttgggctgagtacatatgacaaagcttcggttaactactatgtgcaatctcacattcagatcaatgagtaccgagatcgttttattttgcctacagtgacaaagaagtatgggagacctattaccacctgtataaaggttctcgatatgactggtctgaaattgtcagcactacaccaaatgaagattgtgactgcaatatctacagttgatgatttgaattaccctgaaaagactgagacctattatatagtaaacgctccatacatattttctgcatgttggaaggtcgtgaagcctctgttgcaagagagaacaaggaagaaagttcatgtgttgcgtggctgcgggagagacgagcttctacagatcatggactactcctccctcccccatttctgcagacaggagggctcgggctcatccaaacattcgtcaggcgacgccgataactgcttctctctcgaccacccgttccaccaggagctctacagcttcatccaggagcaggcgctgaaccaggagctcatcaagcagggctccttgcacgtgaaaatccccgagcaggaccctgaggacgcaaagatcgtggaggtcatcgaggccgagttccacaagcttggcgtgcagaacgggtccgccaatggcatcgaccaagcatagcacctttgtctaataaggccagcctgattcaaccgagacgttgcttgccacttctgatgcaactaatcctactgtttaatttttttggtggggtgggcccacccccattgctgtttcctggggggaggggggggggggggggggtgattggtattggtggtatacatagcaaagtcatttgcagatccatccatgatgcaggactgagatagacgatatcacctgtgtaaacttgcagatttgcaatgtgtcctcatctcatatgtatgctgagttgagatgaaatgaataaatcatcctacaagttttttttgagtcatcttcagaattgtgttgtgctcagtcagaaaagtaaccatgcgtttctgtgccgattcttgctagccctaattaatataaggcgaaacagataatgcctatccattggagggattagaggaaggttctccccttagaaagattgtgggtcaccaaacaaagggtaaacgaaccgaaccgaaccgtgcatatcaacaacattacaacaaagtaagcatgctcttggttggcagtagttaccacttgataaaaagaagagggagaccatgtgctttggcttcctctctgagccatctttcttgctctagccttaggccttagcaatggagatcagcgacgagcagaggatgcaagtggagtgccagcgccttccgccttcctggcaaggcaacggatcagacgccgatgtcgaagtggatcatcatctgtggccgtcaaaagatggccctcttccaatattccttaagtttgagaacgtggagtacagggtgtcaggaggcgagaggaagaggaccagcatcgggaacgagatcctcgtcgacccgtcgctgctcctcctcgacgagcccacctccggcctcgactccacgtcggcgagcaagctcatctttatcctccagcgcctggccaagacgcggaggacgatcatcacgacgatccaccagccgtcgagccggatgttccacatgttcgacaagctgctgctcatctccgacgggcacgccatctaccacggcaaggcccgggactgcatgcaccacttctcctcgctgggcttcgtcccggagatccccatgaacccggccgagttcctgctggacctcgccaccggcaacctcgacgacatcagcgtccccgaggcgctgcgcggctcgccggacccgcaggagttcaggtcccaggtcatcaggcacctgcagctcaagtaccgggcgggcgccgaggctcccgcggggagaaggacgcccactgagcagctgcgtctggcggtgcgggcgcataacaaggaccgccgccggcggagcatcggctggctccagcagttcgccgtgctgtcccggcgcacgttccgggagcgcgcatccgactacctggacaagatgcggctcgcgcaggccgtcggcgtggcgctcctgctgggtctcctctggtggaagtcccagaccgggaacgaggcccagctgcgggaccaggtcggtctcatcttctacatctgcatcttctggacgtcgtcgtcgctcttcggctccgtctacgtgttccccttcgagaagctgtacctggtcaaggagcgcaaggcggacatgtaccggctgagcgcctactacgccagcagcacgctgtgcgacgccgtgccgcacgtcgtgtacccggtgctcttcatggccatcctctacttcatggccggcctccgccgcaccgtgccgtgcttcttcctcacgctcctcgccacgctgctcatcgtgttcaccagccagggcaccggggagctgctgggcgccgccatcctcagcgtcaagagggcgggggtcatggcgtcgctcgtgctcatgctcttcctcctcaccggcggctactacgtccagcacatccccaagttcatccgctggctcaagtacgtctccttcatgcactacggcttcaacctgctgctcaaagcgcagtaccacggccacctcacgtacaactgtgccagccggggcggctgccagcgcctgcagtcgtcgccgtcgttcggcaccgtggacctcgacggcggcatgcgcgaggtctggatcctgctcgccatggcgctcgcataccgactcctcgcctacttctgcctcctcaagcggatcagcctcacgcccttgtgatcatccacctaattaaattggggcgcaatttcgcatgcctgtgtgaatgattattcatgggaaatgcctgcatggcgatgtgtatcaggctatcagctatactttgcagactgctgggcctaatttacgaggtgtatttgtctgacacaagttttagaagaagagtgaacaatgacatagcatttttagattatataagtgtttatgctagccgttcctagttataagttgcatttttagctttattaataagatcatctagattttgataaac

SEQ ID NO: 34361 - DNA, 2335 bp, Zea Mays
acactcccattcgctcccagccgccagtacactcttctccccgccgccgcctcccctcccctcccctccctgttccctccctcacctctcgtcctcgaagcaagggtttccctgcccctggctgcctctcgtccgttctccttctctaccgccgccacaactcgcccgccgccccggcctcaccgccggcaacgtgacacgacaagcccgcccctttattcttgcagctatactccgatggccctcgtgaagtccgacgctgaggaggactggtccgactctgacttcgatgatgcctccgactccgaggtcgccgaagctctggactggctcgacgccgtggagggccctgacggctcagctcgcccccacgtcgccttcttctcggcctccggaggcggggctgcggcgcggaggcctaacgcacacggcggcgtgctgtctcgcccgctccagccgttgtctaaccggacccagaagctggcctcgcacattagtgctactcccttggaggagtgggaaggtaggatgaacgtggcgatgtcaaattccgtcacaactgcaatcagggatagcataagggacacagctattgggaaaataaggaacactgagaaggctgatcgtgctacagtggaacaggctattgacccaagaacacgcatggttttattcaagatgttaaaccgtggtgtctttaataacactgagaaggctgatcgtgctacagtggaacaggctattgacccaagaacacgcatggttttattcaagatgttaaaccgtggtgtctttaataacataaatggctgcatttctacagggaaagaggcaaatgtctatcatgcaacaaagacggatggccaggagcttgcaattaaagtctacaaaacctctgtccttgtttttaaggatagagaccgatatgtccaaggagattatcgttttagacatggttactgcaagcataatcctcggaaaatggttaagacctgggctgaaaaggaaatgagaaatcttctacgagtgagggcagctggaatccgatgccctgcaccattactcctaaggcttcatgtactggtgatggaattcatagggaaaggaggctgggctgctcctcgtctcaaggacgctgctttgtcagatgacaagttgcatgaaagttactttgagataattacaacaatgcggactctttaccaaacgtgcaaactggtccatggtgatttgagtgaatacaatattctatattttgaggtagtgaacctcatattaaatataccatttccaaacatattgtacttttcaagtttactgttccttatctctatcctgatgtacctattgcctagggtcacttgtatattattgatgtttcacaatccgtcgatcttgatcacccttcagctttggattttctgaaggaagattgcttgcatgtttcttaacggatttgtttaattttgttattgatcaaagcatttctgatgaagatgttgatgattacctggaaaaggctcagcaaaagattttggaaaatggtggtgcggttccaaatgatgatgaaattactcctacagtcatggtgcagacgttggactacgtgaagcaatgtgaggcagatattgtcaacatgtcaataatgcaacgttcatcctctggctatgagccaaccgcagataagctttatgaccaaccattgttagggtttgtgcggactaaaaacacaaacactgaaaaggagcaaggacaaccggcacgaaacttagttgaggttgaagaagacgagagcgaatcttgcttgagttctgatgaagatgattcgtggcacgaggatgatcctaaggtgggacccgaggaaaggaaggctgctcggaaggaaaacaagaagaaagtgaaggaagagaagagggaggcccgcaagaccaagatcccaaaagctgagaagaagaagaggaagaaaatggcgaaggcaaaatgcaagcggtagcgaatatctatgaacaatccagtagttaactccgtcagtagagatggataacttcgtcgtgaatcaaacaagatgatggataacttcattgtgaatcaaacaagatagcctttatgagggagtgcaggttggaagtttggttcacagcgctactttacacatcacaagattattcacgatgttttcaacctttttgttcgtttcaattttgtagagaactactgtacgtaatgtgaccacatatatgtttatcttgagtggaaccgtatagtattttttagagaagagtacaaatggtactttgtgccgctggattctttgacctagtgcaacttaattagg

SEQ ID NO: 34362 - DNA, 1162 bp, Zea Mays
taaacttgagtggtaaatggtactattgtgacggtaggatggtcgtggccataacacctttgaaaacatacttttagcgtggcagtacgagctcttgtcatgacgtttgttggtgacaaatgtgtgtatggctacgctaactatcggtgcatgtaccacatcttgctacaaagtcgggcgtattgccacatgcccacaagcaagcccacatacttggtaacgaatctctatatgcttgcgataaacgccaatagttgcaacactggttgacacgcagatcagcagatgccgctgccgttgctccatgcagctggtcttcatgtagacagcagcttattaacagtattgacgtagtttactcgctactaataacttataaaaagttcctcctgccgcagctggtcctttgactgatcaacgtaacatgaatctcactgtactccgcacatgcaacgtacgatgcaaatatatgtgaacccatgtagtacagggattgcattctgctagttaccacgagccttttttactggtgtcgcacgagctccccgcagggaagttactgtaacactgcagtggccagtgcatgcttggctttttactgctggatcaagcccggctttatccgacagcacgcacggcagtcggcagagagaaagagagaggccccacctcctgaccccaacgcagagacgcaggccatgcatgcatgcatgcggcatgccctacaccgggcggggccggcgcgcgtgtaggcgttgatccgtcgtcggccccggccgcctcgccgttgcgcgtggcaccttttgcagatctcgcagcaggacgtgccgccactgttggcacgtgcgcgcgtgtcagggcacacgtgagcggtaccaggcccagcgtccagcgatggtccccggcacgcgcgcggaggcgacgggggcggtcgagcggcggccaggccccgccgcgtcgagcgcgcgctcgatccgctcacccgaccggcgccgcgagcccgcgcggccggatgttggttgcatgcgcagcgcttggtcgcttggaccgcggacgtggcgggtgcgggcgccggggttcgtagtggccggcccggccgggccaccccccccgttctgcacacgcgcacgggcccttgtctcccgctctggcctggtctgcc

SEQ ID NO: 34363 - DNA, 1927 bp, Zea Mays
agcagcgacgcgaaaaggagcagagtacgtatggaaacccgtccagtctcccaagaccccaagtgagacggacgactcgacccagtcacaatccggtccctagtagaaacggcgagatcgtcagcgagaattttccgatgaccggcggcggcagcagcacccgccgtccggccgccgtggccaggagccgcgggaggccctctgaggcttctgaaccagatcccggcgctcgacgagccgcggccgcagcggcgcagcgccgtggccgcggcaaccctggccccttgcgcctgatggacgtgaggccccgaaccctcgcgtacttcgtggttgcttccttcgccctcgtgtcagtcacattcgtggtgtatactggtgggtggtgggaggaggtggaaggagagggcgcggcgacgctgcgaaaggtcatgcgctccgtaacgccgctgccggcgcccaggatgatggatctgcctcagtttcaaaataaccacaaggaaagtttgtattggggcacttatagaccaaatgtgtacctcggaattcgtgcaagaacccctctgtctctaattgctggattaatgtggattggcttgaaaaatggtcaatattttcttcgtcatgtttgccaagattctgatgagctgagaacatttgggtggacagctcacaatggtagggattatgggcgtcaagtgctggttgatcatggtcttttcctaactactagttttctgaaagagaaaggagagagcagtggttatggtggagactgggccgttcgattggatgctaacaatgagaggtcaggtttaagtgatgctgaagaaagcaccacacatctttttttctatattgctgatgaaactggaaatccgatcactatgggttcatatgaaccttcatcaagaggctctgttcttttggcatctgggttgcatgaggagattggtggttgggaattgtacttgagatctgaggacaatttggaaattcacagagctggattcaaatcaatgagtatgcataatctgagcgacttagtgcaacaagccgttgctactaatgcaatgcaatctggaaaccttaacctaccagacattactgaagattcttcaaatataatggtctatcaggtttccataaagtctcctgctcaaatagacatagtatttttgtcagggtccgcctcaaagtctccagtgattgaagagcggattagcaagctaacaggtcccatgctgagtgaccgtcttgaaacaaaacaaaaggaatttgaagagagatatgatcaaatctttaatgtgaacaataaggtacaggttgattccaaagagttatctgttggtagagctgccttatcaagtcttctgggtggtgttggctacttctatgggcagtccaaaattgcactcccgaaaggttttacacaaaaaaatggggataagtacatttcatattggcctgctgcattatatacagctgtccccagccgctctttcttcccaaggggatttctgtgggatgagggcttccatcagttagtcatttggcgttgggatgtgcatatatctatggatatcattggacattggttagatctgcttaattcagatggatggattcctagggagcaaatcttaggagctgaagctttaagtaaagttcccgaggagtttgttctgcagtatccttccaatggaaatcctcctactttatttcttgcgatacgtgatttagcaagtggaatacatgcacagcagttttcagatgaggaagcggaaaagatttcaagttttcttgaaagggcttatatacggctaaatgcttggtttcagtggttcaacagtacacaatcagggtgctattaatttttagaatatatttcgactgcagaatttcactttcagttactgctggtttcaat

SEQ ID NO: 34364 - DNA, 380 bp, Zea Mays
ttttatcactagccgctggctcgttactcgtcctggagacacataaatactggagacctttgatccttatcatcacgcacgcacacacttcttccaggttcttcctcagttcacgagcaccaattgcactatggtggccatcgcccacatcggcgccgacgtcgatgcttcctctacagcggtccggcatcactggacgccgtactcggcacaccggcaagctcgcccatggccgcggctacctggcacgctcacctcaaccatcatctgtaccagcgcgtgctccctgctcgccatggctggccttaccggatccgttctctgcagcggctggtttgctcgccgaacctctagcttcctcgcgctcggcttcccagtat

SEQ ID NO: 34365 - DNA, 3356 bp, Zea Mays
caaaaaggtaaatgctcgctgtgcagtgagactgcggaagaggatacaacatgaagagatgaaatctgcctaccaacgaaggctcctctctgatgcagaatcagcacgctggttaaaccatgcaatcgacaagatgtggcctgtctgtatggagaagatcgtttcaaaacttctacggcccatcataccatggttcttggataagttcaaaccttggacagtcagcaaagcaagtattcaggaactttacatgggcaggaatccaccaatctttacctccatgagagttctaccagagacatcagatgatgaccatttggttcttgagctgggattgaattttctttctgctgaagatatgagtgctgtacttgctatgcagctgcacaagagtgtgggacttggaatgactgcaaagatgcatttaacaagcatgcatgtcgagggaaagatattagttggtgtgaaatttgttcggagttggccatttcttggccgtgtaagactatgttttgtggagccaccttattttcagatggctgtgaaaccactcattaatcacgggctcgatgtcactgagtttccaggaatttcaggatggctggataagttgatggatactgcatttgggcagacattagttgagcccaatgtgatagtaataaatgtggaaaaatttgcatctactccttcagaaaataactggttcagcattgaggagagacctcctattgcatatgtgaagcttgagattctagaaggaactgacatgaagccatctgatataaatggactagcggacccatatgtgaaaggtcaccttggtcctttcaaattccaaacacagatacagaggaaaacattgtcccctaagtggtttgaagaatttaaaataccaatcacatcatgggaggcaacgaatgaacttgtcatggaagttcgtgataaggaccccatgtttgatgactcacttgggcaatgtaccattagtttacatgatctgagaggtggacaaagacatgacaaatggatatcactgaataatgtgaagaaaggaaggattcacttggcagtaacaattgatgatatatccgaggaccaaaatacatcaagtttggaccaatcattgaagcaagcggatactgaactaccagtatcaacatctgtttgtagcgaagtggatgctagtgaacctcctgaagaaaagaaagtcttaatggatgaagtggagcacataaacattgatggacaagaacagcctggaggtttatatgtacatcgccctggcactggggttccaaggacatgggaatcccggaaaggacgagcacgaaacccagacacacagattcaccaagaggttgacaagcaaaaggaagtcccaacaccaaaagggagtgggcaagggggtctatttaacgtaggctcctttttccggtggaactcgaggaaggggagctccagaaatctcgatgccagccctcctgcaactccgggttctcagagcgtgacagagcttgatccaaagctccctcaaactccacgtcccaacctgaaggagctaggcgagaagcggacgtcgataaagatcgtagtggacgaagaagcaagcccggcagacaaggtgggaggtgcggagaactcaggagaagatgtggcgaaggtgatagagaaaaatgcaggtgaaccgggcaggtcactgacaagcacattgagcaggaagatttgcagaaggagagcagatgataggctatcagatatccccgagaagattgaagctcgtggatctaagccggtgagtgaagggcctattcttgttagaggtgagccaatgataacagtggaccatccgacgacggaacatagcgatggaggtggcactgagcaagatgcggtgggagcaaaggttgctactcagacctcataaggattgcgacttaaggtcagcagttcttgttcttgtaatctttgctggtcgatttggttcgggcatgggaccttgctttctgtttatagatcagtgtccatagttgcgaagggtatccatttagaaatggctgaaaaatatagtaacaaagagcagcgtgttgtgcagtgatatacgctcatgttgataagatggctctgttagatcttgtttacttatgtaaagaaacatgaattgcatatatttcttgacataaataatgtaaaacgtatttttttggttgcattctttcctctacgcatatgatattttgcccggttttatcatgtaataatttcccaagattttcagctcaggcaacagaagaaatgcaaagcccggcccagtaaaccatcatcgtctttcacggcccatcaaagaggcatccgcgttcgcacattgcagtagcttcccacacccccctccagagccggcacgttctctagactatatttcctatcttattcattttcttctatgggataatactcttgttaatatgagttatacataagcttgtcgctgcacaataatgtaatttatagggtcttattgctgaagtatccatcatcagtacatttatggatgtagtttttagctctgatctatatatcggttgataagataagaagttttctttgaaaaggaaataatccagaataatgtggcggggtcactgttcaattggtctacaacttgtttgccaaagaattggggggccttggtattctggatttagaacgttttgcaagagcgctatgactaagatggttgtggttgcgatggaaggtcaaagaaatagcccactggcatgcaattactatgtgacaagattgatgtggatctcttcaatacatccataattgtgaacattggcaatgggaagatggcaaatttctgggatcaagttggattgaaggacaggctctgaggaatattacaccaagtctatacaagaaagcaaggaggaagaacattacggtgttcaaagcacttcgaaacaattaccggatacagttttgttctcgttacaagcaggaggaggaagtgagagaattcgtctccatgtggcatgcaattagcaacacacaagacctaaatgatctagaagacaccatatcttagcgacggacgacaattgggcaatacaacacaagtagtgcctacaaaattcagttcacaacgaacttctgtagatttaaaatcagtcccatttggaaagcaagaacggaaccaaaatgtggtttttcgcatggacgttgttgcacaacagaattgtaattacagacaaccttcaaaaaaggggatgacctttgatgaggacatcacttctatacatacaatgaatggaccgataacacgatctcgtgcacgatagctaaatctccag

SEQ ID NO: 34366 - DNA, 1748 bp, Zea Mays
cacccatccaccacaccactcgagcgcgcgcgcggcccaccgctccgccgctgcccgcccgccgccatgcgagggatcctctcctcttcctccgctctcctccggcgagccggcgcccagctctcgcgcacggactgcagtagcccctcagcgtccgcgacctctcctctccgccgctcccctcttcagaatgggaaaagagacacattttgttcgctttggttcaaaggtcgttcggtatcaaccacagggtagaatggtggagatatatgggaaagaagcatctgggaagacaacactcgcgcttcatgttattaaggaagctcaaaagaatggaggttattgtgcttatattgatgcagaaaatgccttcaacccttcatttgctgaatctattggcgtagacagtgaaaggctcttgatagcccaacctgattctgctgaaaattctctaagcattgtaaacactcttgttggtggttctgttgctgttgttgttgtggacagtgtggcagcacttattcccaaatgtgaaattgaaggtgaaatatacacaaattgtggagacatccaatcccatttgatgactcgggcccttagaaaaattcagtacactttatgtcgatctgaaacacttattatttttgtgaatcaggttagaacaaagaggacatcaagtaatcctgggatctacaaggaggtgccttgcggtggtaatgcactaggattctatgctgcagtcagaatgaggacttcaaggagagaactgcgctatagtgaagatgaggctaccggcgtaggtatatcagtgcagatcatcaagaacaaattggctccagcgaacctgaagaaggaagccggcatcgacatcacattcggtaaggggatctgccacgagtcggagatcctggagacggcttcctccgtcggagtgatcctgaaagacgggtgtgggtattggatcaacaacgagttcctggcaggcaaggtggaagcggagaagttcctgcgtgaaaacgctgcagtggcagatgagatctgcaataccgtgaggaacgagttcttgcaaaggtgacatagggcgaccgattagagaggctaatgcattgttagtcggaaatgttgtaccgtcatgtattcatagaagaagatttatgtaggatgttgctgtgcctgtcgtgtaactttgactcgcaacagttcattgagtttaccagggccattccctcccagatcatatcgttaggttcttctatgttgctggttgaattcagggctgacttgtcatcacacggcttgagggacggccaagaattccaaactgtgcgccgtgcgcggatacgtgttctgtccacagcaagcgaagtggcgtgcaagcgcccctgggaagggattgggtgcgtggacaaagctccacccttgattctgtaaccgcgtgttttgtccctgctcttctctgtcagcgaagcggaggaagcagtcatcggtgcggcaaatgacaaagaaggtttggctgcaacagcaggagatgggccgtgtcgggccaaaaggctgaggaagtgcaacccaaaggtctttgggccggcgtggctaaacagcacaaagtaatccagccgattattaaataagggttcggcggcgcgtagggtttttaggctgtaacagaactctagactctagttcttcttcctttccaagtactatctcaactactctgttctccgtctctgcattctccagatattgtg

SEQ ID NO: 34367 - DNA, 2760 bp, Zea Mays
gtcacagttggtctgctccctaccgtcgccgtttccgcactttcctcgtcacacaagtccacctccaccgccgcacgccgccgctcctccgcatccgcgaccgcgacctcgaggtcgccctccctccgcgccagctgcaatggcggcctcgccggaccaattccgggggcatgcgcgcctcccgcacttcgcggccccgctccgctacgacctccgcctccgcccggacctcgccgcgtgcaccttcacgggcgccgcggccatcgccgttgtcgtgtccgcgcccacccgcttcctcgtcctcaacgctgccgagctggatgtcgatcgcgcctccatccgtttccaggatttggcgccgacagatgtggctcagttcgatgaggatgagatcatggtcatcagcttcgaccgggagctgcccttcggagagggcgtgctcaccatggacttcaccggcacgctcaacgatcagatgaggggattttacaggagcaaatatgtgtacaatggagagtcaagaaatatggcagttacacagtttgaagccgctgatgcacggaggtgctttccatgttgggatgatcctgcatttaaggccaagttcaagctaacactagaagttccatctgacctggtagcattgtccaacatgccagtggctaaggagactgtcagtggacttaccaagactatttattatgaggaatctccacttatgtcaacctatcttgtggctatagttgttggcatctttgattacatagagagttcaacatcagagggaactaaagttcgtgtttatactcaagttggcaagactaatcaaggaaagtttgcactagatgttgctgtaaagtcgctggatttatacaaagattattttgccactccttatccattacctaagttggacatgattgctatcccggatttttctgctggggccatggagaactatgggttagttacttaccgagatacagctttgctgtatgatgagctactatcatcagcatccaacaagcaacaggtagcaataactgttgcacatgagttggcgcaccaatggtttggcaatcttgtgactatggaatggtggactcacttgtggctaaatgagggttttgcttcctgggtaagctatttagcagtagaatctttatttcctgaatggaataactggacacaatttcttgatgagacgacctctggcctcagattggatgcacttgcagagtctcatcctatcgaggttgaggtaaaccatgctagtgaaattgatgcaatttttgattccataagctatgacaagggtgcatctgttattcgtatgctacaaagttaccttggtgcagagtgttttcaggaatctggggagcctgttaaggatttgatgactacatggactaagcaacaaggatatcctgttatttatgcaaaaatcaatggacatgatttggaacttgaacaggcacagtttctatctgatggatcgtctggtcctggaatgtggattgttcctgtaacagcatgctgtggctcatatgatgcacagaaaaagttcttattgaaagataaaatggataagataaatattaaagagttttctgactctcaaagtgctgatggggagaagaatcaaatcatttggatcaaattgaatattgatcaaactggattttatagagtgaagtatgatgatgaacttgcagctggacttgtaaatgcaatcaaagcaaagaagctctcattaatggataagattggtatcgtggaagattcatatgcgctctctgttgcttgcaagcaaacactgacgtcattgttgcgactgctgaatgcttataatgatgagtctgattacactgtactttcacatgtaacctctgtatgtttaagcatttctaaaataacagttgacgctactcctgacttgaacaaagatatcaaacagcttttgatcaaccttcttctcccagctgtcataaagttaggctgggaccccaaggatggtgagagtcatcttgatgtaatgcttagatcactgctcttgactgcgctggtcagacttggacataatgaaactataaatgaaggagttcggcgtttccacatcttctttgaagacggcaaaacttcccttcttccaccagatactagaaaggctgcatatcttgccgtgatgcgaactgttagcacctcaagcagatccggttttgatgctctccttaaaatctacagagaagcatctgaaccacaggagaaatcacgtgtcttaggctccctgtcttcatcaccggatcaggatattgttttggaggcattgaactttatgtttactgatgaggtgcggaatcaagattcattttacatccttggtggcattagcttagaaggacgagaaattgcatggacctggttgaaggaaaactgggatcacgtgttgaagacatggaaatcgagttcactcatatcagacttcattgagtccattgtcccacggtttacctccgaggagaaagctgtcgaggttaccgagttctttgctggccaagttaagccatcattcgagagagcactgaagcagagcctggagagggtgcggatcagcgcgagatggatcgagagcattaggagtgagcccaagcttggtcagacagtgcaggagctgctgcaggccgatgcgtaaacatgtggcctggaagacggagagtacatgttgatccaagagaaagggattgagcaagaagaagcctg

SEQ ID NO: 34368 - DNA, 845 bp, Zea Mays
ggtttattttataaaaaatcagggtctcttttgcgaaacgaacgggcgcgaaggggtatcgtgatatcccaaccttttgatcgaagtgattagatccatcattccattgaaccggttggagtactagtcgcccgatcagagatcaatgaccagcagcgcttcacgtcatgatctaaccttagcatttggaccgtggatcagcgacccagatcgaacccaccgaaacggtatgggttgtattaatctggaccgttgcttcagcgatcgatgctctggattaaattatgcaagggtatgtgacaggattgagcgatcaccaaccaacggtcacaattccatcggccgaatagttttctcgccgatctaatctcaatcgttcactcacaatccgacgacgcacacacgttattcaacctgccaatggctagggacgacggagcaaaggcccaaagcggtgccctccaccggcacgcggcgaatccggcgacccggtgcctggatctcatggacgatgggtgctatacactactagataggacaaggagatcgtcatggaaggtagctcacctcggattggggcaacaggggccccgcacacgcgatactgcggcgttcataccgcatcaacagctccggcgacgaattccacaatgcacgcccatcaatcgccttaacgcacgctgctccctgtttcggtgcccgccatggacgattctgcccacacaccgagggcatgacgctgccctacacgaatctaccctagctgctgccctcggtgctcattctccatctctgcaatggtgccgaggctctagctcttcgttctaggggatgaggggttcagc

SEQ ID NO: 34369 - DNA, 531 bp, Zea Mays
agcggatctggtgatccgtggtaacatagttctcaatacgttatcagcacgctctacctcgacgttgctgcgggatcagatctgcatcaactctccgtccatccggcaggtctacggcctagccgaactgtcctacgcgacaggcttcgattctccctctacgcaatcgaacggtatgaaatgttattgatttgttatcataagaaaaaagagagtcgcatcgagtgccgatatccatgcccgcaccaccagctatgcgcatccatcgctcctgaacggttgcggtatagcctcctcaatggagctcgtcgagctgtgcctgctgcacaaggacgacctcgtgtcgacggcgctgaaggatggagagcagtagtgcccgtcaccagcaacagtagtgccttgcacacaaccttaatcgacgacagcctactcgcctatgcgtgtgcccttagccatgatagctggcgaagggtggagaaaaggatcctgctcgcacgacggtgtgatggaatagccgagggtgcgacggtg

SEQ ID NO: 34370 - DNA, 1971 bp, Zea Mays
cacgctatctgtggcggcaacagtaccccctccaagcgttcaccggtgcacgctccctcctcctcaaccgcgcgtgtagcttctctctcacactacatggagagtgagtgccgggagacgctaccattggcaggcgccgctctccctctctccactcccgcgcgtgaagactccagaggtgccgagttgctcggtgcgactccttcgtcgccgtccacggaagcggaggccggcgaccaacctccccgcgcggcgaagggtacaggcggccggatccgttgggcctcacgcgaggagagccacgcgaacggattcgacgaccgaggagtccggatcgaagctcccactggccgacttcatcgccgccgccgccgttcaaccctgtccgccggcgattcaacgaggctccttccccggctgggtgtccgccgatccagaactcgagctcccgtccatcgatctgcttcttccgatctgcacatctaccgtttccccctcatggtcctccacacacatcagctcctcaaggaatgcccccctatgtggaatccacagtactggcagcctaatccctacgactttcctagtggatctaatatccaatttagcagcagccaccttacaattcccagtttatcacaacaacaaaatgaagtaggaggttttgcaaataggggcccatggaatcatttcgttggtatgatgaatcctagttatccttgcccacctcccccgcttgctgctggccaaatgcaaccacctagccattttgtcacactgcctaacaactcttcgaaccctatggacccaatatttttggagtccgaggcagagcacagcgcacaggaggttaacagccccagcaaagaaggtggtacacctggtaaagggaagaaaatgaaagaacaaaactttacgccagaagaggatttgttgctatgcacaacttggctagaaattagttgtgatccagtaattagcactggccagaggaaggaaggactttgggcaagaattgataaacggtataacgaaatgagaggtgagtatcctaagagagttatcagggctttaacaagtcgatgggacaaaattaaggctgattgtgggaagtatgcttcgttgtatgcaagagtcctcagggaaaatcaaagtggtttaactgattatgataagacttcaatggctaccacactgtttacaaccgaaaataagagagggttccccttcatgcattgttggactaaactcaagaacgaacccaaatggcaagctattgttcaaggcacttcactacgaggggcagcagggatgtcaccggttggcagtgccacaccaactgcaagtgtaaacgatttggatagcgattctctaggtttaactgggaaaaggccattaggccgagactccacaaaggcatcaaggaagaaggccatgtccacgtcgtcccagtccatgaagtatttgaccagaattcatgacctgcaaatggcccggttgaaacaaagtgaagacaaagtggagaagaaagaagcacattatgaggttttcaaggatctcgaatataagaagctgcaagttcaacaagaacaaattgaagtggagaaaacaaaactgaagtttcaagaacgcaaagagaagaacgatgagttgaaggaagcaatggctgtggatttggaggacatagccgaagatttgaggcctgctttcatagcaaagaggaaagcacttgtggactggtttgtcaacaatccaaactgagttgttcgtttagtgaaaattgtggaccacggttttcactagttgagtttctgttttagtaatgcgtgctgtaataatcacattttttgaagtgtgactttggactgcgttagtgtcttcatttcagttgaagaactcaagattatgttatgtttgtaaacttattctcgtcacttatggttatgaattgtcagtttgaacttgtccact

SEQ ID NO: 34371 - DNA, 1876 bp, Zea Mays
caaagggctcggctgcagttttgcctgtggtcaatggtcgtcgcttcattggtcaaaccttgagagccccggttcagcaatcgcagttccacaaggcggcgatggacggcggcggggtcgatacggccacgacggcggcctggatggagaagcaccggcacatgtacgagcgggccacccggcacccgttcaccgtctccatccgcgacggtaccgtcgacatgtctgccttcaagcgctggctgaaaattgaagtggctaagctttgaccttttcatgtctgattcttggttcgtggtgtcgggcatcgagatctgtacatcaatctaaatactaccaagaagtcttggagttgctaccaagttaacaaaaattagtgtgcacggctatgaaattgagtgactagttgcgtgattcgagtcagaggtgtttctgggagaactgtgaatttaaaattgaacctgaaagcgtgaaggcaaacgatctttatcggcatatactgatactgcgtctgtgaagatcttgtgtttccagtggactagtcactctgaatgttgttattctgctgttgcttcctgttgacaaaaataactccagaatagaattggctcttagttgacactgtccaattatgatagtataaagtgatgaaggatcttgttcagagaactgtgcaaaaaagaactcaactgagtcaactcctagttgagcatagtattctgtaatttttttttaaaagttactctatatgatcttgggttctttttctagttgaaagcattttggttggtcataattacagctgtctacacaatgatcaatatgtgctggctaattttctttccgtgattttcttaaataaatttcattttggttatgagtaccatgaggggagaaaaaaaataaacagactggtttcttcgtcatatgcagagccaggactatctgtttgtaagggaatttgttgcattcatagcaagtgtactgctcaaatgctgcaagcaagaagacagctcggacatggaaatcatcctgggtggagtagcgtctatcagcgacgagatctcttggttcaagaacgaagctactgtatggggcgtcgatctagcaagtgtttcccccttaaaagccaatctagagtaccacaggtttctccggagctttactgagccagagattagctatgctgttgctgtaactaccttctggacgatcgaaaccgtgtaccaggacagctttggtttctgcatacaagacggcaacaagacgccgccggagctcctgggcacctgccagagatggggcagcgccgggttcagacagtactgccagtctctgcagagcatcgtggatcgttgcttggctaacgcaccggctgatgctgtccagagtgctgaagaggccttcgtccgggtactcgagctggaaattggtttctgggatatgagctcttctcggtcctaattaccagcgtgttctctgagtccaaacatctacgcaaataatcgaacgaaataaatggtgcttcgggctcagacccaggttttccccatgtcaccttattcctatctttggttttcgcgtgacagtactttccgctgccggttcagaaaggactgatatgatgctgccatgtgggatccgatcagatttgctgcatgcacaggtgaaactccatcttacactcaatttttgtaagcatgctataacaaaaaaaactagacgttgtagagagattctacaagtagattaaggtaatttgttgttgtttggattggctccatgtagcacaaagtgactctaaaaagaaaaaaaaaatatgcttaaatattgaaccatccgactttctaaaatctctcgaacggagtcgctccct

SEQ ID NO: 34372 - DNA, 2724 bp, Zea Mays
cccaaagtagtagccagtgggggtctctcgtctcgtgccgccgccaccgtgcgccgctggccctgacactgtcacactactcacggcagccggcagccggcagccattggccattgccgaaccggcagaggcggcagcaggccacgccgtcccttcgctcgtgccacctcgcctcgtgccgcgcacctactactgcgctgcccagcaggcagcagctcccctttatcctccgcccccgtcctcataaaatctcgcttctcgcttctcgcctgtcagtcatcactagtcaccacccaccaccaccatcgctggcggcagtcagtctcagtcaggcagccactccctccctccctccatccatcacgctcccccagaccttcgcctcccgactccgcgcgccgcccgccgccgcgccgtgggcgcagcagcacccggcctcgcggatctaccgcgtctcccgggcctccggcggcaaggaccgccacagcaaggtgtacacggccaagggcatcagggaccgccgcgtccgcctctccgttgccaccgccatccagttctacgacctgcaggaccgcctcggctacgaccagcccagcaaggccatcgagtggctcatcagggccgctgccgaggccatcgacaagctcccctcgctcgacgccgccgcgggcttccccgcgcacccggcctccgccaaggaccacgccccgcctgtcggtgacgacgacgaccaccaccaccagcagcagcagcagctcacgaggtccggatgcagcagcacgtccgagaccagcaagggctccgtcctctccctctcccgctccgagagccgggtcaaggcgcgggagcgcgcaagggagcggaacaccgttgccagggacaaggaccccgccgccaacgacaccaccgccaccacctcggcgcaggcggcgtccttcaccgagctgcttacggggatggccgcggccagcgccgcccccgctcaacacaagcaccagctgcggcagtcgtcggtgtcctggcagccgacgattgtctccgccaccaccgactacatcgggttcgcgcagccccggaagggcggggggcacgcgatggcgcacgccttcgcctcccccgctcctcacctcggcaacattgcgtccatcgccatggccccagcgcagcacttcggcttggccagtggtgccgtcaccgtcgcctccgggggcggcggcgagccgcacgccgagatgacgcacttctcgttcttgcaggaccatttcatgcccgtccacgcggcaccggcgccggccccggcgtcggctcccgccggagaatacaacctcgacttctccatgtcctcgggtcttatgggtgtcaacactaggggggcccttcagtccaattcgcagccgcatatctccggccaccatcaccagcagcagcagctccagaggctgtctactccactggacgctcccaacatacccttcctgtacagctctgccgccgctgcagctgcggcggtcaccacgcccaccacggccgacggccagttcgccgcgttccagctctggaacgggttccagcacgcagacatgaaggagaagggcaagcactgatcgacacctgcccagcgcagtgcgctgctatctggatggacgtggaaactggaaaggcgtcaaataatcgcagcctgtccctacaaagcaccatccattattgcctgaagctgctgccatgattgcagtggggatggttcctccccccgaattcttggaagtagatcatccttatttcaggctatcacactgaagaacctcgtcgtccttactctggcaaataaccttccgcacttctttttctgcctgctgctgtactcatttcctggaggcgaggttttcgggggcatgatttgccagaccagagcgcccccgtcagagatctactgtgatcattcccactcgaaaactttgccggtggatgggttcggtttggcccccttgatcggctctctctcgagctttagtgatcagttagttagttcttatatccctgccatttgtatggttctcggttgtgtgttgcacgaggagtgggaggactccagtgcatgacgtgtgtgtgcaagtttgtgcccctgttgtgtactactggcatagtgagagttctcctcgtatgtaaattttatttttattgttttgcagtggttatctcgtgttgctccctgatttgcgaaaaggcttgcacaactcgtggtcggtacgtacatgctggctatactatattgtatttatactgaagaagagttgggtgtttagcacccaggcgtggttcatgtactgaagagcaaaggcgatgaaaaggcgtagagtgactcaagcgcctttcttcgccggcgacgcgtagccgtcctcatccagttctcgtgcacgttccacgtacgggtaccagcagcatggatgctttgatctcgacgccaagtgcccgttcccgggcttgacgcgtaggggtgaggaagatgcaagcaaggaaaggaaatcctcccagtcccagacgtcacgtggatgagctgcacaagaagaagcacgacatagagtgagtcaaagaaccgcgctggctctgtacaagaagatgggatgatatgttgttttctgccactaatgacatatgtattcgtgacgtacgcatcggtatatatatatatatatataactagtcggttgaccgtgcgttacaatg

SEQ ID NO: 34373 - DNA, 1821 bp, Zea Mays
ccacgggccacctagcatcccgctcccacggtccccgcatccccaattcccagcggaaaacccccagccccctagcctcctagcaccttctcctgtccttctaaccctagccgcccaagcccaccagccgccgctagctgctgccgttctccactctccacggaccatggctccacggccagccgccaaccaccaggccacggccgagcagggcgccaagcacctaggccggccgagcggtggctgccagcaagacgaagatctacatggtgcttgagctcgtcaacggcggcgagctgctggacaggattcaggcggccagtgagggaaagctcccggagcaggagctccccaggtgctaattccttatgccgaatgcctgcaggttctgcagaacagagggtacgacggctgaaatacacacaatttagttgaatttaagttatgcctagtgtgctatggccactagtttgaatttaagttagatttaaaggttacacacaatttactagttttattatctgaatggttgaattggtctcgtactactgtacataatgacagctgaaatacatcatgtctctaccactttagcctttcgttttttatacactaatactgatctacatggactgcaatagtattcacaccacagtgaatgttgagcgtttattcagtaacactaatataggcaagaggtatatgtatttcataggcaaaagtaacactgaagacataggcaagaagtataggcaacaataacactgatatacttagagggaaaagggtatatgtatttctagcccttttataacagtcatttctagcagttttagcaaatgactggttcagtgtgtatttatatagcagtttcagttttatagcagttttagttctagcacttttagcaaatgtatatatatatatatatatatttcatagcagtttcatagcccagccgccgcggcctccggctgggcacgaggcccagttgcccgacaggccgtccagggcgtgcctgagaatacagatttgtcttcgaaaatcatctcacctgttttcttttttgcagattgtactttacttggagctttatgcaagctgtgtggagtacatcacgccgctaagagacagcatgtcatcagtgtttccctcagcacatttagcttttgccagcatcgacctgaatgcacacactgtctttgcgatcacaacggccttggcaattctccaaacagtctgtctcaggaacctcagtctcctctcgtatctttctgctgacggtgtgatggcgacaattgcagtcatcctctgcctgttctgggttgcctgttctgggttgctctgatactcccatgtgcgtgctacctctccatcaagaagggcgcagtgccattgtgggagatcatcctgtgcatagtcatcataatgatcggcgtcgtatgtgcatgcgtgggatcatacacctcagtcagccagatgattagcagcaccaaatagcgcacgctagctgatatttatctagtgtctacggatccttccaaatgctttgacagagttggaactggcagcttttcgtagctaagtttatttgttccttctttatggcagaaatttggtaagagagagtttagttgtgggaggacaggcggcgaaggagtaatctgagtttagtgtggtgcttttgtgactgatcatctctggagcttttgtgaatgatctagctagctatctgtaaatgatctagttgtgaatgatattataattgtgatgcttttgtgaatatataattgtggtgcttttgtatttatgtgatggatc

SEQ ID NO: 34374 - DNA, 830 bp, Zea Mays
tataagaaaggtccctctccgtttcttcaaactttagttctagagcccaccaaagaaaaaacaaataccggatagatattaaagcattttcctcgtcgacttaaaaaatagaacaaaaaggttcttccttttcgcagctccatcgtccaccaacctcctccgattcggccgtcgtagcgtatagccgaattgccccactccaggactctcgccagcttctccggccgactagaggctgtttccggcgagtgctcggctgatctcctccgcgcggctgaggagatcacgcggtctcgctcgggggggctggggcgtgcatgatgggactttggttgattccgacgatggagactccggcgaggcttctgtggagcaccagcttcttccgccacaaaatcgccgacatgcttgcatcctcctcctgcttcttatagatcccacccctcgacgtcgtcgccggcagctagctcgctagcttctgtacatacgtcgacgccatatctagctagtctcttcatccagtcccgataagtgataactaataattaggagcttgcttcgacgaccttgcattggtccatggagtccggacggctcatcttcaacgcgcccggctccggcgccgggcagatgctcttcctggactgcggcgcaggcggtggtcccggcggcggcttgttgcatcgagtcatgaaggcgggagaccgatgcttggccttgaagaagggcgcggcgtaaaacggcccttctacacctcgcccgacgagctcctcgaggaggagtactacgacgagcagctgccggagaagaagcgccgcctgacgccggtg

SEQ ID NO: 34375 - DNA, 819 bp, Zea Mays
cccacctgtcagcctccgaacccaccacaccaaaatcccgcgccggccctgctaaaaccctaaaccgtgcccctccgtcccaaccgtccgccgcctccctctccgctccgccaagaccctcctcctcactcagctcccctcgagcccagaagcaccgcgcgcaccatgcggccaccgagagggcgcggcggcggcggccggttcggcggaggtggaggccgaggcggcggcggtggccggttcggcggcggaggccgtggtggccggttcggcggcgggttccgcgacgagggcccgcccgcagagaggtgtcgacgttcgtgcacgcgtgcgagggagacgcggtgacgaaactcaccaacgagaaggtgccctacttcaacgcgcccatatacctgcagaacaagactcaggtcggcaaggtcgacgagatcttcggccccatcaacgaatccgtgagcatctcctcgcctccctaatctctgaacgtctcaagagtaaaaacaaaagaaatacatctttttttaccttctcatgggcacttgaggctgtggtgaattttctagtgtggcaagagcagtagtattgccacagcttgttgtaggtgtgtttcttagagagagcactgattatttacttagtgcagtgaggacttgctgcgtgattttgcagatgtttaatcttgtatgtagtagaggtgttctcacattcgaacagtaaaatgccccacggagcatggtgttcctttgaaattattgttgatccctgctctcgttcctggcttcctgggctatagactcacatacttgttgttctgat

SEQ ID NO: 34376 - DNA, 1672 bp, Zea Mays
gctatgcatgtgttggcaggtggcactgcaaaaaggagtaatgtgaatggcgatgtgaagaatgctgattccaactggttatgttgctgtattggggaagccaaatgttggcaagagcacacttattaaccaaatggttggtcagaaactttcaattgtaacagataaaccgcaaacgacaagacatcgcattcttggtatatgttctgaaccagagtaccagattatactttatgacactcctggtgttattaaaaaggagatgcataagctggacagtatgatgatgaagaatgttaggagcgctatcggcagtgcggactgtgtgcttgttgttgctgatgcttgcaaaactcctgaaaagattgatgaaatgcttgaagaaggtgttggaaacaaagatattggacttcctgtactgctggtattgaacaagaaagatctcataaaacccggagaaatcgcaaagaaacttgagtggtaccaaaaatttactaatgttgatgatgttataccaataagtgctaaatttggtcatggagtggatgatatcaaggagtggatattgtcaaagctccctctgggtcctgcttactaccccaaggatatagctagcgaacaccctgagagattttttgttggtgaaatagtgagggaaaagatttttgttcagtacaggcaggaaattccttattcatgccaggttaatgttgtcagttacaaaagtcggcctgctgccaaggacttcattcaagttgagatacttgtggagaaagaatcacaaagaggcattatactagggaaggatggcaaaagcataaagatgctggcaaccgcatcgaggcttgacatcgaggactttctacagaagaaagtctaccttgaggtggaggtcaaagtgaaggaaaactggcggcaggacgagcgactcctgaagcggtatggctacggcggcgagatccaagcgctgtgactgtgactgtgactatgaccggtgcgctctagctcactgtcagctgccgcgagcgtggaatgacctggttttttttcaattcctctcgtgtgttgttgttgtcgatgcgaatgagtagcagttatttaacctggtgtcgaactcaactagcagctcagttgtgttaattagtcagcaagttatgtgctctgatcctgctgttgttgtcagcggaactggttttgccgcagacaagtcagcatggttgcgctctctgtagcagtctgtgtgaatagaatcacgggggagttcagacatcagagggactgaacagccgagccaagccacaagtgcatgtacaagtcgtgtccttcgggcggcggcgggtccaggtggaggcgcgccgtgtgccggtgccctgcgccggccgtcgtggatacggtgtggcatagcgagcacgaccggttggggctgactgaccgtgggaggcggtggagtatgctgatacacgtcgggtctgccgcagcattgacttggctaccttgagcagctcctctgttgtccaaacaaaaaaactcaacttctccacagaccacatgacagctgggatggttaaccgagtgactgacgtatttataagccggaccggccctaccgaatagccgccatatgtgtgcactgcagattttttttatttacgtacattttgtcttgtctgat

SEQ ID NO: 34377 - DNA, 2245 bp, Zea Mays
tgctgtaagaaaggagaagttcttatcatttttttagaagatattttttcaagtattcacattatggatgcaagtcgaactttggcaatgatttatagggataaatcagagttcagtgaagagcgaaaaatttcaaaattttatcgagccttagtgactggcatacttgatgatgatgaggttgttgttacgcaacctatagggttagttcattatcctggagttgcagagggactttatgcagcatgttcctcaggaaagccagcaatgagcaaagtatgtgttcttgagagacttgcacaccaaaatcacacactggtccaggttgaaattcattcaggacgacctcaccaaataaggatacaccttgcatacattgggcacccacttgtagatgaccctctctatggtattggtgggcaccccaattttgttgagccagaatctactggcacagatagttcttttgcatctgatgggggttatgagagacctttgcaacctgttcctggagactgtgggtatcacctgcatgcacattggctggttctttgccacccaacaaccaataaggtgaaggatccttgaaggaaaatcgtgcatcagagcaagtgggcgctccaagtgatcaaaaggtggtcaaggttgtttatcatatactgtaagtgtttgcaagaagaattagtctttgcgagatgggattgatttgcttgcttttgtaggggagcggtgagccaaaacgcaaggtcatcaagcatagcaagcttgagaaggacaaagagttatttcaactagcccagcaataccacaaagtggttgcagaaagggatcaagccattgcagtcaaagatagactagaatctctttgtagggaatttcagcgtcaaaacaaaatgctaaaggaagagtgccaaagggtatcgacagagggacagaacatgcgtacggaattgtctgaaaaatttgatcatgccataaagggtgtcagtgccaaacttgaggagcagagagttgagcgcatttctcagctagaagagaacaatacgttgagaagtaaactgaaagaccttgctgatcaatataacattactcagcagaaatatgctcaccaattgaaagagaaaatgctggaacttgaacttgctgatctgagacttcaacaacatcaagagaaggctgctcaggaacatacacaaatgcagttgtatgctgaacaagtttctcagcttatgactactgagaagaacctgcggttgcaactagcttctgacggggaaagatttcagcactttcaggatgccttgtcaaaaagcaatgaagtctttgaaacttacaagcaggagatggaaaagatgatttcagtgataaagaatcttaagaaggagaacgaatttctgaagggaaaatgtgagaactcagatattgctattgtgaagctcattgaagagcgtgagctaacaaagaagcaaatagagaaattgaaaaatcaaagggagaagctcgaatccctgtgtcgaacactacaggcagaaaggaaacaaggcccctccgccagtattccagatgccccttctagccaagaagtgtcagcgacaagtcaagaatcttaacattccagttgccccttctagccaagatgtgtcagcaacaagtcaagaatcttggcagttgtgcttgtcaatataccgttggtgccagctacagcttgcggagatttctgaagcctgacattcagctgtcaacctaccgtccgtctcaggccttttgatattgtggctagagcctagtggtgcattcctactcggtgttgttaccaagcatataagctctcggctgattccatctcttgtttttgtttgagacaaagcctgctgcattggagataattagatttttgccaatcataatattgtcttcttgttataattaccactgtgtctatgaattgtgggtctagctgggtctatgaaatgtgagtctgatgacaattttacaaacttgtttcttgctgatggtaaatatcagaatctctcgctgcattgtgagtgtgttaattattgtttgagacaaagctctcgcggctcccgttttggaatgatggccaatgctttctcttaattattgtttaaaaaactaaacatcttttattttggatatacaataatctaatgagttatcctttgttgtgcgaaattctcgagatgatccatcattcctgtattcttcatgtttccacacaaattgc

SEQ ID NO: 34378 - DNA, 848 bp, Zea Mays
cgatgatgggcgagttaagctatttccttgggttccaagtgaggcaactcaaagatgggaccttcatatcccaaacgaaatacacgcaagacttgattaagcgttttgggatgaaggacgctaagcccgcaaagactccaatgggaaccgacggacacaccgacctcaacaaaggaggggaaagtggccagatcagctaaccaaagtggtgtggagccacaacacaacaacatcaaggtctacaggctttactccattcaagttattattcggtgacgaagcaataactccggaggaagctaaaactggatcaataagagtagtagcttcggcagaatcaggttctgaagatgcttattctgtggaaaaagatgctttagaagggatcaggcttcaagctgtggagaatatcaataaatatcaagccgaaacaatcaaatggcgagatagaaaagttcggctaaagaatattgagccaggacatttggtgcttcggagagtggccaacccagacacagtgggcaagttgcagttgaaatgggagggacctttcttagtagcatcttcgccaagacccggttgatacagattgaaggatatggacggcaatgacattcctagatcttggaatgcggatgagcttcgacgatattatgtgtaacttgatgtaactttttatgttttttctttttcatggcacccttttcctttctaaagggggagaaaggtttttaatggggccatcatatgtaatttccttttttagttctataagagcaaaatcccccaaggaatgtaaatgtaaaagctgagaacgcaccatcgagtgccgaaaagtaaaaagcgaa

SEQ ID NO: 34379 - DNA, 2680 bp, Zea Mays
atttgatggaactgaacactctcgctggccgcacttacaatgacattactcagtatcctgtttttccatgggtaatagcagattacaagtccaaaactttggatttggaaagtccgtccacataccgagatctttcaaagccaattggtgcactaaatcctgcacgtttgaagaaattccaagaccattactccagtttcaaggatccaatcatcccaaaatttcactatggttcacattactccaatcctggcacggtattgtattatcttgctaggatagaaccttttagcatcctctatgctcagctgcaaggtgccaagttcgatcatgatgattgtgcattctctgatgtcgccagaacatggaacagtgttcttgagggcatgaatgatgtaaaagagctagttccagagatgttttaccttcctgaggtatttactaatgtaaacccaagtggaagactaggttctgtagcactgcctccttgggctaaaaatgctgttgattttatacatatgcatcggaaagctctcgagagtgatcatgtctccacacgtttgcatgaatggatcgatctaatatttggatataaacaaagaggtaaaggagcagaggtagccaacaatatcttccctcatgttacatatgatgggatggtggacattgataaaatcactgatccagtgcaacggcgaagtgtacaaaatcaaatatgttattttggacagacaccatctcaattgctgacagttccacacataagaaggcggtcgttgacacaaatattacaattgcagacaatattccggaacccaagtgaggttagatcttatgtgcttccaagtccagagcactgcaatgttcctgctagcacgatgcttgtatccaatgattgtcttgtagtcatagattctaatgttcccacagcacatgtggcattgcaccattggcagccaaataccccagatggcctaggggcgcctttcctctttcatcacgggaaaaatgccataaattcaagtggtggtgcaatatttcgcatatttaaaggatcttcaggttctgcagaagactatcagtttccacgagctgtagcatttgcagcctctgcagtacaaagttcatcagctgttgttgttacatgtgacaaagaagttataactggcatgcagataactctgtgaagatgatctctccggatggagcaaggactatcgaaactgcatttgggcatcttgcacctgtgacctgcctcgcactgtctgcagacagtagctatcttgttacagggtctcgtgacacaacagttatactttggaggatacgtcaggtgggttctgcacataagaaaaatgctccagaacctccaccatctacaccgacaacacctactagtcctctagccactggtagtagcagcgacagtagtccaagcaaaactctagaaacctacaggaggcgacgaattgaaggccctatgcatgtactaagaggacatctcggagaagtaacctgctgttctgttagttctgatttggggcttgttggttcatcttcgagtgtgtctggtgtcctattacattccttgagaacaggtcggctaataaagaagctcgatgtgccagaagcccattccatatgcttttcttctcaaggcattgtattggtttggaatgaagttgagaacagactgtccaccttcactgttaacggaatccctattgctaccgcagttgtgtcacctttctctgcacgagtcagttgcattgagatttctacagatgggcaatttgctgcaatgggaacttgttcatctagcaatgacaatcatgactgcagcactgctctggaagataattctgagcttgacaagcccggtagtgatgaggatgtacaaggatcaaatgagaccaggctatctgttgacgctccctctatctgcttccttgatctatacaaacttgaggtaatccataagctgaagctggaagaaggacaggacgtcacagcactcgctctagaccaagaaaacaccacccttctggtttcgacagctgataagcagctaatagtctacacgggtccggctccaagtaccccgtaggtcaatccattagctccccggtgcttggttggaaaaaatgtaatggagatcagcgctagctaccttgacggcccaactgacagtgagctcggagacgacagtacagataatgcacgttaggcgacgggcttctcttgccgtgagcatggcgctgctgtacgtagaggctccaatggattgtgctgtaatacaagactgagactggaacctgaaatgggcgacatgtgcaccaaaaggtgaagagccgttgcgctgctggaaaactctcctgtacagggacctcgttgacattttccatgtagtcgtagtgaaacctgccacgctgcggccaaaataattgttagaagcagcaatccgaatgtaattattgccagtgcctcgtacaagtcgcgttagcttcttgttagccgtgtgcaacggcgagccggcacgcaaagatttgttagcttgttgtcattgcatctgtgtacaaagtctcgtccaagaaattgattcactttcgcttgcgcacaacgtagacacgcaatcccttgttcagatgtagtagcttataggtagattgtgttgattata

SEQ ID NO: 34380 - DNA, 2105 bp, Zea Mays
ccgagacgacccaggaagagtccaatcaggctcctaacccttctcccctccgacggtctaaaccctgccgccgaaatgctcctccgccctttcctccgccgcggcgccgccgccgccgccgccgcggtatcctctaacggggctcgcgccatagcactccccgacccgcctgccgctctcgcctcccttttactcgcctcccgatcctacgcgaaggccaagggcgggggcaagccggcgtcgtccacgtcaaaccgcggcaaggtccgcgccaaggacccgcgcggggtggcgtcggccgatgatgccgcgggagccgaattctccgccggaggtgggggcgacgacattgacaccgagttcgagctgcccaccgacccgctgccccctacatatgatccagctctcgacgtcggccccggcggccgcccgctcttcgctttcactgacacgttcgggtccttcgcccaccgtgacgcgaacatctatgtcgacttcactttggatgaatggaatgccatgttaccagaagggctgccagcagggatgatgaaagagtttcaggagacaagacggtgtgctgtgatggtgaggaaaagcttcctagatctccgggataacttccgtaggattgttgatccagctgttacaacaaacctcaaagataccagaaaacaaattgtcttggatggcccacggagttgtggtaaaagcattgcacttgcgatgcttgtccattgggcgcgtactgaaggatggctggtattttatgttccacaagggaaggattggactcatggaggattcttttatagaaacacatacagtgattttttcgatacaccagtacaggctgccaatatcttgcagttaccatgccaaatttttgagcgtattcccctgggagaaggtgctggtgttggaatgatgaaaggggttgacacaatggaaatgcctgaagggtccacattatatgatctcattcaaactgggataactcaaacacatgcttcagttggtgttatggttcgcttaaggaaggagctgtcccttgttaaagacgtgcctgtactatttgccattgatcagtacaatagctggttcacattcagtgacttccaggaacctgtaactgtccgatcctgtcgatcgatccatgcaaaagagcttacaatggtcaatgcttatagatcaatgctgcacaatgatatgatggtgggggctttttcacactcaacagcagttggcaaactacggcaggagctgccagatgttccttctgatgctcgtttgatctttccacgttacaccttagatgaagctgagactgcatgtcactattatatgaggcaaaagatcattcggcgcgagaatttttcagaagagaaatggaaaaagatatactacttatcaaatggaaatggtgcagagatgagatggcttgctgccttcgtttgagtttctgatacctggattgtactcagttttggtggtggtgtagaaaggttgccacctctgtttcagcattccgttacacaccacagttcattgttgtgtacttgtagtccgtctcttgacatctctagaagaaagtttggcgtcaacatcatttgtgctgagtagaacttgaggagataaggcataagtatgtggctcagttacatgattatatccttaggcttctttcagttctcgctcagatgctagatacaaaataatgtagcattgttattggagaagttttcacatgttttggctccgccgagcacgatgagtatgatgagttgatgccaatctactcagcatgcttgctactatgttgctgaattgagctccgttgagtattttttttaaattactgtacgaatcgaacaattatttgagttgggaacaatattcttctttgcggaactcaaaggttacgaggcatatcctcagtttgaatagtttagcttacccttgtttcctcagtttgaatagtttagcttacccttgtttctcggagagatgcaacatattgatttagctacattgtctattccggtgtactcctatgccgtttatcgattttccttctggaaacgaataactctttaactttttct

SEQ ID NO: 34381 - DNA, 327 bp, Zea Mays
attactccacaactaatcacactcaatcaaagatccaaatcaaacaagtatcataaaaacaaacattcaagcatacaaatacctataaaaatagttttgtttttgttcctaagagtaggtctcctattcctaaagtcactttaggcacaggatttcaaagtgtgaaatccacatttgtctttagaaagaaaaggtaagaataatcagagtaaagcggaaatcgatgagaaaagattaagaaaagtttagaaaagaatcagagtagcaaaggtaagtgaataatggttgtccagttctatctaggtttcgtcctacagtcaacattcc

SEQ ID NO: 34382 - DNA, 2146 bp, Zea Mays
agaaattagaatgtcaattgtgcaaagccagttatttagggtgtcaaaaatacaaatttctcctcccgaacaccctactcgttctcccccatcggcgccgctacgaccagcgtttgagccactcgccgccgcgcacgatcctccacgccttgctccagtcctcgtcggcacgcctccttcccaaccctaaccctagcactagcagtcagtcgagcggcggcaagtcaagggtctgtcgagcgggccggcggcgaagaagtgtctagcgaggcgagtcaggtgcagggggacccacccgcagcggtggcgtgaagcgcgtttgactggatcgaccaggttggcggctaaacagaggaggttgcttgtttgttttctccgtccggctgcggttttcctttgactggatcgatcagatttgccggcggcggcagcggtcccccggcaaaggcgtggggatccctgccgggatggaggtgccgtggctgctgctggtgcacgggtcagtgacggcgctggtggtggtgtcgttcctctgcgggcaatggcccatcttcgagggcaccttcatccagagcatcaaccacttcctcacctttggggcctaccactacctcctgcggtttgtgcagtctgtgtgcggcactggggctagggatctcgtcctcggtgtcgagggatactgctgcgaccgacccaacccgatattgcaggtattttatgttgccataattggagtgacatattttataatagtgcagacatctttccagtatattcctgggtattatgtgagtggattgcacagatatctgagtgttgtggctgtttctgttggtgctatactcttcgtgcttactagcttttctgatcctgggactgttactgctgaaaatgtttctcaatacgtatcttcctacccatatgacaacattatttttgtggagaaagaatgttcaacttgcaagattactaggccagccagggcaaagcactgtagaatatgtgacaagtgtgttgctcgattcgatcaccattgtggatggatgaataattgcattggggagaaaaatattcggtattttgtggcctttttagtttggcatttccttatatgtctgtacggggctttaatccttggcttcattcttgctggtgaaataaaagagcggaaaattatatacattctgacagtttattatggcatcgataattcattctcgggcttgtttccacatgttgcacaggtatgctcgaggaacacatttgataccaaattccctttacttttccataactgtatacctgaatttcattaccatggcaacgaaattacaaagttcacagttttagagttgtaacatgaagaaaaaaccacccgtgctacttcccatagtgatcaccaagggatcatgcactataccataccaaattcctttcactgctctactaaatctgtgttttgactcatggtcaattttgcagtggttgcttgctgtgcataacactcagatactcttgagtgtatttttggctatattagcactgctccttggtggcttttgtgcttaccatgcacatctttgtttgacaaatacaacaaccaacgagacattcaaatggcaagactacatcatgtggatgaaaaaggaaaatgaagcaaaggcggacgctgccacgctcagatccagcataggctcggccaatagtgatgcacagaaagctcctccaagcaaatggaggacgttcttcatgagatcccgcacaccaagcatggaaccagttgtgagaaacaacatatatgacagaggcatgattacaaacctgtgcgaggtggtcgtccctttatcagaacggaaggcattttcccgcatgaaatcagattgatgtcttttgttgcagttgctttgtcaccaaactgttgttgtatatcagtgtagaatttgcgacacattttttttggtcataccatagaggcataggggaaaatattcaggataatcgtgttcagtacctacgacctatttattataggtgaaaggttttgaagttgcatttgcctttgcaatacgccgatgtcactattctgtttttagaacatgattctgaaatggcactaaatatgaaactcatactatatgtcttcgag

SEQ ID NO: 34383 - DNA, 3744 bp, Zea Mays
ccgcctcctcccctctctagggttttacccttcccgcccgaaacaagggccgccgctgccgcacaggaacccgttctgggatctcagccatctctccggccatgggcaaggctaataagtctccgtcgccggcggtggccaaggaaggcgactactcggcgttgcgggagctgttccggccgcacgtggaatcctttgattacttcctcgataaggggctcgacgagatgattgaatccatccgccccatgggtcatgtgctctcgccgatgaggggtgcccggccaggtgtactacccatctacccccaggagtgcagacaagcaagaatttcatatcacggggaattcaaagttgaggtctgcttccagtataatgaaggggcacaaatcaggcataccttcaattttggccatttgcctattatgttgatgtcaaaactgtgtcatctgaggggtgctgatccccataaattagttttccatggtgaagaggcaactgagatgggggggtacttcatatgtggtgggatggagagacttgtgcgtattcttgttttacaaaagcgtaactatcccatgggattggtacgcaattcttttcttaaacgtggtgctggatacactgacaaagcagtggtcataagatgtgtccaacgtgaccagtccagtgtgacaataaagttgtattacatcctaaatggaagtgcaaggcttggattttggttgggtggcagagagtttctgcttcctgttgggattgttctcaaggcccttattgatgcaagtgaccgggaaatctttacaagcttgacttgctgctacagtgataaacatggaagaggaaagggagttgtcagtactcaactaattggtgaaagggcacaaatagttcttgacgaagttgctgaagcggttctaaaggactatatttttgtgcacttggaaaataaccatgataaatttaatctattgatatttatgctgcagaaactttatgctctggtagatcaaactgcttcacctgacaatcccgacgcgctacaataccaggaggctctattgcctgggcacttattcacagtttttctgaaggataggcttcaggagtggctaagaaagtctaagcgtttaatccttgaagaggctgcaaagaacaaaggttttgaccttggtaatgcgctggagataaggaaatttcttactaaatatacaacatctgtcggaagagctgttgagagtatgataaaggttgggaacgtgaattcacgatcaggattggatcttccacagagagaagggatgaccattcatgctgaacggctcaactttcatcgttatatctcacacttccgttctgttcataggggctctgcttttgctaaaatgcgtacaacatctgttagaaagttactcccggaatcatggggtttcctgtgtccagttcatacacctgacggagagccttgtggtttactgaatcacatgacttctacatgccgtgtttcatcattctacaactcagaaggggtgataaaaaattttggggaaatgaagaagttgctttctgctgagttggttcgtgttggaatgaacccagtgttaccgaagattgagcaaaccggtcccccagaagtactccatgtccatttggatgggtgcattcttgattcctgaagatctggaagttggttatgtcccacctagttttaatggagcttttcctggcctgtacctttttaccaatccggctagatttgtccgacctgtcagaaatctttttattctatctgatggaaagcaaagtattgagctcattgggccattcgaacaggcatttatggagatacggtgtcctgatggtggggatggtgggagacaagaaccatttcctgcaactcatgaagagatccaccctacagctattctcagtgtagttgccaatctgacaccttggtctgatcacaaccaaagtcctaggaacatgtaccaatgccagatggcaaagcagaccatgggtttttgcggacaggccctaaaattccgtactgatgtaaaagcattccatctacagacccctcagacaccaattgttcggacaggtacatataccaaatattgtatggatgaatttccatctggaacgaatgctattgttgcagtgctatcatacacaggttatgacatggaggatgccatgattttgaacaaatcagctgttgagcgtggtatgttccgtggacatatttaccagactgaatgcattgacttatcaacaaaaagcagagataatgttccagaaacttttgcaaagagtatattaacaagggatacaagtaatgtgattgattcagatggccttcctcggcttggacaggctgtacatccaaacgagcaatactatagcgtccataatagccttacaaatgtgataaggcctgtcaaactaaaaggcacagagccagcatttattgactatgttgctgtcaacgggacaggttcaaaatgtggcctgcagaaggcgaacattcgtctgcgtcgtgtaagaaaccctataatcggtgacaagttcagcagtcgacatgggcagaagggtgtttgctctcagttgtggcctgacattgacatgccattctctgcaaatactggcatgagaccagatctgatcattaatcctcatgcatttccttcaagaatgacaatagcaatgcttttagagtctatggcagctaaggctggaagtctacatggaaagttcattgatgcaacaccttttgcaaactcactcaaaaaggacaaggactccgacaagcctaattcgattgtggacgaattgggtcccatgcttgcatcttatgggtttaattatcatggaaacgaagtcctttatagtggagtttttggcactgagatggactgtgagattttcatcggacctgtttattaccaacgtcttcgtcatatggtctcagacaaattccaggtccgcactaccggtcgtatagaccagataacaagacaacccataggaggaaggaagcatggtggagggatccgatttggtgagatggagcgtgatgccctcctcgcccatggttcgtcctacctcttgcatgacaggctccactcctgctcggattaccacatcgcagatgtgtgctccttctgtgggagcctgctgactgcgacaatgatcaaatccgatacccagaagaaagtcaagcacgagatgcttgggctccccactgtgagaccagcgaagaactttgcatgccaggcctgcaaaacaagcaaggggatggagaccgtggcaatgccgtatgtgttcaggtacctggctgctgagttggctgccatgaacataaagctggagctccggttgagcaacaaatcaggattgcctctcagctaagaatcataacaccagaattagcgcttgttcatcgcgggggctgcttcgcaggagaagcttaaatgtaaccattggtccggcgtgtagttgtttcatatgtcggtgtgatgtaccaatgtaacttgtaagaaaaacataaatgacaacacgagttattatagtttgaatggcggttctttttcattgtcatgtcttaactagtgtttgaatataccagaactgagcttagttagctgttaaaattagggagtgtttggtttttagagactattttttagttcctccattttattctattttagttattaaattgtcaaatatagtaactaaata

SEQ ID NO: 34384 - DNA, 4640 bp, Zea Mays
ccgctccgccgccggcactcaccccagctgcactcccgtgggccgtgccgccgtggcacgccggcgcggcggatgcagtcgccacgaatcaggacaagcagcaggcgccaaaacccaaaccaattccctcccttccgttcctactacgatacccacctcgacgcgccgtctcgccggcgacgtcactggcaagtaccaaactgcccctacctcctcccgcttagttctataaatacgggggggtcgtcttcctccacaagattctgccaaaagatcctctcggatgcccccgcccccgcccacccatttcgccagtcgccatcgagctctcgcttccgccgcccgctgccgctctatcaccccggtgctgagccctaggatgtgactggcggacgtctctatggccgagccgtaggtggaggcggcacctcggcgccgtgggagatggaggacgatgacaccgagggtgtaggcgagagcacctgtccccccgccgccgaccgaggaggctcctcctcggccggcggcggcggcggcgactcgcacagttacactgacatagagaaggaggtcttcgaccgtctcatggagaagagaatcccggaggtcgtcgcggacccggtggccttccgcgaagagctccgccgccacttcgagcgcctgccgctgagctacgccgtcgatgtgaacgtcgacaaggcggaggacgtgctgctgcaccggaggattctcaacgagtgcgctcaccctgaaaatcgccccatcttccatgtgggcttcctgaactgcatcccgccctcggtggatccacagtataacactcagtccatctctacgagcgaaaacggtaattgtgggggttctcaggattccactttgagaaaatttgagccatgcgaagggatcgaggacctcagtttaactggacaaaaagttgtggttgactctgtggccagttcttcgaggggagatgaagaaatcctccatgttcatgaaattattttttctaccattgacaaaccaaagctcctcgctcagctatctgctttgttgtctgaagttggactgaacatccgtgaagctcatgtcttctcaacgactgatggcttttgtttggatgtatttgttgttgatggctgggatacaaaggagacagatactttgctacagattctcaaggagacagcggcacgaaatcatgcctcattatcaaacccaaccaattctgcagcctcagaaagagtactggaactacaagagaagattggtgattcaaatattgacaggaattttctgcagattggggagaagattgcatctggatcttccggggacttgcatcgaggaacttatcaaggtatggatgttgcagtaaagttcctcagaaccgaacatgttaatgactcgtcaaaggtggagtttttacaagaaataattattctaaagagtgttaatcatgataatgttgttcgattctacggggcatgcacaaagcagagaaaatatgtcatcgtgacaggtctctgccccaagtgcccacccttcagcagaccatgagttgctagttattttatagtatatgcctggaggcaatctgtatgattttcttcacacgctaaaaaatactttggatctcccaacggttctcaggattgctatcggcatctccaaggggatggattatttgcaccaaaataacatcatccatcgggacttgaagactgccaatttgcttatgggctctgattatgttgtgaagattgcagactttggagtctcaaggaatccatctcaaggtggagacatgactgctgaaactggtacctacagatggatggcacctgaggtaataaaccataagccgtacgatcacagggcagatatcttcagctttgctgtggttctgtgggagctggtcacttcaaagataccatacagaaatctgacacccttgcaagctgcactgggagtaaggcagggaatgcggttggagatcccgtcatgggtcaatccacaactgtctaaactgattcagcgttgctgggacgaaaatcctaacctgcgcccctctttctcagagatcactgcagagctggaaggcatgttaagggatcatcaggcctccaagggaagcaacaaacattcgaaggcaaaggcacacaaaaaatcgcagagagaggcagaataacgaggttgtcagttaccaccttgtgaaaagcttagtggagcttggctatcatcgtccaagattctgaggctactacaaagatgctgctagtgtacaattgtcaaatattgtatatgattggtgtgtgtgtgtgtttctattactcccaaaaacactatatacgggagaagcgtcgacaatacagcgggacaagcaaagacacggaatccttgtacaaaatggcttgcaagcagcataaaatgccctctagtttttgtatacaaaacatgaaaaatatatgtgcatgagccgtgcgtgcttcctgtgattctgtatctccatgaatcctgttctttgattctacatctcctgccaaagttacatttcttcttgaatctgaaagtagctctgacgttttctttctgtttcatgagccattgcattcttgggcctggtctgtttgctctataagggcagtaggagaaagggcccacataacgatcatgggccgttatcgtatttacttacgtgatttgccgtgctctcccgtcttctcgcgatggggagcaccggcgacacgacgatggccgaggcggaggcgccggcgccggtgggtgactacgagctgctggagcgcctgggggggcgtcccccgtacacgtccgtgtggcgagcggtctcccggtccaccggcacgcccgtggctgtgaagcaggtgcggctcaccggcctccccgcgcgcctccgcgacagcctcgactgcgaggtccgcttcctcgccgccgtcagccaccccaacatcatccgcctcatcgacgtcgtccagacccagagctgcctttacctcgtcctggagctctgcgagggcggggacctggcggccttcatccggcgcaatgggagcgtagacgagcgcgtggccagaaattttatgaaacagatcggagctggcttacaagtgctgcaccggcaccatgtcgtccaccgggacttgaaacctcagaatatcctgctctcttctccgagaagcagcgatgcgatcctcaagatatctgattttggtcttgcaaggtttcttggacccggggagtacgcagacacatcttgtggttcttgtttgtacatggccccagaagtgatgctgtttcaaaagtacaatgacaaggtagacatgtggagcatcggcgcgatcctatttgagctcttgaatggctacccgccattctatggcagaagcaacgtgcagctgcttcagtacatcaacagaagcacgtctctcccgttctcggaaccactggcgtctaccttaggccccgattgtgtcgatatatgcaccaggctactatgcactaatccagtgaagcgtctgtccttccaagagttcttggaccaccgcttcttcagagtatgagtgcccaagccatggggaccaccgggcagcgacatgatctgaagaacatcaagaagtttcttgtccttggagtgctgactgactctgttataaagcgttcagaaattgatgcccagtgctcgtcgtcttggttttctgttcgcgtccatttccttctccaaagagccatgtggccaacgtttcaatctgttgtgatctggtctgtactgtttcaatctgctaacagtaggagttttaaagatatttagtccaaaacagaactccatcttttattcaaagcggcataaactatcccattttattgagcaaacatatgcctatcctttccttgtaccaaagaaaaaactacagggagacaaacaaaccacagaaatgcgaagtggctatcggttcagccactaaactttcaattcaacatcaacaataacccagacaccatgctctcttacgctcggctcgacttctaataaaatgcaatgaatcaagtaccagcatgcatcagttcacagcagccacttccttcagtgactccactgtcttcaagacttcctcccccatccgcttgcatccaaccagtgtctgccaattgataacatgagccactcagaacgagatgaatcaaaattcaaatacaattcatgacttcgcaaactagccactattttcttccacgagactacgaaagagttaatatacttgaggcactatgaaccagagccaacaaagatactatattacactacctgaatgtttgactaatgaggatcttcataccttgtctaggtgaggaccaagtacttgacattaaacatgtagagtataaagctaaaacgctttagccttttttttaatagaggtgggaatagaacttcattaagagaactaaacaatgcaaaagcatgaatgttggattcactccaccaaaattcatgggatggactcatgatggaccatcacaatctcaactaaggatggggtgattcctcaaaccagacacactcgtaatccattgataatggttctgcaagaaaatctatcttactgttccaggagaatatatgt

SEQ ID NO: 34385 - DNA, 2389 bp, Zea Mays
tataagtatttgccgagcacgcgggccatgacctcaccctttactactcccgccccactcttcctttttttttttcttttccgcgcggggatttgagttggaggaggcaggcagctgggttggggacgaggacgacgcgcagcgcaggagcaacgcccgagggaaagcagcgtacccatccattctccggatgtcccatggcaattccggacgccggagcggttcgccgcgtcagatgcccgaggtgccactgcgtcctcgaggagcccggcgccccagtgtaccagtgcggtggatgcggcgctagccttcgagcaaagaaccgcaccggcaccagcgcaggagacaccgacctgcctccgcctcctcagagcagccacctggacgccagcgacgtcgcgaccaccagcaggtccggcaccccgacccctccgcatggcgggagcactcctaacgccaccgcgactggccatgccgagtccgccgaccccgtgccgccgaggaatcgtgtttctgaccaagtggcgttggtcgagaagagggggcgcgaacagacttcggccgctcaggaggtccatgacggcagcgcaacaagaaatgccggtggaaacagagacgccacctctgaatcgctggatgattcagacaagaggacgaaacgccagatcgaatcgaccgatgctgcgagaaagaggcactcaggtgaagctgcagcgcagccgcagtaccaccagcaccaggacggtcatcaacaacttgcgccgaaaccatcagctgctcaacctgcacggggacaagaagaagaagaagatgcaggggaaaaggcgccgagcccatctcgtcgcgctgagctccaagaacaacatctggggcccctgcggaagaagattctcaagacggtggatgagctcaaaggcgacctctcccaacttttcagcaagtcccctgagctcaacgcgccacgcgcgcgcccacctcgtcttcccaaacaagaaggctacgtgtcccgcgcggcggcggcggcggcctcggtcctccctgccagagcgcgtcacgccgccgctgctaccgacggttaccgtggcagcgcagctcgtgcgccgctgaagccccgtcaagccgctgctcctcctccgcgtggcttgccgtcccggcgctaccgccagtgcagagcgcacccgggctcccatgacgtggagccgaggtcgtgcagtcacgggcacggctgctgccgccaccacggcaagccggagtgcagcagctgccgagggtactgctgcaggcccagagcgcagccgccggccgccaaggaccccaagcggcgcttggcgccccggaaccactgccggccggtgctcaagggcgcgccgttcatcgtctgctccagctgcttcaagctggtgcaggtgcccgccgacttcgccgtctcgtccaggacggtgcgcaagctccggtgcggctcctgctccaccgtcctctcctactcctacagggacccggccaggaagaaggcctaccaggactccgtcgaccggtgcagcacagtcggctccgagctgcacggcggcaaaggcgacgaagggccggacccgttcgcgccgttcatcgacggcttcgggctcagcagctactcgacggaggacgagcagcggctgcccgtctcgaggaacacgtcgttcgacaccctcgacgggaccaaaggcgtgggacgcctgcaccggctgatggggtacgggtcggctagcgagctgctgcgccactcccctgacctgtacgagagcttcagcgagcggacgacgcctgacgtgagacagcacgacaggaaagggaaagccgtttgcatcgacgatgacgacgacaactacgacgtcgatgactctgacgaggaagagtacattggcgcgctgaagcgatcagcggctaaagggtccggctggtcgctcccatggatgcccggcaaggggactccagcaacgggaggcattaggatcaggtaaataccaggaaaggattgtgtatattgcaggaataggttcaggtttggaattcgaatgggaattcctatcgttgtagttttctattcattttcagtgcggtattggatttataggctgtttgtttgccatttttttcgagcgcgaaaatgctgtaaaatgaaatgtaattattcagcattggcagtctcattatggctttgtttgggaacaagaaaattgatggtgcctgatgaagaaacggaagtgtataacaaagaaatatcgcagtatcttttttgaaagatattgttgcggtatgttgaaacacaagaactacaaacatgaatttgtttgcatgaggtgcaagcggagagcacttccattaataaatcaatgcttgtaattctattaaa

SEQ ID NO: 34386 - DNA, 1485 bp, Zea Mays
ctcgcaccctctcacacatgcgcatggaagtagcctcctcgtgttggaataaaggcccccctcgctctggaaggaaggcccattcgtgctggaggaatcctcgcccaaaatccatagctgtcgcaccaccttccatccttggcagttggcacccccttcggcagcgccccccttctagcccccttccaactttgacgcccgcgtcagacggacaacgcacgatgcaagcccgagacccctccctccccacgccgccacccaccatgccctctccctcccctcacagccgtccctctccccaccccctggccccaccgcactaaacagcagcgacacacccgtccctaccccaaggaatcaagaggtcaatccccctgtgcttcgaccattctggaccgtatgagtaaagattccattgcgaaggaggtggcggaggcgcaatcggtactaacagtggacgccgtgtctgctgtattgtcaagttagctgctctctcgtgccctctgcaatgtttccctacctctttgttgtacgtgcctttgtagccctatgtactgccatgaaatgttgggctcgtcgtcgttgtagacatcgtgtgtggttttttgtgtgtttggaatcatctctggtgttcttcttgattcatgccccctgactgctttgtctggcagacgacaagcagggatggtgccttatcttctttacagcctaacgaatgatggttttgaggtcattgtctaattaggtttaatcttggactaatccagtaatatttgtttgccattgttgaatcgaatactgctctttccattccccatcgtttggtgtgtttagactgtatgtgttgggtgaatggtgcccaaagtttatgagacatggaatgagtacaaataatctggttgttgttttttccagggtaatttttcaataacacatcgggagattattttatgatggcatgtggtgcatggtcaaacggaaacttttcatgcaaaacaaggagcggctcgttcatgtcctgaaggggattacggtcggaatagagaagtgccaagcgacaccactatctcaggaagtgttgattgtatggggagaccacaaccagttgttcctggtggaggcgtttgcagttcataggactctgaattggagcgctagactggaggtcatatagaagacaagccatgttcctcagctggaggattcgacttgcttcaacaaggtcatcctggactttctcaaaaagcctaatctgtcggttaatggtagctcgcaataaggtaccaagctgcattggtgattagtcaatgatagtcgacttgattgtttgtaataagatatctagacagttcagtccattcaacaaatggtaactttcaaaaagaaaaaaaatatttctactttatctaagaacgtcgcaacagatatgcatgtatattgtaagttttggtcgtatggtgttttgatcgtcacttctcctatata

SEQ ID NO: 34387 - DNA, 1184 bp, Zea Mays
cacatatatatttacttgtagcatccagtgtttggtgttcctattgaagctactgtacaacgagagcaatctgatagagcggtgcccctggtgcttgtgagatgtgcggactacctggttatatcaggtgaactggctgaaaattatactgaaaacttgtctccattttaattttactactgtatgatttctgaatcgttttcttcccaggtttgaataatgagtacttattcaaatctgaaggtgacaaaaaagttcttcagcagttagtttctctttacaatgaagactcgggtgcatctttacttgaaggtgtaaatcctattgatgtaggtgcactggtgaagtgctaccttgccagtatcccggagccacttactacattttcgctttatgatgagcttcgagctgcgagggttagcattcctgatcttaggaacatattgaagaagcttccaaatgtgaactacatgacgctagagtttgttacagcgttgctgctgcgagtcagccgtaaatcatcacttaacaagatggactcccgcagccttgctgtggaatttgcgcctttgatcatgtggcggcaaggtgacactggcacagatttgcgtaaccacctcaagtttaccctgaaaccgcctccaaaaattgtggatacaacatcaaatgctgccacatgggacctgttagatgaggatgacgaggatgcttcatcccagatccccttagacgatgcttcaccaccagactacagctccattgaggttatccagtgtctgatcgagcatcacaatgccatcttcaccgacgcaaatgaaaccgtgtggagatgatcggcatctcctctagatctctctggtgttagatcgtgctattgtacaagttccaggtaggaaggtgggaaggtggattagcgctcgctattgttagggataagcattttggccggaatatttttgaagtaggtttgtatatacactagtgttaactgttaattctccacgggactagaaccgggtcatgccatatcaataaaaatatatttggatggatgtaaacgaaatgtgttgtttccatcattgattgtattcagatcatataataataacaaagcctttgtccccagttgggctagactaaagttgaaatccaataaaagccacaaattatggtttagtcatata

SEQ ID NO: 34388 - DNA, 4789 bp, Zea Mays
aacacagaagcgtcgctcacatcaacatcacatgttcacatccatcttcgaaccccttcttcctctcttcagcgccgcacccgcgcccgcgccgtcgaaggcggcgcctagtctcgaggcttgcacgctgccgcggaggatcgcctcgctactgcgcgccatcgcctccgatctcctctatctccaatctgctccctcatcgccgtgcagtggaaactaggggaccgattcctcttctcgtttgtcgcatatttctcgctgcgtgccgcgtgctgcggtgagtgattctccaagaattctggggacgctgatctgagtccgcacagaacgcagcggcagcaatgatgatgtcggacgatgacgatgctgagccccagctcaacgcggtggagggctactacttcgttgactccaagaacgagaaggagcctgtctgcttctccaccctgcctttctggttcggggacactgatgatcttcctgacggcaagaagaagctggtgctgcgcgggactggtgacccgggcgtcaaggtgtacgatgaggtggtggcctgcaggctgggtctcgaggggaaacaacccgagtttgcagtgctcacagcaaaaggcagacgttggatacgtctcattaggcccttgaacagctacgaggaaatgatcaggactgtgttgatcacagcgcagatgctgcattttctaaggaggaagcctcatgagccagaaaaaaccttgtggaaccacctttgcaaagtttttaacaagtttgacgttccaccctcagaggacgatttcaggaaccactgctcactgatgaagcagtttgcggcaaaagatcctgtcttagcaaaatcagagattttgcgagtatttattgaaggaaaatctagaaaaaaattcactgaggttggtgcagaccatattgatgtcaagcagccgttcatcactgatgatgagggcatagatgaaatgaatgtggaagatgtcgataatgaatctgatgaagatgacgatgaatatttgtttgattcaatatgtgctatttgtgacgatggaggagacatattatgctgtgatggcccatgtatgcgctctttccatgcaaaagaaggaagtggtgaagactcctgttgtgttacccttggatacactgaggcagaagttgaggcaatgaaattatttctttgcaagaattgtgagtataagcaacaccagtgtttcatctgcggagtgttggaaccttcagatggagaagcagccaaggtgtttttatgtaacaatgctacatgtgggcacttttaccacccgaaatgtgttgcccaacaacttcaccccatcaacattgatgaagcctcagaattggagaagaagataacagaagggttttcatttacatgcccaattcactggtgctttcattgcaaaggtttggaggatagaacacaagaacctttgcaatttgctgtttgcagacgctgtccaaagtcatatcacagaaagtgtttaccaagcgaaatttcctttgacgaaaatgaagaggacgatatcatcatacgggcttgggaattatcaaaaagaattttgatatactgcctggaccatgagattgatagtgaacttgagacacctgtcagagatcatatcaagtttccaaagattgaaaaaccacttcaatttgtaaagaagggatctagcttgttgcctaagaagaaaaagaggacttacagtgagacagttcttgagcaatctcccaaagatactgtgaaaaggaaaagcaaggttcacatgctagaaagggaacaaaacaaacaagacaccagagaagtttctgcaaagagtttcactcaaaaccttgttgacacacctgtaaagaaaaaagccaagttgaaagagaaaatacagttgccgtatgtggccaaggatcattttataagcagtccaaaatctgtgaaagagcaagaacaagagttggtacctttgcccttatctgccatcaggaagagttcatttcctaaagtggacagtgaaactgaaaagagggtgattaccatattgggaaataaagtgtcttcattgacaataaaagatgtaacgaggaattgcagtttgccatcaactcatgtatactctggcagattgactgacaagataccactgggaaagattgaacgttctgttcaggctgtagaagcagctttaaaaaagctggaaaatggaggtagtgtcaatgatgctaaagcagtatgtgaacctgaagttttaaggcagcttgcaaggtggcatagtaaactcagagtgtatatatcaccttttattcatggcacaaggtacagttcctttggtagacattttacaaaggtggagaaacttgttgagatagtagatttctgctgtggggcaaatgattttagccgtcttatgaaagaaaaactcgacaaagttcagaagaagtgccatttcaagaattatgatcttatccaaccacagaatcgcttctgctttgaaaagagggattggatgactgtgcagccaaacgagctgcctcatggatcccaactaattatgggtcttaatcctccttttggagtcaaagcaagtcttgcgaacaaatttattgacaaagcattgacattcaagcctaagctcattgtactaattgtccctaaagaaactaaaaggttagatcagaggagaacaccttatgatttgatttgggaggacagtgagtgtctttctggcaagtccttctatttgcctggttctgtggatcttaatgataaaatagttgaagggtggaatgcatctgcgccacccctctatttgtggagtcatcctggttggacaaagaagcacatgcaagtggctgaagagcatggtcatacttgtatggggaagatagcttgccatgttgaagagagtaatctatcagatgacctgtccgtgaggaaacaatctgatgctacaaacaaactgaactcgagatcagggaaagagactccattcaatgacagaatgtccaatctacttgatgatggttctgctaggaagcaagcaagatctgaagaagagaagagaactctagggaagatagaacaccatgtgaaaaaggctaatataccagataacctcccagtgaagaaagaacctgaagcttccagcaaagtcatgtcgcattctggaaaagatagaaagattggcagatacaacaggaggagacatgacaacaggagcagcaaggggacacctgatcacacagagagcctcccccctgaaaagcaagtggaagttgcatatgaggaaacaagagttattcctagcaaaaagattgctcataatgaaaaaaagagcgcgcagtacaactacgagcaaactgcagcagggatgccaaacatgaggtctagaggaggggattctgacatgagtatctcacccccagtcagttgcaatgctcgaagcaaacccatgagctattccctgacgagaccaattgaacacttggatacgaatgctcaccttttggcagaagaacctagtgactctgtgctcaatagggttccaaatcatgacagttatttggcaatcaaagaggaatactgtgatggatttaagaggaaaaatgatcctatcttcagtcacattgatgatagctcaaggatgaggggctccagcatcgaagaagtgaccaagccgtatattactgctccaaacagtgatccgtggtctaaaggagatggcagcttttacaggcatccgagctcagaagatttaaacgctaatgctgatgtgcttatgccaggatacagtgcaagatatggacaaattggtggtgacagtaacccacaagctagtatggtcccactagcaacagattcaagactgcatggtggaacggttgctgataattacctctcggcaagatactcccttggatcttcaggtgctcgcgttagccaaccagctccaactgttcccccttttgggctctcaggtgcaagttcacaacgaggctcagtaatggacaggtattcgtatgggctttcgggtccgactggaacacagcgctcagttattgacaggtatgcgccgtccctcgatggaacgaacacaacaagatcgaggagctccttgcctgagcagtacccgttcggacaacctggctcttccggtggcgggtggcctcatcactgatcgctggaacttggtcctcagatttgaccagcaaaagtgcaaccgatttcttgagtccggtggagcctacaacctatctacggcctaactttttggatcctactagtcgtttcttcctggcgccttcgacgaagacatcacctgtgtctaccaatacagaagtgtagacttcaattcctacaaatacagaagtgtaggcttcaatcctattgtttgctctggatttctgtttatgagcgtatttacaagagtatgtttggtctatgttagtatattaggaatacaattccaaaaccgttgtaccgtgccaaagtttaatactatacgtttgggtctgtcgatgagaaaaaaggacgagtgggtgagaagatgctgccctccgcagaactcgatcaggccggttcctctgcgcgtcctgctatgagaggctaacctgagcccgacagaaccggcttggtcgatttgggacctggtaggccggtatttttttattgaagtgtaactttctaaattaggtcttgttggtttgcgttggattgcgtccggaatcgtttcaagtttatataaattagagaagcaatccggttagaaatcgtttcgat

SEQ ID NO: 34389 - DNA, 1153 bp, Zea Mays
tcgccgtttccgacccatcggcagcgccggagatcctgaaaagaggccagctgagtacctcctgctgctcgaattttctcgtgggacagacaattttcagataaggacgtcagggagcatcatggacgacagggagcagatgaggatgaccgtcctgaaccaagaacaggtcttcagacatcaggtacacgagctgcaccggctgtaccacgtccagaagcagctgatgatgcagcaggcacacacgcctgctccggcgacccgtgctccagcagtgctcgacgacgccaaggccaagccaagaagaccgcacctagacatctggtgcagcgagacggcgagaaacccccctcagcaacggatcatcagcttcaacacggccacagcaccggcaccggcaccggcaccggcgcctgcaagggccgaggactgcaaccttgagctgacactggcaacgggacgaccgagcagcagcagcggtagcagcagctgtgacgccggaaggcggcgggggaagcggctcaaggtgtcaaccaactcggactccggcgccaccgcggtgtcgtccacgtcgacggactcggagctggcgcagttcggggacatcgacgcggcgaatctgccggtggtcaggtttcagggcgaggttactaggaggatgggcgaggtggggcagggcccgtggatgtaccggtgcctgagcttgaagaccgcgtgacgagtttgtgctgtatgtagttgtaggtaggaaatggggagttgcggttgtagagttcagacttgagaggattgagaaggagacacatcacatgtcttgtgttttacatgcacggattgggatcctcggcagtcgactgctctcacgcatcaacaccggtagactccaactgtcagcctcctggcagtcaactgcgcgactgccgagtatccggatcctacatgcatatgcaccacagaggtgtttcagaagatcaaaaagagagaaaggaacaaaggtaaattgtggcaccaagtggtattgatagcattgatgatttcgattatttgatctagtctattaacccatgcatgagctaagacaccaaagtccaactctaggtgtctatgtttaactcattaaaccggaaaaatagagagctaacaaaatttagct

SEQ ID NO: 34390 - DNA, 1644 bp, Zea Mays
caaaaatctgcacagtatacaatacaaccactagagggcgaaaacgtcattcagcattatcctcacacccatttccgcaaatttttgcacctaaaaagtctactcggagaaatactacgtactcccacctcacctcccttcccttcccctctccgagtccgctctccgctccaatgccgttgcctctctcctccacctgcttcttctcataaacgcttccggcctcccggagtcccggacacaaaccctagcattcaaccacgccgagctcgccggaacaagcccaacccgagcccaatcccgctcgggccccagccgatccgacggctcctcaccagcacaatccggggtaccccgcggatgctagcctgatcgggtccccacggtcgatgggttcgcccgggtccgccaatggcagacgcggcgactatgtgaggatcccggaggaggcggaggtggcgtccaagggggagggagatgccgcggcggccgtcaaggcggccgcggcggcggagtgccctagggtgctgcggtgcagcgcgatccggtggtgggccaaggtcgccgtgctcgggatcgtccttgctggggccggagctgccgcggtcgtcttcctcggcccgctccttatcaagaaggtttagaatattaggtcagatcagacgcttatatgtataataagtcaatagcacgtgcaaggagcagctgtaagattgttgtacctattcttcactgggaatcaacaacgttcagcaggccatctattgctctaatatgtttcggcacaatcgcattattcccaagtgttttgttaccttcttcgcccttcatgtggcttgcggggatgacttttggatatctttatggttttttaataatcacagtgggtatgagcataggcatgtcattgccgtattttataggttctgcattccactgtaggatacatagatggctggagaagtggccaaagaaagcagcttttgtaaggcttgctggcgagggagattggcaccatcaatttaaggctgtagctttactcaggatttctccatttccatatatagtttttaactatgcttctgtggctacgaatgtcaaatattacccatatatcgctggttccatggctggaaccatacatgaaactttccttgcaatatacagtgggaaacttttacagagcttggctgtagcaactagccaagggtccttcttgtctgtggatcagatcatctacaatggaatcggatttatagttgcagcagcttctactgccacgatcactatttatgcaaagaaagcacttcaaaggctccaagcagaggaggagatattgtgagcgcatgaggtccaagcccaggatcaaaacccataacgctagtttcctttcaggtgtattatacatgcctgaacagttgctactaatctggtttcctgtgtcgactacctgactgccactaccatctgaggagagggaagggtgggtgctgaagcaattgtaaagaaaaacagacccagaaaaacttacgttttcggttcttgtttagttttctgtaaagagaactatcaacttcagtgtattgcattgcgcgatgtagattcccaagtctaaagttgtttcctcttggatgctggcagcgt

SEQ ID NO: 34391 - DNA, 3123 bp, Zea Mays
atgacctgacctactctttttctactcctactgctgctgcagcagctacattacccttctcagcacattgctattgtgtattgcaaaattttggaggctttgactaaaaaagcttcgttttttcgagcttgctcctcccccgaaaaaaaaatcggggcccaaaaagttcgcaattctgggggctcccgtggccgcaggtccgcccgaattagcgcgcctctcggagatgatcctgcgccggcaaaggcaatgaagatctctaatctggatgcacacttaatcttgtccagctcttgatcagttgatcttgtgctttgctgctcctgctcaagttaatttgttggccaatcaagttcagaggcgcagatgagtgaggagtacaatatggatgatgccctaaaagccaaaaatgttgctgagaccaagttccatgcccgtgacatcaggggtgctcggaagtacgcactcaaggcccagaatctctgcccgacacttgaaggcatattgcagatggtctcaacgcttgaagttcatcttgcagctgagtccaagattgatggagagagtgactggtatcggatattgtctctaggcgcctttgcagatgaagaggaggtgaagaagcaatacaggaagctagctctgctgctgcaccctgacaagaacaaatcagttggtgctgaggaggccttcaaactgatctctgaggcgtggagtgtgttgtcagatactagcaggaaggtggtttatgatgagaagagaagaaatcattctgttgtcaatgtaaccaatggtatctatacttatgataagaaggcaaacaagagggctcgaaagaatgccgctgctgcagctgctgccgccgccgctgctgcagccgcagctgagactaccactcatcctgttggggttgatacattctggacatcttgcaaccgctgccggatgcagtatgagtacctaagaatttatcttaatcataacctgctgtgcccaaattgccataatgcattcttggcagtggagactgggttcccatgcaacggaagcagttcatcattctcctggtcaaccaagcagcagccacagcagaaccacaattcaaccaagcattcatatggctcaacaagcaggacttctagcatccctgggacagggcatggggggtaccagcaagataatgcttatgattcctacaacaatcaaggcttccagtggaatcagtactccaagacaacacctgcagctggtaccaatgcttatggtacacatgccttggagaaacagagaaagaagcatgatgagagctacagctacaactattctgaaagcggcaacttatatgtccatgagaaagctgcttcaaggcgtggtcgcttctcaaagcggagaaggcataattacgatacttacactactgtggattttggtggcgataacaaagaaacagttgccgcaagcacagaaccaactgctgttttcactgatgtgggacgggtcaacggtacttcagcggaaaggtttagatctgcagtgagtggaagaagagcaaatgttcttggtgagattacccagattgatacacgaagtctacttcttgagaaagccaaggcaactgtccgcaaaaaattgcaggagttaaacattacatcatcttcacgatttgcagagagaagaggatctgaaggaaagctaaatccttgtggcaacaacataaaggtcaatggtgtcctctctgacaaacctggcaagggagtcaagctatgtagctcaagaagcatagaaatccaagtgcctgatactgatgacaagaatccagagcagcgccgtgtacctgtgtcaattgacgtcccagaccccgacttccatgatttcgataaagatcgaacagagaaggcatttgacagtgatcaagtgtgggctacatatgacagcgaagatggcatgcctcgcctatatgtaatggttcagaaagttctttcgatgaggcctttccggatccgcatgagctttctcaactcaaagtcaaatatcgaactggcacctataagctgggttgcctccggtttccagaagacatgtggcgatttcagggttgggagatatcaggtcagcgaaacggtcaacatattttcacacagagtgagctggactaaaggtccccgaggcgtcatcaggattgttccccagaaaggggatacatgggccttgtaccgcaactggtctcctgattggaatgagcttacacccgatgatgtgatatacaagtatgagatagtagaagtcgttgatgatttcaccgaggagcaagggctgaccgtcatcccgttgctgaaggttgccggattcaaagctgtcttccacagacacatggatcccaaggaggtcaggaggataccgaaggaagggctgttccagttctcacatcgagttccttctcgtcttctgaccggtgaagaaggcaacaacgccccgaaaggttgccatgagctggaccccgccgcaactccagtggaccttcttaaggttatcacggagctcaaggaagatgcggtgggcgcagactgctaaataggagaagggggcaactctgaacactgaagataggtagctggatgtctggacgatcagatcccacttggttaatgacacggtgcaagcacatgatggtatctaaagctctactacgtcatcttatttttggctgatgacttggacaatactgccagggcaagcagcctgcgtgacggagttctgacccttttaattcttaggcatttctaacatttgatttcatctctacacgaactgattaaatggccattgggaggagactgcacacggcatcatcggtgaggaggttagtcgacgggaggttgtttacttgtttgtgttgccgctctgtaatgtactgtaggaggcaagtctgagtcgagggacaagagctgcaaggcttggcttgcccgtgtaccccgcatttgtgtaccctgtttttttacttgtgatgttgtatttccttcggttttatagtaattcatcgccatgatgttgaacctgataaattgtagactctgaactctggtaaccatgtcggaaaatctagcggctttatctaaaaaaaat

SEQ ID NO: 34392 - DNA, 1403 bp, Zea Mays
cccagtccacagacctgtgtacactcgtactcgtctcttcttcgccacacacacacacggctgctagtgtacacagaggcacagcagcaggaggatggccgtagtgccggcggcgccggtggttcttggagtggccatggtgctcgtcgtcctggccgccagcgccggcgcggccgggcagctcaggatggggttctacgccgagagctgcccgggcgtggagcgcgtggtgggcgacttcgtccggcagcacgtccgccgcgtgcccaccgtcgccgccgcgttgctccggctgcacttccacgactgcttcgtcaggggcgggccgtcgtggcgcgtggcgacggggaggagggacggcacggtgtccgccatgcaggaggcgctcgacgacatccccaagcacaccatgaccttcccgcagctggccagcctgttcgccagcaaaggcctcggcgttcgtgacctcgtctggctctcaggcgcgcacacgatcggcatcgcgcactgctcctccttcgcggaccgcctgtacggctaccccggcggcggcgttggcgcggccggcaacgacacggccgacccggccctggacgcgacctacgcggccaacctgcggaggcgcaagtgccgggcggcgggcggcgggtacgcggaggacggcgtggtggagatggacccaggcagccacctgacgttcgacctgggctactaccgcgcgctgctcaagcgcaggggcctgctccgctccgacgccgcgctgctcaccgacgcggcggcgcgcgccgacgtcgagggcgtcgcggccgggcccgaggaggtcttcttccagctgttcgcgcggtccatggccaggctggcggcgctgcaggtcaagaccggcgccgagggggaggtcaggaggaactgcgctgtcgtcaacggcggctaatgcatgtagcttcttgcctttcttcttctttcccttcatggccattactgctagcgaatactgtgattttgctcttgcattttgggtgcttcacgctcgggtgcaattatcatgtcaaagaaattgttaccctcttgctccttttgttagagacttaatagaattgtttggactggcactagcactaccttcccggtttttaagtggtgattcgttgaagatggtgggcattgttttttttctcaaaaatgctggcagataggtgtatctcctacatctggtttgttgaagattaatattgatggttcctttgtccaagctaacagcatgggtggggttttgtgtctcgtgatcacagaagagacagtgtgttggcgcaggggcgggcaagttgctggacatacttgatgctcttgtggctgagacattagcctgctggaaggcatttgcaaatgttgtgactcatgaatga

SEQ ID NO: 34393 - DNA, 1197 bp, Zea Mays
agtgttgcctgcaatattgtctcgactcatattgcataacaattggagcagtgaaagcctcatatcatttttggactgtccagattggtttggcgctgaagaagctatttgaagagggtgtagtgaagcgagaagatctgtttatcacctctaagctatggaatgatcatcatgctcctgaagatgtgcctgaggcactaaatgacagcctgaatgatttgcagcttgagtacctggatctttatcttatccattggccatttagagtcaagaagggaacaaataccagccctgaaaattttgttacacctgacttccctgctacttggggggcaatggaaaagttatatgatgctggcaaagctcgcgctattggtcaaactaagctccatagcttttgtcagtcaactggtgttcatctaactgcttactcaccactaggttcacctggtacaacttggatgaatggtaatgtccttaaagaaccaataatcatctcaatagctgagaaactcgggaaaacttctgcacaagtggctctgcgctggaacattcagatgggtcacagtgttcttccaaagagcacgaatgaagaaaggataaagcaaaaccttgatgtttatgattggtcaattccagatgacttgcttgcaaagttctctgagattaagcaggctaggctacttagaggcaacttcattgttaatccagagagcgtttacaagacccatgaggagctctgggatggtgaactttaagaaggacgccgttgtccctcctgactcctgagcagggagcaagcagcgttccattagggctcgtcagatcatttcacctccaaagttgctcttttgaaatgaaggttcagtgctcggaagctctggtgccatcctgtatcacgaactattgagaaatttgtcggtgattttactttgtgctacgggatgtgctgctgcagtctgtcctagtgtcagttgatttttctggtaaaactgtgaccaaataagttaattcgccaggcatcattactattggaatttcatcgttttatctcctcactatttttttatgctccatgtattctctatgatgagaccctgttgagtagttcactcatatagtcacacaaaacactgttttacattatccacagagtaagctgctgaacgtgctaagtgctaacttgcgtcgcctgaa

SEQ ID NO: 34394 - DNA, 2225 bp, Zea Mays
gctggggctccacgggatcgcgtgattgcggtgcgggtgaccgtggcgggcgtaccatgcgcgcctgggcatggaaggacgccacacgtcgataattttcggggattgggcacaggtatagacagtgtaatcactttgtcagaaatgccttctgcatccaagtccaaggcaaaagaaagatcagctgcaaaagttgcaaaagagcaacccaaggttgctgcaaagccaatgggaaatgctacacttgcaagttcttataacaacctgtctggaaagttccatgttctggaaccatcaagctctttgttgggtagccaaggcatcgataaattcaggaatacagatgaaatagatgagcattctcgcagctcccatggtacaggggatttcgattgtgcctccaacaatggtagctgttctggtgactcagaggatacaaaggaaaaatcaaccagcactgcgtcccgagtagactctgttcctggatgtgatattgataaacgtgagaagattagacagaaaaatgagaagaagcatcaaagacagaaggagaggcgtgcccaagagttacacgagcgttgtaagggatacattatgtccagaaagttggaagcacttgcgcagaagcttgttgcgatgggtttctcagcagatcaagcaacgatggctcttatacaaaatgagggttgcgttgaggagtctgttacctggctctgcaactttgatgccagtgaggaagctaaacaacaacttgtagctgatcaacagtctggagttaacttgaagattgatatagctgatgagctttcaaagattgtgagcttggaggcaaaatataagtgtacaaagcaagaagttgaaagggcagttgtttcctgtgaaggtgatctagaaagggccgaggaggccttgaagacacacaagcaagaatcaactgcaatcccaccaaagcctgaggggtctggctattcaagtggcttgcctaataagccgcaagttgtacttgcacagaaccctgcaaggcctcaaacaaatggattatcatcagtaggatctcatcagatgagaagagaggagaaggacataaactataagcttttgatgaatggtagtggtccaaaggaacctgcaattaaaggttttcagccactggcaacaccgattaagccagatttggtccgtcagcaatttgttcaacctgagaagagacgtctcaatcccaactcgaatccatcagttccttctgtggcatcgtctcctttgcctgttgcagtgccacaagtgaagccagacatgcggcatgtggcagggaccaatgaggtgaaaagtttgatgcccaatggaagcttgcgagagtctgtgattgtaatgcagcgtcctcaatctgcaggtaccaaacagagcctaccatccactagccatagtatgtttgtgtcagaaccatctgcaagggattggtacttaaatggcgtgtcaggtgtggatatgatgttgaatgggggcttaggtcatggactaaggaatatgagtttggacagtgctagttctgccaggtcgtttgggcatgcaaaccatcaacaaaatttggtttctaatcctatagagctggctgccaatggttggggtggcacctggagttctggaggtacatcatcttcccgttctgtggtgtcatcactcggggcatttagagggtggaatgcatccgagtcctctgcattgcctcattctgattggagaaccaacggggcagcaccttatgactacacctcagtagactggagcgtcgacacaacactattgaacccagcagcaaagagcgagctgctgtcggacacatggtcaaccatgttcatgggtggcagatcaacaaggacacctgggaacctcagtggtgcaggcatcgctgggttgtatgacagtaaccgtccaatggatcctgctccttcggctcgtccatatgagtggcctactttctgcaggggaggatcttcctagtttccccaaccctgtaggcaagaggccattgaataaaaaaagtaaaagctgtcatttgtttcttttcttgttttggtctcagttgcagttggttgaaaaagttttactttgtctatcgaaccgagcttgtgtacccttgactgttggccgagataagtcatctttctgtgaaatcgttgtgcatgaaaaatgaaggaagagaactgaatctatcttggctgaaatgc

SEQ ID NO: 34395 - DNA, 2123 bp, Zea Mays
gtctcggcttgcctctccaaacctccgcatcctggaacccgccccgccacgccaccgccatctccccgcgccgccggcctaaaacctagccaagccatctcccccgcccgaaccttccaacgccggccgcttcctatctcaaccactcgccgctccgtctggtcttccttcacaccgattacgtggcgcacctactcgtgctcctcacctacgtctccagcgcttctgctctccgccgccacttccgtcgctcggtcaccgttgactgctgctacggctagctgggtgttaactgaatcgtaggaatttaggaatatagttggcacagcccgccacggcatggaggtcgacggcgaggcacaacatttccgcctcttctccaagagggccaagcccaagctcaagcccgaggtccagccccagccggagccggaacccccaagccgtgaccccgccgccgccgaagcctacctcgaccctgctcccacaatcgtgaccgagaccggccaggccgacgacgcggcggacgctgccggcacggcgccggcgaccttcgcggaccttggcctatcgcagtggctggtggatgcgtgcgaagccctgggcatgcggcgccccacggcggtgcagcgccggtgcattccgcgcgcgctcgcgggggcggacgtgctcgggatcgccgagacggggagcggcaagacggccgcgttcgcgctgcccatcctgcaccgcctcggggaggacccctatggcgtggccgcgctcgcgctcgcccccacgcgcgagctcgcggcgcagctcgccgagcagttccgcgcgctcggggcgccgctcggcctcaggtgcctcgcggccatcggaggattcgactcgctcgcgcaggccaaagggctctcgcgccgcccccacgtcgtcgtcgccaccccaggacgcattgcgacgctcgtcaaaaacgatcctgacctcgccaaagtattctcccgcacaaagtttcttgtgttggacgaggccgatagaattctagatgttaattttgaagaggaacttcgtgtcatatttggctgtctaccaaagaagcggcaaacctttttgttttcagcaacaatgtcagacaatctgagatctttgcttgaactttcggggaacaaatcatacttttttgaagcatacgaaggtttcaagacagtggagaccttaaagcaacaatacatccatgttcctccacagggaaaagagcttcatctttggcatcttttgtcagttatgaagggaaaaacggaagaccctattcgttcagccattgtatttgtctctacttgcaaagactgccaatatttagatctgctgctggaagaacttcgttatcctgcggttgctttgaactctcacaagtctcaggcacagcggctctcagcacttaaccggtttaaatccggtctccacgtgattacatccaccgggttggacgaactgcaagagcttcaaggggagggctcgctataagctttgttacacagaaggatatatgtcttttacacgagatagaagatgttgtggaaaagcagttggaggcctatgagtgcagtgataaagaagttactaaagatattacaaaggtgttcaaagcaatacgtctctcgaaaatgaggaggagggacgagggacatgatgagaaagtagaagcaagaaaagaacagaagagaagagatcgggcaagaaagaggaaacatgaagactaaaacccatagaaggacgaatgttgaaggccgctgtgcccgatctaaaacgttaaacatgagaggcagttgcttgttcagtctagcgagtagctttaacctggaggagtcgatgatgactcgctccagtgagcccattcagtcgactgctctcagttttgccggcgttgtgctgtggatgtataaatttagggggtggctcggcagatgtgccactgaattcgtggcgcagcagtaatggacgaaacttcaccattgcttgtcagtacttactttgttctaaaggaattataattctcgctctttgacgagttaatctatctctgattaggtgaaacaaatatataatcaatatttacaatataaaatagatatgttataaaagat

SEQ ID NO: 34396 - DNA, 794 bp, Zea Mays
cttttctagaaggctcttatatctcgatgaacacatgtggtggcaataaagatagccttaactttttctctctccccttgttcttagtgctgcatcatgatgaaacagtgtccaatgcttggccttgatgatggcaatagaatgcttatacgcattttctggggctctatgacttcaaaagcaagacgcatcaagatgcgtgctgccctgagggtatgtgcagagctgcagtgtttgcgctgcatgtaaaggaagagctggcctcatggcctgagcagagcacccgacagaggacctggctcacggtccctgaagctgcatcaagttgccgataccagtggatgcaagaggccttgctgacaggcttctctgactggcacgacaagtggagcagaggcggcggcggcacaaactgtgacccggcctaactgctgacaggcccatctgcagtcgtccaatttgttcatctcctctctttccctaggcccccaaccttgcagaatgcaataatacagtgtacttgtcttgatgctgggttggtcattgacatgttatcttagttgtagtgggacgaggtacatctcatcaagacgagaattctcacaacttttaagtgtcaattctcgtgccctattatttctcggtttcatccgctgtcgtcgcggtgctgcagcctgcaggcacgcgccgcacgcattttgtaactccgctcctgattctggagatgcatatgctatatgtatgaactggtataactttgaaatcaaaagttgccactgttgactcgagtcgcc

SEQ ID NO: 34397 - DNA, 1382 bp, Zea Mays
gacagtgagtatcacttgttgtgtgtctctctctgtctgagtctctgccaccaaacgtttcttttttagctcaccatacaattgtgaccccgcttgctatataaacagtcaatcatgcattcttggcagcaaagccaaaaacacaaagcccggaccggacgggaagggaggcccaaccatccatctgtccagccgcacctcccagcagcagccatataagctactccctactagctacgaggggatacgagaggcgaggagagacgccgccggactgccgtgcccagcgcccgtgaccatcccatcccatccggtcggtcgtacatgaaggaccgccgtggcagctcctccgtcggcggcggcgagcgcttcgccgtcttccccttctccatgggctgcatgtcgcagtccgccgtgtccgtcgccgaccccggcgacaagaaggcgcagggggacccgtcctccactgccgccgccacggtggctcggggttcatcggaagaaggcgccggcgaggccatgacgaaggagaaggccgtggcgtcgtcggcggcggcggcgacggctacggcgccgggtctcgtggcggccggggtgtcgaggctgatgaaggggatccggagcctgtcgcagatgttcgcgggggaggacggcggcgaagatgaggacgacgaggaggaggagcgggagatggtgatcgggtaccccacggacgtgcagcacgtggggcacatcggctgggacggccacaacagcaaggcgggcgccgccgccgcggccatggctggcatggtgaacgccttctccctgccctcctccctctccctccgccacctcgacatggccatggaccgcgccgtcgcgcacgcctccgcctgaacccggcctgatgaccgcgcgcagctccgacggccggtatcgtacgtagctactagattccgcggttccgccatttgattgcttcacacgttcgtacgcggagaaggaaggatatgatcgattcccatgcctccagtttgctgctgcttgttaatgccgccggccggtccctgttcttgccagtccagtgccatacgtgcgtgaaagtctctcgctttctgtgtcatatcatatccggtgtgagctactatagcgtagagcatgagacgacaagcgtatttgtgtacatacgtgcatgccaacttgtatagtttgtgaggcttcgccatcacacaccccacggtgcctgctggagctcatgtcagtatgtgtgtgtgtgtgcctgccactgccagtgacctatataactctgcgtgtgatttgtaattaactcccacgtttcaatttttgcaaaaaaaaaaatgatcatcttattactggccataataaacaaaaagaaaaaa

SEQ ID NO: 34398 - DNA, 3673 bp, Zea Mays
ttcaaccgatcccgcagaccactcgttccttccccaactatcgttaggcttctccaccccgccctccccgccctccccgccgaacgcgcctcactctccctccatgcagatcaatgcgtccttccaccccaaccgtgctcctcgcccttctctcgtcgtcctcgttccccctagactggcgtggagtgaagatccatccggactccgattgatttcttctcctgctgaagaaacggagagattcggccaagattgggatcaatctgcgcatggttgcaggtgatcaagatccaatacttgaaaataggatgttgacatgttactgtttagatgacaccagatgataatgcccttatagctctcaaaaaaggcagtaaacttatcaagtatagtaggaagggaagacccaagattcgtgagttcagactttctagtgatgaaacatcattggtttggtattcccatagcaaagtgaagtaccttgtactgtcttctgtctctagaatcattcctggacaaagaactgctgtatttaggaggtttttacgccctgagaaggactacctatcattttctttgatatacaagaacggacaacgttcccttgacctggtttgcaaggatcaagcagaagttgaggtctggttttcaacgcttgaggcacttattacttcatgccgtaaaagttattcagctgatggtccaagtgatagattatcagtttctgacgaagtatcacattaccaagatacttttcatgatacaacactagatattgcatcgagtatcacacgtacttttaactcagcaaaaacagatgttgtatctgatcgtgcaaatatgctaagagcaagtacagacagtagccggcttagtatttccagtgcccctagttcttcaagtcaaggttctggacaagatgacattgaatcccttggtgatgtttatgtgtggggtgaggtgtggactgatatgatccctgcagaaggatccgcaaactatttgtgctccaaagcagacattttaattcccaaaccacttgaatcagatgttgtcttggacgtacaacagatagcgtgtggttataggcacattgcactcactactaggcaaggagaagtatttgcatggggcgaagaacttggcggacgacttggtcatgggaccgatgcagatattagccgtcctaaacttgtcgaagccttagcagtgtcaaatgtagaatatgttgcgtgcggcgagttccatacttgtgctataactgcctctggtgatttgtacacttggggtgatggatactacaatgctggattgcttggacatggtgctggaactagtcactggcttccaaaacgagtctcaggacctttagaaggggttcaggtattgtctgtttcatgtggttcatggcattcagcactgaccacatcaagtggtaaagtgttcacctttggtgatgggacatttggtgcccttggacatgggaatcgtcatactgtcgcatatccaaaggaagtcgaaactttgagtggatttagaacaataaaagttgcctgtggactctggcattctgcagcgattgtggagaccactaatcaggcaggtgtgaatgtgatatccaggaagctatttacctggggtgctggtgataagaatcccctaggtcacggggataaagatgctaggctagttcctacttgtgttcaatctctcattgattataatttccatcaggtagcttgtggacatagtatgaccattgccctttctacatctggtcatgttttcacaatgggcagctctagcaatggccagcttgggaatccaaaatctgatggtaaacatcctaccccagtacaagataggctggctggagaattggttgaagagatctcatgtggctcatgccatgttgcagtcttgacttcacgaagcgaagtatatacatggggaatgggagccaatgggaggctgggacatggtggtgttgaagataagaaaaaaccaactcttgtggaagcattaaaagatcgtcacgttaaaagtatagcatgtggttctaatttcacgacctgcatttgtatacataagtgggtttcaggtgctgatcagtctgtctgctcaggttgtaggcaaccatttggcttcacaagaaagagacataattgttacaattgtgggcttgttcattgccatgcatgtagttcaaaaaaagttctgaaagctgctttggcaccaactcctggcaaaccacatcgcgtatgtgattcatgcttcatgaagcttaaggcagcggagaccagcagcaacagctcacatagcaaaagaaatgccattgctcgtcgctctgttgatagcaaagacaggtcagagagaccagaaataaggtcttccaggcttgcaactggatcaacagcagaaccactcaagcaagctgagctgaaagcagttagaaacgagataaaaccagatcctatgtccacgatgagggcaccccaagttccttccatgctaccttttaacaatcttgcttttggcgcaacatttggtggtccagctagtctgaagcccatgacaatggctccaatgccaatggccatgcctatgtcaccagctcctctcacaaagaagccaactccagcagcagcaactcctctttgtggtaaaagtgataccgataacttgaagatggctaaacaggtgctgaatgaagatatctcaaagttgcaatctcaggttaataaactgaaacaaaaatgtgatgcccaagaagagcaactgcagaaagcggaaaggagagctgaacattctgcctctacagctgcagaagagtcttcaaggcgtaatggtgtcttggagttcattaggttccttgacaatgagctcaagagcatcgcagatagggtgcccagcgacgctgccgacggcttaaaagccttgcaaaaccattcggagaggtttctcacagaacaaggtgttcgtccactggaagccacaggtatgcatcgtaagtgcgcaagcataggcaacctcgtaatgtctcaggacggcagtgctggaaacgcgagcagctcggctgcttccttggcgagcgagtctccatgccaccgtatcatggagaacagctcgagagctaacggcgacttagcaccgaagctcggtggtacccatggagaagtgcagctgattgagcagtttgaaccgggggtgtatgtgacgctcatccagcttagagatggcactaaggtgttcaagcgtgtccggttcagcaagaggaggtttgcggagcagcaggccgaggaatggtggagggagaaccaggagagagtgttcaggaaatacaaccacccggccaactaaccagcctcaccagacttcaccattggacacttcaagaagaaggcaaagttttcttcatgttgcttggggcattgctcctgcggctgtgtgccgtgggcctgtggcgatgtagaattaggttgtggatggggaagatgctgatgtagattctcattctgttgttgtttacctcctacagtttaccctttctctagctcacctcctacagtttactgtttcgcagttttgatatctcaaattattcattcaacagccgtgtgtttggttggaatgtgtttcgttggatcgcggcggtgaaaaaaactgacgtgga

SEQ ID NO: 34399 - DNA, 465 bp, Zea Mays
ttgggtggactgagtaaaaagggctttgactccttggttgctttaggcgcttggatgttgtggaagcatagaaatggtgttgtcttcaatggctcccatccaaatttggtggtgaccgttcggctggccagggaggaagctttcttgtggtctttggctggggctaagggattttcttacctcctagctcaaagtcgggtggtttagtttagggttttctctgttttagtgttggggtgtttgtcagctgacaaacgctctgcccctgcccctgctccagttgttctttctggctaggtgctatacgatgacggagatgttgaagtgcttaacttggctaaagagaagtggatactgattgaaagtaatgactcatcagtgaagaggcaaaagaaggatcatcttgggacaaacccaggaagagcactggagataactagcagcagcaagtctcctcctagcctg

SEQ ID NO: 34400 - DNA, 3992 bp, Zea Mays
cccatgtgtaagcttttctcgcactcgtactccctcctccgctccggctaggaggctgctccctccgccgctccgccttcgtcgcgcggccatcgtttccggctctgtccccggatatctcttcgccaccgcttcctgcgccgcggcgccgccacaaccgaaggcgacccagtcgccttcaacactatggtgactcctcccactgtcgagcaggaggacgaggagatgctcgtgccccgccaggaggcggtcgacaccgacgcagcgcagcccatggaagtggtggcacagactgaggtggtgagcacggcggagagccagcctgtggaagatccgcagacatcacggttcacttggacaattgagaacttcaccaggttcagtgagaagaagcactatttagaggtttttgttgttggcggattcaaatggagtgtgctgattttccccaaggggaacaatgtggaccacttctcaatgtacttggatgttgctgactcaaccagccttccgtatggttggagccgctatgctcagtttagtcttgctgttgtaaaccaaatccagccagagtttacgatacgcaaagagacccaacatcaatttaatgctcgtgagagtgattggggtttcacatcttttatgcctttgagtgagctctatgatgcaagtagaggttacctcgtgaatgatactgttgttgtggaggccgaggttgctgtccgcagaattgttgactattggacatatgactcaaaaaaggaaactggttatgtgggcctgaaaaaccaaggagctacctgttatatgaactcccttctacagacactataccatataccctacttcaggaaggctgtatatcatatgccaaccactgaaaatgacataccatcaggaagcattcccttggcgctgcagagccttttctacaagctccagtacagtgacagtagtgtagctacaaaagagctgacaaaatcttttggttgggacacatatgattctttcatgcagcatgatgtacaagagctcaacagagttctgtctgagaaacttgaggacaaaatgaagggaactgtcgtagaaggaacaattgagcaattatttgaaggtcaccacatcaattacattgagtgtataaacgttgagcataaatctaaccgcaaggaatccttttatgatcttcagcttgacgtcaaaggctgtcgtgacatttattcgtcgtttgataaatatgttgaagttgaacgtctagagggtgataacaagtatcacgcagagaatcatggtctacaggatgcaaaaaagggcgttcttttccttgatttcccccctgttttgcaactccagctgaagcgctttgagtatgattatatgagagatagcatggttaagattaatgatcgctatgagttccctctgcaacttgatctggatagagatggtggcaaatacattgctccaaatgcagatcgaagtacacgaaacctttacactcttcacagtgttcttgttcatagtggtggggtacatggtggtcactactatgcattcatacggccaactttatctgagcaatggtataaatttgatgatgaacgtgtaacaaaagaagatgctaagaaggctcttgaagaacaatatgggggtgatgaagagttaccccaaataaaccctggtttcaacaacgctccatttaaattcacgaagtattcaaacgcgtatatgcttgtttatattcgtgaaagtgccaaggagaaaattatgtgtactgttgatgaaaaagacattgctgagcatttaagggtaaggttgaaaaaagaacaagaagagaaagaacacaaaaagaaagaaaaagctgaagctcatctttataccataattaaggtagctcgagatgaggatttgaaggaacaaattggaaagggtatatattttgatttggtggaccatgaaaaggtccataatttccgtatacagaaacaaatgccttttagttgtttcaaggaggaagtagccaaggaatatggcatccctgttcagtttcagcgcttctggttgtgggcaaagaggcaaaaccatacataccgccctaatcgtccattgaccgttcatgaggaaacacaatctgtggggcaactgagagaaatatcaaataaggcacacaatgttgagttgaagctgtttttggaagtagaacttgggctggatttgcggcctctccctcctcctgagaagggcaaggaagatattcttcttttcttcaaattctacaacccagaaaaggaagaactctgtttcatggggaggctctttgtgaaggccttgggaaaaccttcagaaatcctggcaaaactaaacgaaatggctggatttccccctgatcaagaaattgagctttttgaggaaattaagtttgagccaaacgtgatgtgtgaaactatagacaagaaactcacttttcattatagtcagcttgaagatggggacattatttgtttccaaaaatcaccaggagcagaatatgatgcacccgtgcgatatccggatgttccttcatttttggagtatgtccataataggcaggttgtacatttccggtctttggagaaaccaaaggatgatgatttttctttggaattgtcaaagcttcatacctatgatgatgttgttgagagagttgctcgccaacttgaattggacgatccagcgaaaattcggcttacaccccacaattgctactctcagcaacctaaaccacagcccgtcaaatatcgaggagtggtgcatctgtcggacatgctcatccactacaatcagacgtctgacatcttgtattatgaagtgttggatataccactgccagaattgcagttcctaaaaaccctgaaagttgcatttcaccatcctacgaaggatgaggttgttattcatagcatcaggcttccaaaaaatagcaccattgctgatgtaatatatgacttgaaaactaaggttgaactgtccagtcctaatgctgaactacgtgtactagaagtcttctaccacaagatctataagatctttccactacatgagaagatagagaatataaacgaccaatattggacactacgtgctgaggagattccagaagaggaaaaaaatataggcccaaatgatcggctaattcatgtttatcacttcaagaaagatattaatcagactcagcagattcagaactttggagaccctttcgttttggtcgttcatgaaggtgagactttagcagaagtcaagaagcgcatacagagtaaactgcaagtctctgctgatgaattttccaagtggaaatttgcatttatatcaatgaatcggccagactacctccaggattcagatgttgtacctactggctttcagaggagagaggtctacggagcttgggagcaatatcttgggatagagcacgctgatactgcaccaaaaagggtctatacagtgaatcagaaccgtcacgcatacgaaaagccggtcaaaatttacaattgagatttctaactaacatggccgcacggtgaaggcctccatacgagaggagcggccagaaaagggaggacagggaatttatactgtcagggggaaaacctcatagttagcgagccattcggtgtggcacggccatgtattccagcgctagaggccagccactgttatttcatctgtagcagccagcagctcctatagcaatgattttctttttgtacaagattttccttctttgccttagggtgatggcgcgagcgcattggtgtccgtttcggttgggcaattgcttcattcttagagcaaagctgggtacataagattttggtaggaagcgtgtatacaggtcccatctcatgcacgacgctttgggggagctttcagaaacttgcggtatttgttggggaaaaacctccatgttgatttagtgatgtacggttgagatgtagtatggtaaagtttct

SEQ ID NO: 34401 - DNA, 3236 bp, Zea Mays
accgggagcagccggtggcgcccctctccgggagccgggatggcgtgggccgtgggcgtaagcgtaagaaggcgaggcggggttggggggtttaagaagggggttggtttggaggggttttggccaacccacaccaccgcaccacgcacctccaccaccagaagaaaaaaccaaggcggagggcggagaggagagcaagggggcagaagggaaataaaaataaaagaggagaggcgaagcaaggcgaggaggaggagggagcacccagaggcaggggagggggaataattccgcaggggctcgagggatctcgtcgggtctggccggagcagcacggcgaggcggcgatccgagggcgagcggaggcgggcgagcgtcgacgccggcgagatttgggtcggggacaagccatgaacaacgcaaccaccagttgttaactaaccctcttttaaacttcaagcaaccaaagccaagagcagaaatggttttccaaaagtggtcgtcgtcgtcagagatggagtcgtgcggtggaggccaagtcccggagatgccacgcgttcccaagtccgcgaggggcaagagatcggtcaggaagaaggaggcccagagcccggcccagatgtctgcaatcgaccttctcgcaaccgtggcagggaagctgtttgacgagggggcggggtcgctggggaacacgagcgccggtgccccggccttggctgcgttcgcaaaggatgccctggtgaagcaggagcagtgtgatgagcaaatgaagctgttcaagcatgaggcgacggatcaggatagctgcaatgagagtgcaatcctcccccacattgtgctccagcgggtggtgaataatgctaggaatgaggatcctaaggcgaagtctgaggtccaggacaaggaatcctccatgatcagctatacgaaggctgaattgggttgtaattttggtgtgatcgcagacaggtggtcgcctgaatccgtggaatcaggagccttcacaggagatgcagtggcgagactgatgatgacggccccggcaggatttcataagaatgcacccgaaatgtatagtttgcttgattcaatggatgtggatgtcaagccgcctcctttggtcagctctgacagcaccggcgagatgccattgcatggcgataaaattcaccgctcaacctccttaccgagggccccaaagggggtggggttttttgctgtagatagagatgatgacgacgacaagtcctctgggtgcactcatccgagcaccgccactaacaaggatttcacatccaattgtaaagctgagtataatagggtaaggaagctgctcactagtaagcacaggaaagttgctccagcgaggattcacaaatctgatctttcctatagtgatgtcgagcggaagccttctttccggtacaaaaaaatgcatacacgacagaggacacaaaggagtacattcaagcggaggaagctctttgatcgccatttagctctagcatctgaatttggtacagcaaatggaaagggaaacacaaaggttgccggaagaaactccaatgctgtgtctttggaagcaaacaaggggactaattcaatgccattccagaaatcttgtgggtcaaatgattgccatgtgaaacttagaattaagtcttttaacgtgcctgaacttcttgttgaaatcccagacagtgcaactgttggctcactaaagaaaactgttctcgaggcagtgactgcgattcttggaggtggcctacgtgttggtgttcttcaccatggaaagaaagtcagagatgatagtaaaacgttaattcaggctgggattggtcaggatgatatgctggacaaccttggcttttcacttgaacccaactgtactcaaaacccacaagtacaagctcctgaagatgtcagtttcctcgaaaacattgatactaccgaacccctcgcaaggatcacacctgctgactcgtcttctaagcttggtgaagttgacgtatcacaggagcttgcattaaccccattagcaatgaactaccagggcagtgatcatgattccgtgcactcccctggggctgtctcgtcgcgcgataaagactcgcgagccttatttctggttccagctgcagatcccaatgcaggagctgtagttccagcaaataagactaagaggtcaccagagcagggacaccgcagaatcaggcggccgttctctgttgctgaagtagaagcacttgtgctcgcagtcgaaaagcttggaaccggaaggtggcgagatgttaaacttcgcgcttttgacaatgcaaagcaccgtacctacgttgaccttaaggacaaatggaagacgctggtacacacagcgagcatctcgccgcagcagcggcgtggcgagccggtgcctcaggagctgctcgaccgggtcctggcggcccaggcctactggtcccagcagcaagccaagctccagcctaagacgccctcgctggctgaggctcgcttgctcacccaataattcgatgatcccggctgatggcctcctctgaggccgttgcagcctttgtataaagtcaccaggattctctctccttgtgaatttaaccaaaggaaagggcatttctttggcaattgtacattttgatgatggaagaagaagatgatccatgaactgagatctgcagtgtctacctactaatggctcacaatttttgcaattgtgattaagaaattcaaggtgctgcttgaccaagctcggctccggcttccagtttttggattctcttgtgaagaagttgctgcctcttttttatacagcagaagctgagagccgaacagtgtatttggcttgaattgcagcctatatagtttcatccactcatacagacggccacaaatgccgtaaaaggagggtagcttcttttgctgagtctagtcttgggagcaaagctcaggaccgaagtctagacttgagacggagcgggggccaaagcggcacccgaatgaaagcttcagattcttttgttcagttaaattcattctttggtagtggagactgacggaaggataggagattaggtggggtggatctttggttctctttttctttcttcttctattattacattattagttgtattaatgtactatattattttaccaatcttgtagttaccctcaaatttgtaattggtgaaattaacaaaattgaaggaaatacatttccacca

SEQ ID NO: 34402 - DNA, 1054 bp, Zea Mays
agccacccgaccctcccccgcctctatataggccatgggtggcgcactcggtgccgggcatcagctgcgctgctcaccaggaaggccatctcatccatccttcattgtattgtagtggcatcaccaggaacagcccagccgcaagaagacagacgacagcagcgagtggggatcggaagaaagaggaagcggagacgaaggtgagagagagaggcaaaagggcagccatgacgatgaagcagtcgaggttcaagaggatctgcgtcttctgtggcagcagccaggggaagaaggcgagctaccatgacgccgccgttgagctcggcaaccagctgataagcggcgagacagtcggggaggtgcgggcggtggccgacatgcaccagaggaaggcggagatggcgcggcagtccgacgcattcgtcgccctgcctggagggtatggcacgctggaggagctgctggaggtcatcacgtgggcgcagctgggcatccaccacaagccggtcgggctgctgaacgtggacggctactacaactcgctgctgaccttcatcgacaaggccgtggaggagggcttcatcaaccccagcgcccgccgcatcatcgtgctcgcgcccaccgcgcaggagctcatggacaagctcgaggagtacgagccttaccacgacagggtggcgtccacgctcaactgggagaccacgatggaccacctggcctactgacgcccacgctgccagagccgccagcaggcgactgggacgacatctctgatccatcgatgccattcaggaaacaagcttttagcttgccgtcagattggggcttttgtttcgtttttaactgcatgcagatcggttttatttggagtgccggagggagagagaaaaaaaaaacaggttgattattcggttcgcgtagcaggagtacgtagtacgtgcttgttttgtgtatatggtgccttgtgtttgcttcccaccaacggggatgattgatggcttgcagtgttgtctctgtaccagttcaaaaaaaaaaaacccgaccggtttcccct

SEQ ID NO: 34403 - DNA, 2699 bp, Zea Mays
tagcgacccgcgcgtctctcttctatcccgcctacgcgcgagccaccggtccccgctcctccccgcgcggcgccgccagcctgctcctccaccgcgcccaccgctagctcgctcctccaccgcgcccgctgccagcccgctcctccaccgcgcccccgctcctctgccatcatcgctggttgagatgggtgggtagggtttgggcttgggcgtggccgcttgggatctgaatagggtgaggtcgtgaacaatggatctgtcgagtcgatgggcggaaccgctgaaggaagcagaaggcgaggtggatcagtggatggcgtattggtgtcgcgtctcgcgtaagcaagtggggaagacttcatcgccgtgcgcgcccgccataccgcgcaccgccacctccatcgcgcgccggccagcccccgctcctccacctccactacacgcgccggccagcccccactcctccacctccactgcacgcgccggccagcccccacttctccacctccaccgcgcgccggaagcccccgctcctccacctccactgtgcgcgccggccagcccgctcctccaccgcatcaggaaggcgagccagagatcgagcggcccgagaaaaggaggaaacacaagcttaatcagaagccgaagcccagggagctcaatccaatggagtggatcgctgaagcccggcaccagtcggcgcggccgcgggcgctgccgcattggcaggcagtgctgatgggaatcgggatggactgcatccgctaggcctctccatcgaccagtgggttcccctgctcaagttgtattgatttgcgtgcgcgcggtttctgccaatctggcgacctgcttcagaatctgatcttcaagacacattcagtgaagatttgttctcaggttgatctgtgcaattttgaaggcactcatggtgtcaagtgaggactggcaatttccaccagcgcgagacgttgatggtgtccatcttactgtatttagttgggttttagtacctcgtacctccaaaaggtttcagttaaaggacatgtcctggagatcaaaggtgactgagctaactgcaatctcttatttccttgcattttaggattttggttgcctggattctgcagctcttcattttgcaatatttgaaaaatagtcgagtagcctctagggcttaccatgcctaaaatggtgaggtaagtctattgcgcttctactgacatgaccatttaatcactgggacttcacactcaatacttttcttgaatatatagagatgataggaacattgctgcccatcagtaataatcttgtgccttgtttctatgggttgagcatccactgagattttacaaataaagttgataggccacattttgcacattcacatctgctagtaagattgttttctttccaaacagtaaatactttaaatcaggtaatggtatttattctggtgcagggtaatgtacaattgtgttcccttaaacacactttatgcttttcccctcaccttctatagaatttacccatgattccatggtgtacgattatgtgcagtgcagttgttgttagttctttagaaaacctcttgttgttagggccaagcgtaattagttcaaatatcgccacaatggttttcaagttgtcggtgcaggatatgactcatgtgctcttgtaatggtctgtactttaagaacagggtcgagaaatagtgaatgtttcagaacttttttttcattttctaccataggaaacttaatgtgttttgtgacaggatactactgtcaatgggaaagagaaccatgatcaagagataagttgcatcgtagacacaatgttactctgttcaatattgatgtcttttctgtttgcatagtgttaaccttagtcgaaatttctagctcatgacaaatatttattgtacctttaaatggttatttaagcaagaatatatgagcttactgtcatagaatgacctacattccatccaccttggtcatccagattcagctctgatgatgctaaggatgtagtccattaccaaacaatctcaccaaagagcttagctaaatctgttctcgaggaaggtggctggtcaaacttcatgttctcaagggaggatactcagaataatattgatgttgccattgtttttattggctcaaagctgcaatcgtcagacatatctaaagataagcaagttgatccagctttagcagacacactgaaggtaatcataggcactcatctctcagatactgttctatatgcatggtacttgagttattctgcgctactactgacactactaaattggagccttggagtctggagcaaaaaaaagtggtggctgtattctcaaggaacatgagaccactgagctctggagtgaatgaaggacgtcgtctttggaagtcagacatcacctagagctagggtgtccattcttgacatgtttctcttagtgataggtggatactgtctagctaggaataaagtcttgagggattgatggacgcatgcatctccaattcctgtgtgttgtattactactggtacaatctccaattcctgtgaacttatgtatttggactgtgaatttgtgatatgaacatatatcaatgtgtttgaaatctgtattgtatgtgatattctgtattggatgtgatattatctgtgtctaatttttcatttct

SEQ ID NO: 34404 - DNA, 223 bp, Zea Mays
ttttaatatagtagagatgtagttttgtagtagtagtaaacaaactacagagaacagagggcgcgacacatataactagcaagttggccaagtagcgaacgaagaagagcagagatggaccaaaggcacatcacatgcatacataaatgctcatggagcagtcactaccggaatcagcttctttgccgtgtgttctaaacacacggcaaaggctattttacac

SEQ ID NO: 34405 - DNA, 2503 bp, Zea Mays
attccaaagccaaagattgcatcagttctgctgctatttcctcctatcattctttctgatgttgaaaatgatattaagcctaggattcgtgaatgggagaaggctggcattgaacaagactatgttagtaggatgttgttgaagtatccatggattctttcaacgagtgtgatagagaactacagtcaaatgctgttgtttttcaaccaaaaaaggatttccagtacagtcctcgctattgctgtgaaaagttggcctcatattcttggctcctcttcaaaaagaatgaattcagttttggagctgtttcatgttctgggcatcagtaaaaaaatggtggttccagtcattacatcaagtccacagttattactgagaaaacctgatcagtttatgcaggatgaactacttattggagatgggtttgtctaagaaagatctgtgctcaatgatctttagattttccccacttctaggttacagtattgaacttgttatgaaaccaaagcttgagtttctgctaagaaccatgaagaagccacttaaagcagttgtagaatacccaaggtacttcagttattcactcgaggggaagatcaaaccgcggttctgggtattgcagagtagaaacatagactgcactctgacagagatgttagcaaagaacgatgaactctttgctgaagagtacttgggacttggaggattgctcgagaaacctctacaatcaagcataggcagttaatttctggacttataagattgaaccatgcagtgcactatgccgaagctgtacagctttatgcttggattggtgaggctgtttttcagatgggaggtcacttttttttgaaaacggaggagatgtgtcgctggctgttcttgctatggtacccgcaaaaataattaaaacaaggactgtggctgacgcactctcaaacaacagttgggtttcagatattaaaggaggactgtccatgattggtctgttcgaaattttcagctatgggacaccacacatggagtttctttaaccactgacaatgatcgccatatctggagattctctggttggggtgaattctcgtcgaaatcggcctacagagtcttcttccatggtttggtctcctttgatccttggaagcgtatttggaaaacttggactccacctaattgcaagattttcttttggatacctgtccgaaatcgctgttggactgcggaccgattggctcggagaggactggcacacctagtccattgaattctttgcgaccaggaagaggagaatattaatcacaatttgttttcctatgttttcttgagggaattctggtttagagttttctcctggctggtgtatgttgaccgtgtgccggggtcccaggagcaatcgcttgcagattggtggtgaaaggcttgcaaacatctcccaaaagaaaaaaagggaagggcatgaattcgatgattatgttgggagcttggatcctatggaagcatcgcaatgcctgcgtcttcgaaggtttgcagctgagtatgtggaatgttctgcatgctctcgaagatgaacagcatctctggtgtctcgccggagtgcaaggactgcagagtttaggcctgggctccctgagcggttaggtggcatttcctggtctggtctcaccatttctatttgctgtaagagttttgttcttgtaagcacagcccctcacggctcgggctcggtccggaatgaggggtaaaacttgtacgggaggccacttttctggtgcttagtattaaaaaggtaatacttgttctcatgaaagtgacctaacaaaagttataggtacaaatatagactggagtgatgttgttaactcaataccaaaacagcaaagcattgggttttgagaatacttcattcaaggtgatgaagaaattagttttcgccatgtgaagtctttcaatctcagttgtatgctaatttcgttaccatattgttcttacaggtttaagaagaaattgcaaagatgcggtttcaaactaggaaacggagtgaaggatgccccacacctttgagtggatgcgcgcaggaaccaatgcaagctgtagtaaggccttgaagtataaggcaacccaagtctgccatcatctctttctcgttgaactgaagcctgtccatgcctccatggcccagtccagcatcatcgccaatcagagctgagggcagccgcagagccagcggtagctagtcggctagtccattgactggccggtgcaggggtcacggactcacggttctgcatttcatattttcgtttaggtgtcgtttggatccgtttattttggaggaattagaatctatttaatagagtaggctatttagcttggaatttgacattccaccactttacaatgttaaaaaataagttatctcaaatttatagaatggaattgactttatgtatcttcaaactacgtttctactctacaatttataacatgtttttttggctcgctc

SEQ ID NO: 34406 - DNA, 2886 bp, Zea Mays
ccaatgccagtcaacaccaccaccccacgtcagccccagggtccaccgcgcagccaccgtccggcgcgcatccgacgggccggatcgccccggcgcctcctgaaaaccctcacccactaaggtcactgcctgactgcctccccttcttcccttcgtctcccttccccgtcgttcgagaggtgggcgaccaagctggtggcgcgccgatctcccgatctggtggcccgcgtcctccccgatccgccgcggaccgacgcgcccggcccggatttggcgctgtgggaggatcagcgtccgtcgccgcccggggaggctccgattcgcgggcggtccatggcgacccccgacgacggcccggcgccggccggggggcgcaagttctggcgctccgtgtcgtggtccgaggcgcgggagccgccgccgccggccccgccggacgtcgcgggcgggcagtcccgccgcggcttgccgccgccgccgctcaccccgcggtcgatgagctccaaggcgcggtcgtgcctcccgccgctgcagccgctcgccatcacccgccgcagcctggacgagtggcccaaggcggggtccgacgacgttggcgagtggcccaaccccaccacgccgggcgcctccagggcgggcggcggcgggggcgggtcctcccccgccaagcccggggaggggctccgcctcgacctctcctcgctccggtcgcaggggcgcaaggaccagatcgccttcttcgacaaggagtgctccaaggtcgccgaccacgtctacctcggcggcgacgccgtcgccaagaaccgcgacatcctcaggaagaacggcatcacccacgtgctcaactgtgtgggctttgtctgcccggagtacttcaagtcggacctagtctaccgcaccctctggctgcaggacagccccaccgaggacatcaccagcatcctgtacgacgtgtttgactacttcgaggacgtcagggagcagggcggccgcgtgcttgtgcattgctgccagggggtgtcacgctccacgtcgctggtcatcgcctacttgatgtggagggaaggccagagcttcgatgacgccttccagtttgtcaaggctgcccgggggatcgcaaatccaaacatgggctttgcatgccagcttctccagtgccagaagcgtgtgcatgcgattccgctgtcaccaaattcagtgctcaggatgtaccgcatggcgcctcactcccagtatgcccctctgcatttggtgcccaaaatgctcaacgacccatccccagccacccttgactctagaggcgcgttcattgtgcatgttctctcgtcgctctatgtctgggttggaatgaagtgtgatccggtaatggaaaaggatgcaaaggctgctgcgtttcaggtagtgaggtatgagaaggtgcaggggcacatcaaggttgtgagagaaggtctggagccgcaggagttctgggatgcattttcaagtatgccacctaattcagatagtaatacaaagattagcaaggaccagatcgattcagcatccaagagtgacccaggaagccggaaaaatgagtcctatgacgctgattttgagcttgtctacaaagcaatcactgggggagtggtccctgcattttcaacttctggggctggtgatgagacccatcttccagctagagaaagtagctggagtttactgaggcacaagtttatctccaggtcgctagctcgtgtttattcagattctgctctaatgaaggattttgatccacgggtacaacacctggctgctgaggcatcaacctcacctcctttcctttctccaagctccttatcatcggattcaagtgtcagctcgaagtctcccctttctcaatcatctaatgaaggagcttcaaagccttctggcatggaatcaatacactctccttccaagacctcttctatagcagaaaggagaggaggcttcacacttctaaagctaccatctctccaaaaggatcttgtattgccaccaagggtgccgtctattgtattgccaccaagggcgccatctagtattcgcaggaccgaggatgcctcagataatagtacaaatggggttaaacagctgactagtgagttttgctcagaaaaatgcactggagaggagaagcagttaaaatggtgtatgtatgggtaggaggcgaaaatgagagcagcaagagtgttgactctgtcgattggcaacaggtcactagtgattttcttcatctaaagggcctcagcaatgttcttcctgtcaaggttttcaaggagcatgaagctgagaatcttttggaactactgaatgttagttaacattaggcagtagctatcaggatattgtagttgcttaacaaactcaacgaaggcatgccctccagcatcagtcggtaccgatgattgtcagcgagatggcaggaggctgccatgggcgttgtatccgttgcaaattagcattcgtggtgtaggcgcaatcggccgattcggtgtatattatccgctcccctgtaatgtaagctcagatactgggagctggtgtgtcgacagttactttttagcctaaacattcttgtacatctttgaaaggaacagagttgtaatccttttgactatgtaaatggctccattggtcataacttctaaaccatgtagaactcagttgctagctggtaatctccagttccatacaatttactaaatgagctaaactgcagtttctggtatattttacattagtttaatctaacacctgtttatctctcggagacaaccgtatttcagttgtcgtgtagaagagaagactgcagctgcgtataagtcaaaaactaaaccactttggttgaaaccaaaaggtattgat

SEQ ID NO: 34407 - DNA, 259 bp, Zea Mays
ttccgacagtgcgcagctctggtcacgacacacaacggacacacggaggagttagtaccacgacgaccaatttcgagggctccggccgccaacccacagcagggaggtcatcagatcaatccccgacgactcgacggagggagagcacaggtcggagtacggagcggcaccgatccggggcacacgctgacggagcgccaatggcggcgagtcgcgcttgaatgggtaggcatcctatcggctatgagcagagggttac

SEQ ID NO: 34408 - DNA, 1547 bp, Zea Mays
ccgcctccctcgtcgactgcctttggcaaccaccccgccccaaaatctctttctccgctgcgccgcaaacccaccgcttccaccatcgccacccgtcaccccttgctcccatagtccccataccatgcccgacctccacccgccggagcaccaagtcgccggtcaccgcgcctccgccagcaagctgggcccactcatcgacgactctggcctcttctacaagccgctccaggccggcgaccgtggggagcacgaggtcgccttctatgaggcgttctccgcccacgccgccgtcccggcccgcatccgagacaccttcttcccccggttccacggcacgcgactcctccccaccgaggcgcagcccggggagccgcatccgcacctcgtcctcgacgacctcctcgcggggtttgaggcgccctgcgtcgcagacatcaagatcggtgccatcacgtgaccacgagcgttctgctcggattccgcgtctccggcgtccgagtcgtcggccccgagggcgccgtgtggcggacggagcgcccggaggtgaaggctatggacattgtcggcgtccgccgcgtgctccggcgctacgtgtcatccgcttgccgacgaggggatggactgcgcgctcgcggcggcggtgtacggaggaaaaggtggagtcttgtcacagctgcgcgagctcaaggcgtggttcgaggggcagactctgttccacttctactcggcgtcgattcttctgggctatgatgctgctgcagtcgcagcaggcggaggtgggggtggggtaacagtgaagctggtggactttgcccatgtggccgagggtgatggggtgattgaccacaacttcctgggcgggctctgctagctgatcaagtttgtttctgacattgttccagagactcctcagacgcagcctttgggtccttcttaagagaggatcctggcattttcgatttgataacaaaggaagcactttcagctgcaaaaaaagaaagcagcagtgaggatgaagatgacagtagtgaggaaagttcggatgatgagccaacaaaagttgaagaaaagaaggctccaaaagtatcagaaaatattggatctgaggatgaatcttctgaagacaagagtgataaagacagtgaagagcctcaggcatgccatcatttaacacctcagctcgcgagctgaactggctcgctctggctcgctcttttattgagccagaaaaaactctgctcgagcttgttctaagcacagtttctggatcggaggagcatccccgcctaggtctctgcagccatggttcgcggatcgctcggcaagcttgcatcgcgcgccctctccgtcgccgggagatggcagcaccagcagctccgccgcctcaacatccacgagtaccagggcgcggagttgatgggtaaatacgggatcaacgtgcccaggggcgcggcggctgggtccgtacatgaggtcaaggacgccttgaagaacatgttccccagcgagaaagaggtgatgacgccatagcttcctcatcgtct

SEQ ID NO: 34409 - DNA, 2229 bp, Zea Mays
taaacaagtccttaggaaaattgtgttcctaaactagcacttagagatgctctaattttactagcattttttatcaactaactattagctccaaacaccccctaattttagtagcaagagcaaggaaaacccccagccatcttcatctgcctgctggtgccggactgacggttagagatggcccacccctccgccgccgccgccgccgtatcctccacggcgcccgctgcaaaccctagttctggcgcccgcgaggaaggaggcgcccgctctccgccgtcgccgtctccgtctcagagggggcgggccaaggtggtgatcgttatgggcgccacgggcgccggcaagtcgcggctggccgtcgacctcgcggcccacttcgccggcgtcgaagtggtcagcgccgactccatgcagctctaccgcggcctcgacgtcctcaccaacaaggctcccctccacgagcagaacggtgttcctcatcatctacttagcgtgattgatccctctgtcgagttcacttgccgtgatttccgcgaccgtgccgtgccgattatacaggaaatagtggaccgcggtggcctccctgtggttgtcggcggcacaaacttctacatccaggctctcgttagcccattcctcttggatgatatggcagaagaaatgcagggctgtactctgagagatcacatagatgatggtataggtcttactgatgaagatgaaggcaatgggtttgaacgcttgaaggagatcgatcctgtggctgcgcagaggatccatccaaacgaccatagaaaaatcaaacgctacctcgagttgtatgcaaccacgggtgccctacccagcgatctgttccaaggagaggccgctaagaacagaaatggggtcggcctagtaactccagactcgactgctgtttcctgtgggtagatgctgatcttcaagtcctggacagttatgtcaacaaaagggtcgattgcatgatggatggtggcctgctggacgaagtatgcagcatatatgatgcggatgctgtctatacccaggggctgcggcaggctattggggttcgtgagtttgacgagtttttcagagcatatttacccagaaaagaatctggtgagggttcctgtgcaagcctgttaggtatgcatgacgatcagcttaagagcttgttggacgaagctgtttcccagctgaaggcaaacactcgtagactagttcgacgtcaaagacggagattgcatcggctgagtaaagattttgggtggaacttgcatcgtgttgacgcaaccgaagcattcttctgtgccactgacgactcatggcaaaagaaagttgtcaaaccatgtgtggatgtcgtaagaaggtttttgtcggacaattccactgttttgccaagcacaagcgcaagtgacccctcttcaagagagctgtggacgcaatatgtgtgcgaggcctgcggcaaccgggtgctgcgaggtgcgcacgagtgggagcagcacaggcaagggcgaggccaccggaagcgagtgcagcgcctgaagcagaagagcctgaggccatggccatcgctgctgccccaagaccgcagctgatggtaactttttcacagcagaaccggcgagaagtgggacggggacgttgacgtggacatggtcgtctcgtcccacccaaaaaagcgtgccagcctgacagcgacatgctttcccaatcccgaattcctggcacgtcgacggggggactacctccatgccttttagcagcggaagaagcaggcaccaaagaactgcttatcaaaagtattgtaccacacgtacgacgggtctagaagccacagaaacgtagtgtggaagtggatagatacttgaacaatggtccatctttctatactgctaaagtttagcatatgctaaggaggtgtttaagattgctaaaatctctattttcaaaaccgaagtattgcaaatactgtagttattttaagctattctaaacttaggtctggaccttagtttgcaaaactgtattgaccacagtttgtaaaactgtattatttcaaactgtggtattgtaattactaaagtaaaaactgtattatttcaaactgtggtattgtaatgactaaagtatattatagtattttaaaaactgtggtttctaaaatgggcttaaactttggttaaactttagaacttgagacatgtttgatgcaagtgtttaaca

SEQ ID NO: 34410 - DNA, 621 bp, Zea Mays
ccgtgggctggccaagcaaacggacaaaagccccgccgccccgcgctttctccggttccttctctcccctgagaccaccaacgccggggccggaaaaaagggaagccagagcacagagccagacctggcggcgctggacatccaaaaacgccgccaaggatccttctctctctctctctctctctcttcgcgtccatcgacctgaccgcggaggcgcgtgcttcttcttcccgctctccactgcagtgtcatgaagattgagggaaacttgcatgtttgatatacccagctgctttctgtaacgaaaaactcgtgatcattttgttgaattggtcactgtcagggagggatctacttgtcagtttttggtattaaggctgctggccttcccttgcagggtatctgtagaataaatgggagaagcacactcggatgaattttgccattgccaggggtgtgctggcaagtatgcactactcagagacgaagaaaacccacgattggcaatctttgagaggcggctgccttgctgtggttgtgggataggatggtctacgctatgtcaggttgaggaccatcggacaactagtgttcaagggctgctgccatcgacattcaggg

SEQ ID NO: 34411 - DNA, 5396 bp, Zea Mays
ccaatttcttcctcctcctgccttatcgtcttcctccttcctgccttgtcttcgtcctcgctcaacgccaatctctctcctcttaccattacccatttctcaaatttccaactgaaatacgcccgccccttttcctgcgcgctccgattccaaaccctcggagctctcaagacaagagattcaacagagccggagcggtagcacctctttcctgtttgcctgtaaccttcctgctacagtacgccgcagcgattagcggcccgaacccaaatccgcaacggcctgagcgagctattgagctcggcggggcgggattctcggcgtagagagtatccttcagctgtatcgcgaaagattgagccgaatcggttgctggagttgagccagctcttggacttcctgcgagcagaagtgatccggagattggagctgctggtcctgccgcgtcatgtcgctgttccggaagttcttctataagaagccgcccgatggtctgctcctcatcacagataacgtctacgtttttgatcactgcttctccctgaaagaggtggaaggggaccatttcgatgctcacattagaggcattgcagcagatcttctggaaaattttcgcgatcactcattcatgatctcgaatttcgggactaaagaggaagaaagccctatataccatattttgtctgagtatggtatgactgtattggactaccctggccactatgagggatgtccactcctcaccatggaaatgatccactgcatcttgaagtccagcgaaagctggctttctttgggtcagcataacttactgctaatgcactgtcaacgagggagctggcctattctggctttcatgttagctgctcttctaatatacctggggcattattccgacgaggagaaagtgctggatatggtctacaagcaatcgtctttggagcttttggagatgatttcacctctgaatcccatgccttctcaaatgagatatttgcgctatatctcgacgaggaatgtcatgcctgagtggcctccagctgatagagccctcacattagattgtgttattttgaggatggttccaaattttcatggccaaggtggtttccgtccaatattcaggatatacggcccggatcatctcatgccccctgatcagactccaaaagttcttttttcaactccaaagaaaagcaaccttgtccgtttttattcacaggcagatgaactggtgaaaatagaccttcaatgtcatgtccaaggtgatattgtcctagagtgtatccatctgtatgaggatctggatcgtgaagagatggttttccgaatcatgttcaatacagcattcatccggtcaaacatcttgatgcttaaccgtgatcacatagacatgttatggaatgcaaaagaccaattccctaaagattttcggtttgaggttatcttttccgatatggacatagttacttcacatgtcacaacagagcctgttattcatcaagagaaacaaggacttggggttgaagagtttgctaaggtgctagatatctttaaccatttggactggttggatgggaaaaaagacaccgtacctcacacaacccagctaaagatctcagcgattaccgatgaacctgagactttctttgatactcgtgaagaacttgaatctgaaagttcttctggtgaaatttattcttctagtgttgttctgaaggtcggaaatgaattggatatgcttgtcagcactaaaccgagacatattccccaagattcaagttcagctaatgttcaatccaaatcacaaactacagtgcagtctccttcgcgaatgcggcgcacagcattgttatcaccttctaaggttaaggtttcaaagaccagtgcttcaccaatggaactgtcttcaagtacaatcatgccacaacaatcatcttcgccggttcagcctcggcgagtgatgtctgactctgcagtaaaatttttatcagagataacagaatcagcatcaggtgagatgtcttgttcacaaactccagttgaacatgaaccttcctctctgatggaaaacaatccagcaccaacagcatctctgttacctttgtgcacacctcctcctcttcctccccctccacccactgtctctttactccctgttcccactaagttacccataaatactagcacaagtaccatcaacatttcccttagagcaaccgtgcgttcctctccaccttcagaaccatcagtccctcctaaagatcttttgagaaccgaagagctgggtaaatcacaagaaccttcctatgaaactcgtgggaaattacaaactgatagtactacaggttccaatgatttcatactgtcaccagccgcttcatcttcactggatgaggaattgagcaacgcaagagcatctctcccgacagatttgccagcagtacctcaaaatccagacactaggccctttgcaattcaagcgacaagatctgaaactatgccgccgccgccaccaccaccaccaccgcctccgtcaaaatcaggcatgacgctgtttcctttgacacatggtgaagaggtaaaaatcactatagaaaaagtcgtaccacatcagcctccgcatccaccagcagcagcagcgtcattttcaagctcaaatccagatgctgtatctgtaattctagctccacaaaagagagctcggtctccaccgcccccgcccctgcccccacccccagggttggcaaaaccaccattttcctctctacggtcacgatcatcacctgaagtctcattgtctcaaccgcagtttctagataacaaggacagtgcaacaatggaatatccagacaccccgtctttgacacctacattttcacaaagcgttacacgggtgcaaacactgcatgttccacctccaccacctcctccatctcgaacaccgcctgttccacctccacctcctcgaacaccacctgttccgcctccaccaccaccttcatctcgaacaccgcctgttccatctccacctcctggaacaccacacgttccacctccaccaccacattcttctcaaacaccacctactccacctccaccacctccctcttcacaaagtttcccatccttaagtagaagaaatcgtgtggcagcccctcatccacctccgcctccagcaccactgtcatcccgtgttacttctgcaccatcagtaccaccttcacccccattacctcctcctaagctagccgtggccaataacacttcacagaagtcaccaacaatccgaccacctccacctccacccggcccccttcataagcttacgaagggaagtgttgccaattctaaccctcccccacatccagcattttcatttggtgcaaaggatcgtagcacagcccgctcaaaaagtcctagaagtttacgtgccaaccaggcatctaaaaggaccccgctgaagccattgcactgggtgaaagtttcaagagcaacacagggaagtttgtgggctgaaacacagaagtctgatgaaatatctaggaccccagagattgatatctctgagctggaaagtcttttctctgtaacgatgccaaatatggaggcaaaacgtcaacggcaacaacaacacccttctgttgcaacaaagcaagaaaaagttcatctgattgagctccaacgcgcaaagaattgtgaaattatgctgagaaacattaagatgccactgcctgatctaatgggtttagtagttgctcttgatgattccgtagttgatggtgatcaagtagattacctaataaagttctgtccaactaaggaagaaatggaactactcaaaagttatacgggcaaaaaggagaacctagggaactgtgaacagttcttcatggagatgatgaaagtaccaagggtggaatcaaaactgagaattttgtcatttaagataaagtttgttacacaggttgcggacctaaaaagtaatttgaataccatcaatttggttgctgaagaggttaggagctctgtgaaacttaagcgagtgatgcagacaattctttctttgggaaacgcattaaaccaaggaactgcaaggggtgcagctgttggatttagattggatagtcttcttaagctcagtgatatacgagcacgtaataataggatgactctcatgcattatctatgcaaggttctttcggacaagcttcctgaagtgcttgacttcagcagggatcttgcaaatttagaacctgcctcaaagatacaactgaaggagttagcagaagaaatgcaagcgataactaaaggactggaaaaagtggagcaggaactggcaacagctgaaaaggatccttcagagacagagatattttacaggaaactgaatttattccttgatgacgcccaagctgaaggaaggtcgttagcttcgctttacagcagtgcggggaaaagtgccgattctctagcacattattttggtgaagatcccgtgcggtgtcctttcgagcaagttgtctcaacgttgctaagcttcacgaagacgttcgagcgggcccatgcggagaatgttaagcagatggagctggagaagaaaagagcacaagcggaagcagagaaagagaaggccaaactaactgcccacaagaagagggagtcgctggagcttggaatttcaggccggtgacacaccatatattgcatctgtggatagcacgcacttcactaattctgtgccgcctgatcacctagaccagcggcagaaaattttgtagcgctccttcagcgtgtatcacaaggaagctagggagaagtaatgatgtgtagtcctaatataacagttcactcgatgtacatagcagtttcagatctgttgcttctgtaaagaaaggttccacagctagctcacgaagggagctgcagtctctttggtttgtcaggaagttagggagaagtaatgttgtgttagtcctaatgtaacagttcacctaattagcgagaagcaatactgtacatagcagtttcaggtctattgctgttgtaaagaaaggttctgcaaactcgtttagctctcgatttatcttggggaattcacctgttactgccacttgctatagcaaatctgtaatcttgcgagtacattctccaatctccatttctactacgatgggcgtttggatgacggtaggagctgatatggctaagagcatgtacagttgtgtttaatgtagagtcttttgaggtgtttaaatgagatatctgcaaaaaaatgtagagtcgtctctccgtgaagtgacgtctctgtctcgtaacacaagtagcaatagacagacgacgtcacttcccattgtatgaattcgtctgttctatcaattcgatgttgtacagac

SEQ ID NO: 34412 - DNA, 1258 bp, Zea Mays
cgttagtcgtcgtcttccaaaatccaaaccgctcgctcctcaccgaagacgccattagccatgagcagcttggcttatccgctcctccggctcccgtgccgctgctctatcgcgccggcgccggcgccggcgtctcagctccccgcaccggtgtgtctatctgcttcggcttccgcaaatgcagggggcgatctgacggcgcgggaaaagcgagcgcagcgtcgggaacggcgggagctgcgtgcgacggactggaaggaggaggtgcaggaccggctgatccacgagccagcgcggcggcggaagaagcctcctaagcgttcgtggagggaggagctcaacctcgacctcctcgccgagctggggccgcagtggtggctcgtgcgcgtctccatggcgcccggcaccgactacgtcgacctcctcaccaaggctatctcacggcgctactcggaagtccccttcaagatttacaatccatcaatccaagtaaagaggagattaaaaagtggtgcaatcagtgttaaatcgaagcctctgcatgccgggttggtctttctgcattgtaccttaaacaaggagcttcatgactttatcagagacacagagggttgttatggctttattggagctacagttggttcaatcaagaggcagattaaaaagccaaaacctattccagttgatgaagttgaatcaattattagagaagagaaggaggaacaagagagagttgacagagaatttgaagaaatggagaatatgggaaacattgagcctttcagtaaacccgttgaagaatctgaacttatgttaatgaataagatcaagaagcagtttaagaaatcgtcctcacagggtggcactagacacagtgctttttcgcctggtgcaactgttcatgttctctccgggccttttgcagacttcactggttccatcctggaagtgaatcgcaaaaacaagaaggaatcttgtgtttatgtatcacagtagccgataactttttatcaacaacccagatctccagctgggcctgagtgaatgaagcaggaacttcagtgggtgggcagtggaccgttgaagacccagctatcagcaagagaaacagttagcacacctgcgcatgagctaccgtcaaaattaaccatttataaacaatgaggatgctgaggttagaaagctcgctgatttccactaggctgttcacattattttccctgtgctcgaatgcagaaagcagtcccttaggccattc

SEQ ID NO: 34413 - DNA, 2644 bp, Zea Mays
agtattggtgagaatatccagaaggaaagccaaatgcccatggatccaagtgcttttcaaataatagaatgtgccgaagctcctaatacaggagttgttagtagtaagtttgctctgaatgtagcatgcgatagtcccatggatttaaatttgacaaatgttgggacttcagataacatcctgtacacttcagagtttgctgtaccaggtcgaaccgaggatagaagcatgcaagttgattttcatgatgcgaaagctgctttacataagccaaatcttcccctggaagtagtggatacagatacccatgatctgcagtcatccagaaatactgagagcacaattctgccatcattcggtgatgatcctatgaaggattcctctggtgctctgaataatggtctagggaggagcacttcatctcaagtaaccgaactgacacatcttcatagatcccacccgcctgctgactacaatccattctccttgcattcccatgattcaccatctgtatctggtaacagtgagcattctgttccgacagctttgacacttggtaataatatctatttcagtagtgcagagagtgagggacagcctgaggaaaaccataacctattggatgtaaacttaggatttgatgtgacaacgacagaatttggtaatgttgtcaaaagaaaaggtgaatctggcaatgacttaatgaatgcaggcagtcagaattggttgactttaccacttactgtcagctgcttggataatgcttctgctgttagtaatgggaggataggtttagagcagattgtggatgaaggtgtccctgttatctgtcaggatcatgatattatgctggatattgaccagcggggcagtattgatgttttgtctggccaggatcacaacctcaaactatgtggtatcagtattcctcaagcagtccttttggcaacagaagagagaaataaggatgttgatgatgagatcgttcgcccaggtcgagacttagcttctcagatatctgttgattctgatcacacttaccatggaagtactgaggatcctgtgggcatgtcaagtacaacacctgattcggtatcctcctggattgaagccattgtaccagaagctaacaaggaacaccaatcatgcaaatcttctctacttcctatctgttcttcagaaaaggtatcagcaccaaaggaggatagcaagaaggcgttgtcagattcagtagtcaactctgtagtaaaatctcctcctcgaattaatattgcaagctccacagtattgaaggtacctactaaacaggtagctttgcctggttcattgctagagccccctcgcttaaaccagaatgcaaggaacaggacatggcgtcgtgacaatgcatcatcttctaattcgtcattgcatgtttcacagacttcaggattaccccctaaactgccattaaaaaagaacagcaaaagtcaaaactcttatatccgcaagggtaatgccctaattagaaatccagccaatggaaatcatcttcattcttcttctagtctagattctcaaaataagttgagtaagcctgttatgaggagaagcatgaactttgtcaggaatgtcgattcaaaagacgcagcacattctcatatttcagttgaaagacccaagaccccacctttgccacttcataccaaatccatcagttgtgctgtgaatgttttggagccattgtctcaaaatttgcagcaacaggtccttgaaactgaaaaggaagattccagtgggcaggttaactcaggtgctgacaatctaagcattattagtttgcacaagtctgaagcccttgatgctggtaaagcaatttatgttaggccaaagttaaatcaactagttgcacaggggcggcatcttggtgagtcgagtaacatttccttggataaagtgacgttgctgcagccttccgcaacatctgatctctatttcaagaaaaggaaaaatcagattattttgggtccctctacttctgatgccccgagttcaaaagatacatttcaggctgaaaatataaagtcaggtgagagtaaagttctaatgtcttcatcttccaacaacaatatcactgtggcaaaggacaggctgcacaaagctcttcagacaacaaatactgtcagaagtttctctcatgtatggacacttaatggacaaaatcctcgaaagaaatcttatgtgggagctagtcatatgaaggtcttacctcgtatacttccatggaaaagaaaaatattctgccagaactttagaggcagttattcttcgttgttgaatacaagctctataggaataatgagaaaattattgcaaacaaggaagagaagtactatttacactgtctctactgatggattctctcttcggaaatctggagtgttaagtataggcgggtcaagtttgaaatggtcaaggtccctcgagaaacattctcgaaaggttaatgaggaagctacacaggcagttgctgaagttgaaagaaagaaaagagaaaagagaaaacggcagtctctccgtagcaagggaaggaatgttgttccatttttcatatgaatttcaatttatccaagagatggaagggcagagctttttttttttggtt

SEQ ID NO: 34414 - DNA, 473 bp, Zea Mays
agatacgtctcatccgttgtgtcgtcttttttttcggtgtcgcgagctcttcctccttccgcttctcttcgacagaaaactagggttttgctcttggaatctctctccccgctgccgccgccgccggacagtgcaccgacgatacgacctcctccttcctccgatctggcctttttaatccgcggatcccgtacaagatgcttcccctctcgctcctcaagaccgcccaggggcacccaatgctcgtggagctgaagaatggtgagacgtacaacgggcatctggtcaattgcgacacgtggatgaacatccaccttagggaggttatttgcacctcaaaggatggtgacaagttttggaggatgccagagtgttacattcgtgggaacaccattaagtatcttcgagttcctgatgaggtgtgcgattctggagcaggaacaaaaatgagcagagaacagagaagaaaagga

SEQ ID NO: 34415 - DNA, 1282 bp, Zea Mays
cggttgccacacccggcccagcacaggcgtagggtttattggcatctgtctcctgtcgcgccggccaccacagcgcagaagaacacagcacccgcctgcctcgccgccgcaatggccgccgccgcctccgctgcgagatccttcctccggtccagcggctcatcgtctctccgcagcgcggtggccagagccgcctcgcgtgcgggaccgggaccggctccgctgccgaggcggatgcccacctctgccccccgtgtactcctaaggtcgccggtggaaatgagcagcgtgtgtctggagtccttgatgcccatgcacagcgccacggcttcagcgctcatgacgtcgcttctcgccgccccggcttgcaagggattcggttggctatcagaaggtcaagctgaaactagatgaacttcatgggacccaaaaggtgaacactttttatagatcccaccaataatgactgttgatggctagattccatcactatttcacgcgtcggaatgatttgtggaaagaagagcccactatcttcatcttatggaacttgccttaaagtcatctattgactattgtgcacttgcacattagcatgtacaatatggaacaaaagaagtctgcattttcatgagccatacattgtattgagccacatatttttattgttccttttggaactgcaaaatgcacctagcgctgctgtgccacgatcgttgtgccgtgtctaagattcccattgtcactttgagcgatcttttattgaagttctggaccttttggcaatatgagagatttctttcctgggtcgacttttgcctatggtttgctgaagtcgaactattgatgggtttacaaatagcgtttataaatttgaatacaacgtcatcattaattacaaatttgaggaaaaaaagagactgattcttttgtattggtccagctggtaatgatgacgtgtgacggtctctagatgggaattagcagattattatcccgtcacctcagatcttcagatggatgatttgtcgttactggagatctgcagtgatggtatcttgtctggattatggatacctcgtgaatttaaagtacttggttggcgtctcagttaacatgttttgtgctctgggattgcagtttgtatgaaatttgcagaattgatcctgagatttattttggctggttagctgtcaaaaagactttggtcttgacgacttgcctgatcaagtagatctggaatgaataaacttaatagaagggttttcacaccttttgcgtt

SEQ ID NO: 34416 - DNA, 1692 bp, Zea Mays
ctgctgttaacgtccgttaccacgaaaagagacggcagtggtttaaacgggataaaaaatcttggacaatggcatgggacgaacggtagaaattccagtggttcatatggaatttggatcttttataatggttgcaaaggaattgactcttccaaaaatcaagcaaagaaaatattcgcagtgttgcgcacttcgcgtctcgataaagccgaccgcccgacccccaactgttccgtcaaagcagagtctgcccctccccgcgccgttctttttggttccccactccccagtccccgccgccgccgaaacccgcagatggaggtcgtcgtcgccgcgaagcagaaggcgaagaaacacatacacctcttctactgctcagaatgcgaggagctcgccctcaagatcgccgccagctccgacgccatcgagctccaatccatcaactggcggagcttcgacgacgggttcccgaacctgttcatcaacaaggcgcacgacatccgtgggcagcacgtggcgttcctggcctccttcagctcgccgtcggtcatattcgagcagatctccgtcatcttcgcgctgcccaagctattcattgcctcattcactctcgtgctgcctttcttccccacgggctcattcgagcgcgttgaggaggagggcgatgtcgccaccgcgttcaccctcgcgcgcattctctcgatgatccccaagtcgcgcggcgggcctaccagcgtcgtcatctacgacatccacgcgctccaggagaggttctacttcggggacgacgtcctgccatgcttcgagacagggatcccgctcctgctgcagcgcctccgccagctcccggacgcagaaaatatcaccattgcctttccagatgacggtgcgtggaagcggttccacaagctgttacagcactttccaatgatagtctgtaacaaggttcgggaaggtgacaagagaatagttcgtataaaggaaggactacctgaaggccgtcatgttgttattgttgatgatttagtgcaatctgggggaactcttagagaatgccagaaagttctagctttgcatggcgctgcaaaagtcagtgcttatgtgactcatgctgtgtttcctaagcagtcatatgaacgtttcatggcgtctagttctgctggggccaggtgacagatttgcttacttctggatcacggactcatgcccacacacagtaaaagctattgggcaaagacctccatttgaggttctgagcctcgctggctcaattgcagatgctcttcagatatgagcgtacactggtggaatgctcccgcttttcctaaatgtaagagttggtttccagttcctggaaaagcaaataatgtgtagtaagttaagtacctgaaggttccataaacagccctgtggtttgtaataaaatcaggcattggatactcaattgttgacagctgtgtatttgtcaatgttcacttctgtttgaagtgcgcgagaccagtgctttactttcctgacccgtcggagtatcggtttagcaacttcaggtactgggctttgttgtgaacaaatagtgcaatgtaactgaacatgaacctaattgaatttctattagattggatggtcatattgcaaccatgacatgttggcctccttgaattttactgttacatggatgcatcgagcaaattg

SEQ ID NO: 34417 - DNA, 630 bp, Zea Mays
ccacgatcacgttaccagaggtgctaaggtattttagcaaacatctaactcaaacacgacacgcctgctaaacacgagaattattatgactaataaatctagctaatctaatttgattaaccgaaataataaattggcttaccaatactgatttgattcgatatccatgagggtgatgatggttttccagtttagatatttggttgagtcccaagagagcgcttacaggcctcgcctctctcgaacatcagggatttctcatccaaagcaagtccgactccaagcttgcgagaacgtcgacagtctccgaataaaatttttgatcgaacccttggcgagcattcaactaagcttcacttcgacgacaactagatcgatatcgggactcgacggcagcacaacaccaccacgagatggaggcaaactggctacgacggcttaggacatatgaggaggctgacgagatccgagctggggaaaaagaacacatgactgggtgttaactgccgggtccgaactcgagggagaaactcgaccggcgagctgaagcgagctaggcacaccacgatttgaggaagctgcgtgcagaaaaacgtgcgcgcagggacgagctcgacagggatcttggcg

SEQ ID NO: 34418 - DNA, 2278 bp, Zea Mays
ttccgaacccaactcaaccccgaggcccgcgccctctccgcccggcgcagcggctgcgagcttgaagccgtcaccgcccccgccgccgaggcgaactcgaagctgcctccgccacggcgagctcgagccattcctgcgttgctgaaccgcccccgccgtcttccttgaagagagagagagagagacacacacacagagggagggagggagggagatttgcttcctcctcctgcgccgctccattttgaaatcgatcccgttcgtttcggttgccttcggcctcggcggttcatgaggggttcaagaatgaatccagtgactatactccttgtcaagaccagaaccgagcaatggcctttcctagacaaaacatgacatacagagaaaggcattgtcctgtagagaatgagaaactgcattgtctcatcccagcaccaaaaggatatgtcacccctttctcttggcccaagagccgtgactatgttccatatgcaaatgctccgtataagagtctgacagttgagaaagctgttcagaactggatccaatatcagggagatgtgttcaaatttccaggaggaggaacaatgtttcccaatggagcgaatgcttaccttgatgaacttgcatccatcatcccactcgctgatggcactatcagaactgcacttgatactggatgtggggttgcaagcttcggagcttatctaatggacagaaatgtattaaccatgtcatttgcacccagagattcacatgaagctcaggttcaatttgcgttggagcgaggtgtccctgcagtaattggagtacttggaactataaaggtcccatacccctctagatcttttgatatggctcattgctcacgctgtttaatcccatgggagtcaaatggcggtatgtacatgatggaagtagaccgggttttgaggcctgggggttattggatactttctggacctcccatcaattggaagaaatactaccagtcatggaaaaggtctaaacaagatgcagaggaagatcaacatagaattgaaaatattgcagaaatgctttgctgggataaaatctttgagaaggatgatattgctatttggcagaaacaagggaattcatattcatgtcatcaaaaggatggtcatgctagcaagatgtgcaaagttcaagattcagatgatgtctggtataagaaattggaatcttgtataacacctcctatagaggcagcacagctaaagaagtttccagagagactatctgccattcctcccagaattctggagggtcaggtcccagacataacagaagaagtctatgaggaggataataagttgtggaagaagcatgttaatacttataagagggtgaacaagctgataggttcttcaaggtacaggaatattatggacatgaatgcaggccttggaagttttgctgcaactcttcattcttccagttcctgggtaatgaacgttgtgccctctatatcagaaaggaacactcttggtatcatatatgagcgaggtctgattggtatataccatgattggtgcgaagccttctcaacataccctaggacatacgacctgatacatggcaatgacatcttcagtttatatcagaacaagtgtgatgcagaagacattcttctggagatggataggattttacggccagagggtgcagtcatactgcgggacaatgccgatgtactgaacaaggttagaagtatggtggcaggaatgcggtggaagtccaagttactagatcatgaggatggcccgcacgttcccgagaagattctgatttcagtgaaagaatattgggttggcagcgaggaacagaacagctgataggtacagaaccatgttgatgctggatgccagcctctttccctgatgcgatcccctgatgctgttttgtcggttaatagattttgttcatactgcatacgtacagtactaaagacccttagatgatcgggacatacctggatttttgctgtgcatatatagtaatcagagcgttaagtgaactgttggcgatttgccaaggcatattgtagtgtaggcaaaagttcgtttgaaaaacatgtaggtacgagacaacttagtcgctactttgcccagagattaattatacagatgcacgcaagaagttttttgtgatttcgtatatgaacattatctgttgataatgcatgagattatttctttgagtgtttgtctgattgacctgacaagaggtcacaaggattgaattctgcttcagc

SEQ ID NO: 34419 - DNA, 1347 bp, Zea Mays
ggggatgggagggacgcgtgcccgtgctcctccagtcctccgtccgcactcccactcccactcccacagccggtctccctctacccacgcaacgaatacaatacaaacagagggaagggagcgagcgggaagccaaggtggggaaagcagggaagcgaggccaagtggagcggagcggggcttcggctgggttccgcgcgcggccgctcgctacttccagtgttccatggtgtgggtgtgggcggctgtggcgatagccggagcctgaagcggcgggtggtgtgtggtgggcgcaaggagccacacggagcaggccgccacggcgaggaggaggaggaagaggaggagatggtcgtctgctccacgcgcaagtcgttcaaggactcgctcaaggtgctcgaggccgacatccagcacgccaacacccttgcagcggatttctcgagggactacgacggggcctgcctccagatgcgcatgtcctacagccccgccgcccacttcttcctcttcctcgtgcagtggaccgactgcagcctagccggcgcgctcgggctgctcaggatcctaatctacaaggtttatgtagatgggagtaccaccatgtcgacgcacgagaggaaagcgagcatcagggagttttatgctgttatctttccctccctgatgcaactgcccaaggggatcagcgacgtggacgaccggaggcagaaggcggcgtgcacggagaggtaccggaggagggacgaggacgagggcaagaggccggtttcggaggccgacatcgaaagggaggaagagtgcggcatctgcatggagatgaacggcaaggtggtgctgcccagctgcagccatgccatgtgcatcaagtgctaccgccaatggcgatcaagatcgcaatcctgccccttctgtcgggacagcctgaaacgagtgaactccggggacctgtggatgctcaccgactgccgggacgtggtcgacatggcgacggtgacgagggagaacatcaggcgtctgttcatgtacgtcgagaagctgcccctcgtcgccccggacaacatcttctacgcctacgattctcataggggtagagggtgttcctcgtcctagctaggacgtggctaaacgcttggaccggggtgcggactctgacgacagacctttttcagtctatctaactgggtgtacagtctgctcaggtcctgtaaatataatgtctgtgcatatttatggcttcaaatgccccgttgtttttcagctggatatatttgtgtctccaactgttctgctttttattttcttgcttactgccaagctgtgatgctcaagttttctggatggaat

SEQ ID NO: 34420 - DNA, 1889 bp, Zea Mays
aacggaacaatacttatctttttccctgcccccgcggccgccgccccgaacgcgcacgcctcctccgccgaagccaagcaaaccaccgacctcgacggagtcttctagccgtcaccctcgttgtcgccctgctcctcctctcagccggtccggccggcggcgtggcgtgaagatcaatccggacccggaacgagttccctcttttgctggttacataaactttggaataggaggatatcccatattgatctttgtgattgagattgattttttttctggaaaatggagatacaaacttcagggaagcccattgatgtgctgatggagaaggttcttagcatgaacattctgtcttctgattactttaaggagctctataggttgaaaacctatcatgaggtcatcgatgagatctacaacactgtcaaacatgtggagccttggatgactggcaattgcagaggcccctccactgcattctgtcttctatacaagttctttaccatgaagcttactgtcaaacagatgcacggtttgttgaagcatcctgactccccacacattagagctgacacggggatgacaaagtttgcaagaagttcatagtgtaccagtctgtgctttggagttattggtttcttgtatcttcggtatgttgcagacccaaaggttctttggatgtggtatgagccctatttgagggatgatgaggagttctcccccggatctaatggccgcaagacaaccatgggtgtttatgtgcgtgatcttatacttggacagtactactttgatagtcttctaccaagaattcctctcccagtaactcgtcagattacagccaatcttgaaaagatgaaattgcccactaagctttctggggcaactggagactccagtcgtcagggatcagaagatactgcacgccgtcctccttcagtgaaagcttctctgtcagtttcctttggacagcgtgctccacatcgggcttccaccagggattcatctccagttcgtcgaacagtcacccgtgatggtcatcgaagttcatactcaccatctcgtcgtagtggtagccgtgagggtcctgatcatgaccgttctgaccgggaactggatcattctagtcgtgaccgtgaaagagcccgggatcgttcaaaccgggatcggtatcattcaagccgagaccttgaccgtgacaaggatgccagagattatcatcggcatgagcgtgatagcagggatcgtgagtactacaggtccaggcattcagaagaaagacgggacgacagaagagatcatgaaagtagcaggcacaggcgctctagctctcgccacaggagcaggagtaggagccgaagcaggagcaggagtaggagcaggagaagccgcagccgaagcacgagcaggaggagcctgaatgagcagcgatccagcccattcagggatgcaaataaagagaaggcagccaccgtgtcgagcaacctagcaaagctgaaggacttgtacggtgacataactgcaaagaaggaagacagtgatgctgaaaagcttcaccgtgattcatgcgctgaggaggtcatcaggctgggaggccctcgatggaggtaactttgagacctgtagaactctggtttccgctttgttctgccagcctctctgtaggccttcttgaaaatgctctttatgttcccaaacttgatagagtcgactggtacttcggtatcttgacttgttgtcgcctgacatttgccattaatgtatgttgtttggtatgttattcctaagaattcctatgacattggaacgtactgtataaaccgtggtatccgagcttcatgtttgcttgatgcttatgcaaattgaaggttgaataagtttcagtttca

SEQ ID NO: 34421 - DNA, 1158 bp, Zea Mays
cgtaattcaacaactagctgcatcgtcttctccaccgaccttgccgccgtcgccccgccgctccatccgatctggaggacgacgccgcgaagcggtctgtcgaggagcagcagcagcgtacagccatcgacgctcacgacagcgatgtcgcgctagtgatggcgcaagcaaagcaggcgagcgaggaggccgagcggctggccacagcgagggctaaggtaggcatgcagatggccgagaagcagggaaggattgccacgctggacatcgagtgcgccacactgaagcagaccttggagctcctccgtcaggaaactgcaagtacatttgtgaaactctgtgagaaaagattgttctacacaaagagaacagaaaccttgactgtcaaactacaggagcaacaggaatggtttagtatgaagaataagattactagacaggagccacatgttgccaaatctcagagcaagcaaaacttcattgaaggggagaaacatgtcatatttaactcagaagggagcctggataagtttaacaagcccgggaaactctacacacaactggtgtcagctcagctcaagatccaagacatcaaatcacaaagatcagcgcttcttttagaaatcagcagaatcaagcagattctggagcaagagaaaaacataattcctggttttcccgctgcactacagcagatggatatgaagtcattggaggaggaatacaaagctctgcaaggtgataaatcgggggaagttgagtacttccagtctcttgatgaaacaattaatgggatgaaggggattttggatcctgtcaaatgccaatgtggactggagtacaacttaaaacttgatggtgaagccatggatataagctaagcaagaacgaccacatacgcagatgcccatctccaccagatttcgtgcattttagatctgtacagtgtgagagatggattattctttggaaggtacagaatcttctcgcatgtatacgggtggatgctttgggcagagcttgacagcgtcatcgcgaataatatagaattctgatgttagaactatctggagcttgaacggactatacggccatagttttgttcaataattgtttttccttacgctcaaccgcttgtccagattgcagacataaaag

SEQ ID NO: 34422 - DNA, 4239 bp, Zea Mays
ttcacatgtgccgcgccgcgccagagcatgaagaagaagcgccccagttcggttccccggtagaggcgtcgagcccaccccgcccgcccctagtacgagacagcgagcgggacgaagaagaaacaaaacataacagggccgtgcgttcctgccggaactggtggccgcctgccccgcgcaagaagctaccacggcagcagcagaaaggaggaggaagaggcgtcgtcgtctcgaggatcgcgcgcgcaatgcctctgtcgcggcatacggtccggagcgagtacgcgctgggcggccgcgacctctaccgcggcgccgaccagcacgacccggaggccgtcctcgatggcgccgccatggccgggctcgtcggcgtcctccgccagctcggcgacctcgccgaattcgctgcacaggtgttccacggcctgtacgacgaggtgatgagcacgtctgcgcgagggcacggcctcatgctccgggtgcagcagctggaggcggagctgccgctgctagaggaagactcctgccagagaaactacctgcacgtcgttgcctctaacaggggtgtcgactggcatccaaatccaagggtggaccatggggttgtcgcaggaggcgacacgcctcgcttcatcatggagtcggtcaagcagtgccgcgggccgcccaagctcttcgtgcttgacaagtacgatgtcggtggcgacggggcgtgcttgaagaggtacaccgacccgtcctccttcaggacgggctccgcatgtcctacgaccttgctgcaggaaggaactcgagatgatagaagacctctgagagccgtggagatcagtcctaaccttcagaatgctgagattttcagatcccccaatgcagccgacaatttctccaaactggagaccggttcatcggctggagctctggatgaagtgcccacaaaccgcagacgactcaagttccgccagctaaatggatccgtgtttcaaagcttcagaccgctcatgcagaatctgcatgaaaagccttcatcagaggagagactcatcacaggcgaccactcaaaagtgcatgtatttatggttgagtcacctgaaccaggtgctgaagagagagatgtcatggtagacacgtccgacaacatggagaaaggcaagctcaccgttcgcaggaaaagatcagtttctgaagaagcactgtcacgttcgtctgatgctcggtcagcaggaagcagcaggggcggctacgactccgaactggatatctacgtggacgcattaaccacgatggattctgaagatttcagtgctccggagtctggagcaagagagcaagctactgaagaagaagaagaagagcagagatgcaatggcagtgtcaccagtgctgtatcaaatggcacacgagatattactaagaagaccaaggaagtcaaggagaactccaagaaaatagcaagcaagaggtccaagtatgttggcagcatggagctcactgcttcaaaagttggcattctgccaagggagctctccgagaagcatgcccctttctctggttccctccggtacatggcgaagcaactccttgaactgaggtatgatggcactcaagacagcgaattatatgacgttgaagcagacggcgtgggacgtgatgtcaagtaccaggaaatttctgaccatgctgttgaagctaaggagagtgatgctgtgcacaaaattctgtcaggttcaccctatgatgatgcgggtttaggaaaatgcccgcaggaagaaattaaccatgggcaggagcatgatgttccacctactgacagtccacatgattcggcccctgatgaaggaaatgggtttcaggactccaacatggcctacttggtaggcatcatcacatcttccagttcccaagagggagaaggatgtacaagtactgcactgcatgagaattcatctatggcagtgctcaaccatgttttggaacatgctcaagagaggtttggggaagatcttgacaaggaagtggatgtggacattcatacagaagccatttctgagaatacatctgataagtgtgaggacttgaaagaagtcagcatttacacggagcaggtgaatgtggaagatatggaggaaatcaatgaatctgatgtatatgcgttggacgatgaaagagccgagtacatagaacagcaagtagtttcagatggtagtatctcttcaccggtttcatccaagcaatcggatgatccttgctggataactccactcaccctcgcagatgaagatgatacagtggcatgtaaggtcgtcgacagacctgaaggggatcatgttatattatcagaaacattcaagggcattgatctacctaatgtggtaactgagtcagtaatcaacagcaaacatgacatgccaaataatggacagtactatttacatccaaaagctacttttggacaagatctgtgtcttggcagctataagattgttggagaaaatggggaagttccactatgcagctcaaccactgcgactacaactccagaactaactgtaaacacagagacaaagcatgagtttcatcaagctgtgtatcaggaaccatcgaattcattcaatagcagtgctgaagtttttggagatccactagctcccgactccagagatgatgcaccgtcagtcatctcaagctttgattggatgctcaatggtgcaacgcagaagtcattcaatatctttccttctcatccaactaatggaaatgcagaagaaaatggttcttctgaagatgtgccaccgcttcctcctcttccaccgatgcagtggcgaacaaacaagatacagactgggccatcaccgttatctgcgaaaattgggagaccaccaaggccaaaaccttcagtaaaacaacaacaaagtgaagcttctcatgttcttcaggagaacagtctgcacaaaggcttgagtttgcagaatgaactagtgcaggcaaatatttctagtgaccatgagaaaaaccaaattcttaacatagattttcgtgaaagtcatcaccaggaaggagaggagtatgatgcacaggattctaatccatttgcctcgtcagaagttgaatgcttggccgaagttgcttcggtaaaaagtgaaaatctgcacccattgcagctacctgagcttatagttgttctggaagaggcatggtcagagttcggtaatataaaattcatgccagaacaagaaggaaaattccaactaagcaatggactttctgtttggaatgacttgtgcacttctggtttgtcatcacaaaagaccagcgagaagcctgaattttttgcagattataagggaaaggaattttcatttgcaggtagtgacgaagttgcagattcagaagaaaacaaaccaaatggtgctgttaaacatctgcagaatcctgacttgccagcacaacagaaagacgacatacatgattgtgatggcaaggtaacaaagttttcctctgcattagaagaggactcgtcacaatcaccaactcatacagtgtcaggaccacctagatatcctctacttcctgttacttctcacgacagaagcatgataagaaaggctccaactttggttcagccttcgagtatgcttgcagatgagaagaacacactactggaacagataaagaacaagcctgttcttgcaaagagaccagatgtaatgggtggtccaaaaactaacttacaagtggtggccattctagagagagctcatgcgattcgccaggctgttgctgatgacgacgacgatgataactggagtgagtagctggctcttcctaagagcaagttcggcttctgatgtttaacaagtgcttgcgtcgatctagaactttgtgtccctgttcttgcatggagcaaaagatggaatggagccaacttactataggatttcatgccaagacagttggtctggaccaggtgatgtacatggatgggcaagaaggagaaggatagaagcaacattgcaactccaaacatagtgtgtgtctctacttatactatctgtaacgtttcgaagcgcgtcaatgtttattatcattcaatgcgcctactgaaaatttgacgtgcttggtgaggattgttagattgtatatgcctcctattagtattgtgatttttgtaacttggtgagtgtacataaagaagcatgatttttgagttgttttgaacaaatctaaagtagctagaga

SEQ ID NO: 34423 - DNA, 1458 bp, Zea Mays
gttataaacgcccccacacggttcctcgtgggtgacacctgtccacccattcccctcgcctcgccgccgcggacttcccttcccgcacccgcatcaaattcctcttgttccgcggaatttcccttgctaatcctggtatctcctgtcgctaagccactctactccgcctaacccccgctctgagctcaccggactggcggctccgtccggctctctcagcgtgcgcgtgctcgtgaggagggctctttcgaagcgtgtgaatccggtgggcgacgtgaaccagggatggatttcccgggaggaagcgggaggcggccgcagcagcaggagccggagcacctgccgccgatgacgccgctcccgctggcgaggcaggggtcggtgtactctctcacgttcgacgagttccagagctcgctcggcggggccgccaaggacttcggctccatgaacatggacgagctcctccgcagcatctggtccgcggaggaggtacacagcgtcgcggccgccagcgcgtcggcggcggaccacgcccacgccgccgcgcgggggcccgtgtccatccagcaccagggctcgctcaccctcccccgcacgctcagccagaagaccgtcgacgaggtctggcgcgacctcacgtgcgtcggcggaggaccctcctccggctccgccgcgcccgcagcgccgcccccgccggcccagcggcacccgacgctcggggagatcacgctggaggagttcctcgtccgcgcgggcgtggtgcgggaggacatgacggcgccgccgcccgtaccgccggcgccggtgtgcccggctcctgctccgcgcccgccagtgctgtttccccatggcaatgtgttggctcccttggtgcctccactgcaattcgggaatgggttcgtgtcgggggctgtcggtcagcagcgaggtggtcccgtgccccccgcggtatcgcccaggcctgtgacggccagcgcgttcgggaagatggagggagacgacttgtcatccttgtcgccatcaccggtcccgtacattttcggtggtgggttgaggggaaggaagccaccggctatggagaaggtggttgagaggaggcagcgccggatgatcaagaaccgggagtcggccgcgaggtcgcgccaaaggaaacaggagagggaaacagggaagagacttgggacagctaccaggcgtaatggattgtggtatatggatcatgaggggactaatggtacaatatgcactatgctggcaacaagaatggaagagaaggaggttgcagtgatgctcttgcattgtagattagggcatctttcttttgataagatatgcaaagcttttcctgatgtaatgagtggggtggataaaagcaagctattgtgtgatgcctgtgagtttgcaaaacacacaaggacatcttatattagtcgaggtatcaggagtatatctcct

SEQ ID NO: 34424 - DNA, 4003 bp, Zea Mays
aaggacccaaccccacccagctagaagctgccctcactcgctccagtctctccctctcatggcctcagcctcagcctcactcgctcgctcgcaccaccagctttgctccagagtcctgactcctcctagccttctcctccctctctcccctaccaccacacaacgggataaaccccagcacgaggccggagctgctgctggaaccgtcaggccgtgaagagcctgcggttcgatctgctgcaagagctcctcgtcgatctcttctctgcgaggtttcggtctgaggagatgtggtcaagttcagatgtgactgatagttctagtaatgaagctggtcatgtaatagcgactactgttcacgggcgcaacggcctgcctaaacagtctgtcacatacatcgctgaacatgtggttggaactggttcttttggggttgtgtatcaggcaaaatgccgagaaacaggggaaattgttgccataaaaaaggtccttcaagataagcgttataagaacagagagctgcaaatcatgcatatgcttgaccatcctaacatcatcggtcttaagcattacttcttttcaacaactgaaagggatgagctttatctcaaccttgttcttgagtttgttccagagacagtaaacaggattgcaaggcagtacaatcgaatgaatcagcggatgcccctcatttatgtcaaactgtacacgtatcaggtctgccttgactaggtggtttttactaatcattcatgttaaatgctgttttttctttataattttttcgttcagttttaccattggtcttctagctatagcacttctttgcacactattaaaaaaatcttttctctatgcattttttggaatagtacaaaaaagcatcttagaagccctcgcacactattattatcatttaactgattttaaagaagagaaggggacagataccggaaaatgagggtactagtttggtagagttgtctaatggtcatgcgcatgccgcatgccacatgttccgcaatcaaccttacgcatcatggattctgcaggacattattttgtcatgttcattcatttgaaataagcttaaagcaatggagaaaacagagcatgggtccccatgacttcctctggtactgggtcctgccccctttagtcatatagggtcacaaatcaaaataatatacatgtttgacttaggtctattttggaccgtttctgtcttttcttaatatattgaaacgcagctctcctgcattttcgagagaagaaaatgtatgagtgtgtctgttccctgaaaactaaacatgttactactttaatgtatgtgctaccttgtagaactaaaattgtggcgacatcggtagcttcttggcatccatatttatgttttatcctttgaaacagaatatatattcctcatgttcttcaacagtagcactgtactggaagtatggaacttctattggagttgcctatcaatgattcacattgtttgtttccatgcagaatctaagataaatattattgagacataatggtgacagcttgtcaattatcctgcctttggaattattttctactacttgcttcctatatgtttagagtgatctgtttgaatgatcacttgggtttacgacgcgtgtccaccagacatttaaattcctgagtttagttgacgtagtgattttaatccattcttcacggactagtactgtctgtttattgtatgacttacagttagtgcaggcatgaatgtttgcatgactcaaatcttattttgattcagctgtattttgtcttttatgacagtgagaatatctgctattctgttttaatataattttgtttgctccatacaatcgttggagtcaaacaatttctagctgccttaccttttagtgtcatacccaatcgcagatttctgctttgcattaatttatctaatttgtcctgcagatatgccgagcgcttgcttatatacataactgcattggcatctgccaccgtgatatcaaaccgcagaatgttcttgtgagatatgattttttttcttttctataatgatttttgttgctttacatgtatcattcgcatttgttggatgttttgttgctgggatggtatgataacgccatagaatagcaattggtttttacaagtgggactgaatttttagatcatgtgtagcccgatgtcataattattggtagtttcacccaacatctacggcactagcagtttgaaattggaaatgtcaatccacgtgtgcattatttagtttcatatataggtgctatcccatgtgcatcattttattcctaggctgcacatatcatattttataccctgtgtatgctgtttttcttgtcaatggtatcttactatcttctcttgtggaacatttcgtcatcatctgttcttttataacaaggctggacaaaaaaccatgctcccagttccacagatgtcaattggttctgtacatcccactagtgcgtaaatgctaaactaattcaaaatttatttgagcaaactgtgagcctcggaaaggagcatggaagatcaatgcaactagctagcttgttaacccaccatgactccataaccgcatagattagagattgtttgaagaagcaggagaaactgaaactcaattgtagagtatgtacgaaacgaggtttccataattgccttctttttgtctcctttgaatgctgaggtagctactgtttagctacttgaccttttctttacctcgggaatagcagattacatatttatgatgagtgatgctttttgctaatacttctactgtaggttaacccacatacacaccaactcaaaatttgcgatttcggaagtgctaaagtattggtcagaggagagccaaacatctcctacatatgctcaaggtattatcgagcaccagagctcatatttggtgcaacggaatatactactgctattgatttgtggtcaacaggctgtgtcatggcagagctgcttctaggacaggctctgtttcctggagaaagtggagtcgaccaactagttgagatcatcaaggttttgggtactccaacaagggaagagatcaagtgcatgaacccaaactatacggagttcaagttcccacaaattaaagctcatccgtggcacaaggtttttcaaagaaggcttccacctgaagcagtggaccttgttagcaggtttctacaatactcaccaaatctacggtgcactgctttggaggcctgtatgcaccctttcttcgatgagctgagagacccaaacactcgtctacccaatggtcggcctctgccgcctctcttcaacttcagatctcaagagctaaaaggcgttcccccagaagtcatcgatcgccttgtcccagagcactcaagaaggcagagtttgttcatggcgctaaggacctagtttttgccgttctttttgcccccttttttcccaccgtttgccaccttgagggaagcttgtaaagctatagcttctcctttcccctcgtccttactttcctcccctctctttcttccgagctttgtgtggatgagagatccttgagatacactgctagagctgtgagttccaggatgtgaggttcgagtgtgtgtgatgtgcagttgtcgcctttgaggtcggagatttcagttgcagtgttgtgagaggcttgtgaagcttttttgtctacttttcagtgcttctctggcttgaagttttccttcaattcttgtgaactggcttcaagatttggcttcgtgaaccctgtgtgcgtgtaaaagtactggttggatgctgctgcaccaattctggaaaaaaaaagcttacaactaaacacctacttatgttttgtttagccaaattcagtgccttcctgttatgcattgcggttcaagatcagatgaatttatatagggtctgattatttagccaaattcagtgccttcctgttatccatttcaatatggaagagttcaac

SEQ ID NO: 34425 - DNA, 2128 bp, Zea Mays
caacaggcagcgaagcgcctggagactggagtggagagcggagagaaggacatgcacggagacggaggcgtcggtggcggtgtcgccatcatcctgcacgccaccagcgacgaacacgcacgcgacgcgacgcagccttgtcacgccaggacaaatccagcgctccccaaagcagaaagaccgcgacccaaagcaagctcaagccgctccgctcctccagtctccagtctccaccgcccgccaaccccgagatatacctcccttcctctcgaagcttcgtctgcagacgaagtcgccggctcttccctcggcgctggtgccggtgggttgcctgtggcggtgggtgggtggccgggtggtggtgttgctgggatgcccgccgcgacggcgaccgcagcccgcctccgcgtgccgctgccaaaagccgcccaccactcgccctgctcgagccggcgccaccccgactgccgccgccgctgacgagacgagcggccacacgcttggcgcgcgccatggatgccttgtcccgccctgctgtcgtcatcgacaacggcaccgggtacacgaagatggggttcgcggggaacgtggagccctgcttcatcacccccactgtcgtcgccgtcaacgattccttctccggctccgcccagccggcggtgaggggcacccccgccagggggaactggctcgctcagcacagcgccggcgtcatggctgacctcgacttctacatcggcgacgaagcgctggcccgatcccgcgccagcagctcgcatagtttgagctatcccatccgcaacggccaggtggagaattgggataccatggagaggttctggcaacagtgcatcttcaattacctccggtgcgacccagaagatcattattttcttctaactgagagccctctgactgcccccgagacccgggagtacaccggagagatcatgttcgagacgttcaatgtgcctggcctctatattgcagtccaacctgtccttgcgctggctgctgggtacactacaaccaaggtgttgtagttgatgtgggtgatggggctacccatatcgttccggttgctgatggttatgtcattgggagcagtatcagatctattccaattacaggcaaggatgttacccagtttattcatcaacttctaaaggaaagaggtgagaacattccagcagaagaatcttttgatgtagcaagaaggattaaagaaatgtactgctatacttcttcggacattgtgaaggaattcaataaacatgacaaggagccatcaaagtacattaaacactggacgggcaccaaaccgaagactggtgcaaaatacacatgtgacattggatatgagcgattcctagggcctgagatcttcttcaacccagagatatataacaacgacttcaccactcctttgcaagttgttattgacaagtgcatccaatcatctccaatcgacacaaggagggctctttataagaatattgtcctgtctggaggctcgactatgttcaaagatttccataggaggttacagcgggacctaaagaagatagtggatgcacgggtccgtgcatctaatagccggcttattagtggggatgctaaggcccagcctatagaagtgaacgtggtcagtcatccgatccagagatatgcggtatggtttggtggctctgtgcttgcttcaaccgccgaattctacgaggcttgccacacaaaggcagagtacgaggagtacggtgccagcatctgccgaacgaatcctgtcttcaaagggatgtactgactcagagcggttccctgtggctgacgtcgtggatgatatccactcaaagcttaaatggggagaagtgacagtggtcgtggagacaggactgtcgagagggatcctgatcgtggggaagcatagccgtacgagctgtacaaaagagaagcgcaaatagataggtttatgtttcaccatacaatttagatgctggtaggcctgacaggatgggtttgccacccctgctgaattgggtggcattgtaatttgtagcgtcaacacttctggcggtgcgagattgctccttgtatacatgttgattcggcagcgatgttttctctctctcgg

SEQ ID NO: 34426 - DNA, 2153 bp, Zea Mays
gtactagcccacagtacaacatcactcgctctcgctcggtcgctactccactctcacgctgtgctggctggcactccgcccggctgcccttaatccttatatagcgacccctccgagctcagtgactccccactctccgtgctcttggtcgagtagttccctctcctctctctgattcttctgcttctcggtctagctagctagctcggtgcctcggccaaccgggcgtcgcgcgctggccggcctgccaggcaagcaacaatggcagattcaggggaggggcgtcgggtgtgcggcatgccggagaaggcgcagctgcacgtggcgatgctgctgctgcagttcggctacgcgggcttccacgtggtgtcgcggctggcgctcaacatgggcatcagcaagctcgtcttccccgtctaccgcaacatcatcgcgctctgcctgctcgtgcccttcgcctactttctggagaagaaggacaggccgcagctgaccctcaacttcgtcgtccagttcttccttctcgcgctctgcggcatcacggcgaaccaagggttctaccttctgggcctggacaacacgtcgccgacgttcgcgtccgccatccagaactcggtcccggccatcaccttcgccatggccgcggcgctgcggatcgagaaggtccggctggaccgccgcgacggcgtggccaaggtggcgggcacgctggcgtgcgtggcgggtgcgtccgtcatcacgctctacaagggccccaccatcttcggtcccagcggcagcggcggcggcggcggcctcgagctggcggcggtgggcggcgacaagaactggacgctggggtgcgtgtacctgatcgggcactgcctgtcgtggtcgggctggctggtgctgcaggctcccgtgctgaagaagtacccggcgcggctgtccgtcacctcctacacctgcttcttcggtgtcatccagttcctcgtcatcgccgccttcatggagagggacgcggaggcctggaagttccactccggatccgagctcttcaccatcctatacgccgtcagtatatatctctctactgattagcttaattacaataatatatatatagagagagagagagagaatgggagacacacatgccctcctgacgcgcgcggcaaaagtggtggtgctggtgcaccacgcaacaacactaagctaatagctatagctagctgtgtgcaaatgacgcccggcctttttccattcagtgtattattatgaactgaaaagctggtggctgggttaattattattagttgtttatcgatcatcagatccctgaagcaacaaccttttggaagctagactgatgatgttcttgtgcatgcctgcaggggttcatcgcgtccggggtggcgttcgcggtgcagatctggtgcatcgaccgtgggggcccggtgttcgtggcggtgtaccagccggtgcagacgctggtggtggccatcatggcgtcgctcaccctgggcgagaagttctacctggggggcatcatcggcgccgtgctcatcgtcgccggcctctacctcgtgctctggggcaagagcgaggagagggcgcgcgtcgccagggacgccgtctccggcggcgaccgcgaggggctccttgtcgcggccgccgccggaggtggtggcggcggcatcgtcaggagcgccggcaataaggcggcgtcggccgcgacgcagcctctcctgctgccgtcctccacccccactgacaacgtctgaccgatccatggatggatgaatcgtcatccatgcttgcctttggtgcgtggagatctgaggcagcatgcagaattaccagttattagtcatttctttgaggttttccttgttgattttcacgcatgtatgtatgctgctacctacgtgtacgtacgtacgtatatgcatgcatcactatggttgttacgcctttgatcacaagacaactacgtagctaggatcgtcggagtgtgttgacgacgtttggtatgtgcatgcgcaatgcctcatcacaggaggtgtgtaataatattagtttgcaggtataattatgcgttttattaagatcgtccatatatctgtgctacctcgatacagtaatctgtgagaggaaactgcaggaaataccct

SEQ ID NO: 34427 - DNA, 1211 bp, Zea Mays
tccagtcattgtggttatcgggttgggtcgggccgtatcttcgtctgcatacacacacacacgcgctggtttagactcagcacacagcattcattcagctagcgagcgagagagaggggaacaaaaaggaggggcgaggaggacagggagccgagcgcaagagctgaggcttcgccgcgaaaccccagacctcgcgccgccccttcccctccgcggcgtcgtcctcgcacgctctccgatccaagatgtataagctggggagaggaaaccgcgacaaggtgcagcagttcatgaccattaccggcgccagtgagaaggttgcccttcaggcactgaaagctagtgattggcacttggaaggagcttttgacttcttctatagccaacctcaggtttctgtggtcaatactcggcatcttgaagatattttcaacagatataaagaacctgatgctgatatgataatggtggaaggaatatctcaattttgcaatgatctgcaggttgatcctcaggatattgtcatgcttgtcatatcatggcacatgaaagccgccacaatgtgtgaatttactcgtcaggaattcattggtggactgcaatcaattggggtagattcaatcgagaagtttcgtggaaaattaccatcattacgagctgagctaaaagatgacaataaattccgtgatatatacaactttgcattcacttgggcaagggaaaagggtcaaaagtctctctcactggagactgctattggaatgtggcagttgctatttgctgaaaggaactggcctcttctggatcattggtgtcagtttttacagacgaccgatccacagttatccaactacgacgacgaaggtgcctggccctacctcatagacgaatttgtggaatatctgactgagaacggactcgtccagcgtaaaagatgaacaacggggagatgcatctccaaacaatggttgggctgtacaaacatgatttatctcggtcagctcgacgcccagggcctgatattggcactcctgctcaattcattcaccaaactgttggcatatcattgaatttgcttataaacgtggggaaacataacttgcctgggaagtggtggctgtcagcctgcgatcgtgaactgtaacttatcgaaaatgcaacggagtttgggactctactatatgatttgtttcagtttttcttagggcttg

SEQ ID NO: 34428 - DNA, 6257 bp, Zea Mays
aagattttgaaaacctgcggaacaaattaataaacgaaccagtagaagccaaacgaaatctttgtatttcatacacttagcttttcccctcctttttcaaaaaaaaaaaccctctcccccaactccacctgcttcgttcgcttcccttcatccccactccaccaaaccctcgcgtcgctgggactgggagcagagtagagcacagcggagcagattagcagaaggtgtcgagtggaagcaaatggccaatgagtggccgcggtggtggtagcatcctcctcgccttttctccccgtctcccgcgttctggttgttgcagcgagcgggagcgggaggacacgtgctacccccgtcgcttctcgggcacgcctccctcactcggatctgggccgcgcgcgcgagatcctgagctccgggttggagagctcccgtgctccagctcaggtgacgtcgatggagcccgcggtggctacagcgggtgaagggcagcggttcaagcggattccgcggcaggcgtggtcggggaacctcgaactgggtcctctgcttaatgaaagcttagatcactggccacatctaaatgagctggtacagtgctacaaggctgattttgtgaaggatgactgcaaatatggacactatgagagtgttgcatcaccgtctttccaaaatcaaatttttgagggacctgatactgacatagaaacagaattgcagctttgcaatgcaaggcattccaagtctgaggatgctactgaagatgatacaccaagcacctcagggaggcaaatatatgaaactgaatcatctggttcgtcttcaaaagtgcactgtagtttgtcaccattgccagcatatgaggctgcatttgattgggagaatgagaggtctttgatatttggccaaagggtgccagaaagtatacctgcaataagcaacagtggcttgaagataactgtcaaggtactatctttgtcattccaagctggattagtcgaacctttcagtggaacgatttgcttgtataacagagatagaagagagaggctgtcagaggacttctatttccatatgcttccaacagatatgcaggttgaccagggttccttggatcgtcgaggtgttttttcattggacgcaccttctccatcggtctgccttttgattcaattggaaaaggctgctactgaagaagggggagtaacaccttctgtttattctcgtaaagagcctgtgcacttagctgagaaagagaagcaaaagctgcaagtatggtctcgaatcatgccttataaagagtcatttgcatgggccatgattcctctgtttgaaagtaaccgtgcgggtggtcttagtgatgctgcttctcctagcagtcctctagcaccgagtttatcaggatcaagttctcaagatagtattgtggaccctatttcgaagcttgctttagatggaaaagtcaaccattactcaagtggaagctcagttattgtagagatatcaaacctaaacaaagtgaaggaaagctatatagaggactccctccaagacccaaaacggaaagtacataaaccagtgaaaggtgttttgagattagaagtggaaaaacttcatgatgaccataatgatgtggataacgcttctgaaggtggaagcatggccaatgatttgaatgatgctggtgacatcaataatggcagaagcaacagaagtagctttgatgggattcacagttctgtgaattctattgccattgccaaaaaagatgctcatcacaatggacacacttctaatgctgagaatgttgacaattttcaagcttttgactttcgggtgctgacccgaagtgagccattttcgcaactttttcattgcctctatgtgtacccattgactgttagcttgagccgcaaaagaaacctctttgttagagtggaactgagaaaggacgattctgacatcaggaagcctccattagaggctgttcatcctagggagcggaatacgatgctacagaagtggggccatacacagattgctgttggaacaagaatggcttcctaccatgatgaagttaaaatcagcctacctgctcttttgacaccccaacatcatcttgtgttcacatttttccatgtagatcttcaaatgaaacttgaagcaccgaaaccagtgatcattggatattctgtacttccactgtcgacacatattcagttactttcagatgtgtccttgccgattttgagagagctcgttccacattacctgcaggaaagtggaaaggagagaatggactatctggaagatgggaaaactgttttcaggttacgtttaaggctctgctcttcattgttcccaattaatgaaaggataagggacttttttgttgagtatgatcgccatactctacatacaagtcccccatggggttctgagcttcttgaggccataaatagtttgaaaaacgtcgaatctactgcattattacaatttctgcaaccaatacttaacatgttgcttcatcttattggtgatggcggtgagacccttcaggttgctgcatttcgagccatggttaacattttaacccgtgtgcagcaggagtcatcagatggggctgaaagaaatagattccttattaactatgttgattttgctttcgatgacttcggtgatcggcaagcccctgtgtatcctggtctgactactgtttggggaagtcttgctcggagtaaggcgaaaggttatagagttggtcctgtgtatgatgatgtgttggcaatggcttggttttttctggagcttattgtaaaatcaatgggattggaacaaaagttcgtcttctttctaccacaatcttccactaggtgaagatgtcccaccactgcaattgaaagaaggtgtcttcaggtgcatcatgcagctctttgattgccttctaactgaggttcatgagcgttgtaaaaagggtttaagcttggcaaaacgcttgaacagcacacttgctttcttttgctatgatcttttatcaattattgagcctcgccaagtttttgagctggtttcgttgtacatggacaagtttgcaggagtttgtcaatcagtccttcatgactgcaaattgacattcctgcagataatatgcgaccatgatctattcgttgagatgcctgggcgggatccttctgatagaaactatctctcgtcagttctcatccaagagatctttctgaccttagaccatgatgatttatctcaacgagcgaaggctgctcggattttggttgtccttatatgcaaacatgaatttgatgcacgctatcaaaaaagcgaagacaaattgtacattgctcagctgtattttcctcttatagggcagcgtgaagtgctagttgtcattttgcaaattgtgaggaacttggatgatgcaactcttatcaaagcatggcaacaaagcattgctagaaccagattgttcttcaagcttcttgaagaatgtataatccatttcgagcacaacaaaacaggagacaacatgctacttggtgctagttctcggagcccagatgtcgagcatcctgcatccccaaagtactctgaacgattgtccccatcggtcaacacatatttgtcggaggcttcgaggcatgaaataaggggaacaccagaaaatggatacatgtggaacagggttagccctcaattaagttcccctaatcagccctattcattgagagaagcacttgctcaagcacaatcttcaagaatcgggtcaaccgccagggcattgagagagtctctacatccagtgctgagacaaaaaatggaactttgggaagaaaatctcagtactgccgtgagcctcgaagtgttgggaataactgagaagttttcagttgctgcaggcgctcgaagcatcactactgattacgcgaagctagattgtgtaacatcaatcttaatgggtcttttatctaggaaccaatccttggctttttggaaggctttccttcctgtggtctacaatatatttaatgttcatggtgcaacactaatggcaagggagaatgaccgcttcttgaagcaaattgcttttcatcttttgcggcttgctgttttccgaaacgattcgattagaaaaagagctgttgttgggctgcagattcttgttaggaactcattcaactatttcaaaaacactacaaggttaagggtcatgttgacaattactttgtccgagttgatgtccgacgtgcaagtaactcaaatgaaattcgatggttctcttgaagaaagtggtgaagctcggcgccttaggaaatcactggaggaaatggctgatgtgagaagcaaggatctgttaaaagattgtggcctccctgttactgcattggaggcggcccctgaaggctcctctgataataggtggtcttgggtagaggtgaaacatttgtctaaatgtctagtccaggcccttgatgctggtctggaacacgccctcctgggttctgtagtgactgtagacaggtatgcagctgccgagggtttctataaactagctatggcctatgcacccgttccagatcttcacattatgtggttgcttcatctgtgtgatgcacaccaggagatgcaatcatgggctgaagcagcacaatgtgcagttgctgtagctggcgtgatcatgcaggcacttgttggaaggaatgatgctgtgtggagcaaggagcatgttgcttcgctgcgcaagatttgccctattgtcaacactgatgtgagtgcagaagcatctgcagctgaagtcgagggatatggtgcatccaaattaacagtggactcagcggtcaaatatcttcaactagccaataaacttttcacacaagctgaactctaccatttttgtgcaagcattcaggaactcataattcctgtgtataaaagcagaagggcttatggacagctggccaaatgccacacatcgctcacaaacatctatgagtcaattcttgaacaggaggctagccctataccattcattgatgccacatactaccgagttggtttctatggtgagcgttttggcaagctcaataaaaaggagtatgtatttagagaaccacgggatgtacgtcttggtgatattatggagaagcttagtcatatatatgaggctaaaatagatggaagtcacactttacacataattccagactctagacaagtcaacgctgatgagttgcagcctggcttctgctatttacagatcactgctgttgatcctgtgatggaggatgaggacttgggtagcaggagggaaagaatattttctttatctactggtactgttcgtgcacgtgtttttgaccgttttcttttcgatacaccattcacaaaaaatggaaaaacacaaggtggtctagaagaccagtggaagaggcgcacagtgctccaaacagagggttcctttcccgctttggtgaaccgtctgccagttatcaaatctgaatctctggagttctctcctgtcgagaatgcgattggaatgatcgaaacaaggacagctgcattgagaaatgagctagaagaaccacggagttctgaaggtgatcaactcccaaggcttcagagcttgcaaaggatactccaaggaagtgtggctgtgcaggtcaacagtggggtattaagtgtgtgcactgcattcttatctggtgagccagcgactaggctcagatcccaagaactgcagcagctcatcgctgcattgcttgaattcatggctgtctgcaagcgtgcaatccgtgtgcatttcagattgataggggaagaagaccaggaattccacacccaacttgtcaatgggttccagtcactcaccgctgagctatctcactatatccctgctatactctccgagctatgatagaactgtagcaagccagaaattaggtagcatgtgaatggttgttcattcattcagttgcaggttcccaccaaatgtccatatttccattagctttggttgtatagttctaggaaccggaaattaactagtcttcgaagttctgtaccgtattgcagaaccgattcctgattttggagtgtaaagtctgtataatacctagtgttatctgttatgcaccagttatatgctgagttccttcttttttgcagtttgctactatgtcacaactagcggacattttgcacttgtattgtgatacatagtgcatatatatatatatatatatatatat

SEQ ID NO: 34429 - DNA, 542 bp, Zea Mays
atggcgacggaaacgggaagagcgacgccgctgttttgctcaggagacagaggcttatggctgtttgtgggacctttcatctgggagtggactgttctggatgcacaacatgtgtttgagtggttgcttcaaccccacacagataaaggtaaaaaggtcggtcttcctcttcaatctcctccaaagagggtttaacaaggatcactacacatcaacgattctaccggctaaaaggatttgcttaatgtagcctcaccttatgttatcgatcctaccttaacccttcagtcatgcctgttacatacaactgttgtgttgatgcttatattaacctcatatgacgacctaaatagatatgacatcaagactctacatatatcatcagcataagttaggattttgtaacttgggacagtacatggatatataattagccttcatattgtgctacctgattgttgaagctatctgatcattgcaacctttatattttcgaacacgcacaacttcgaaccagtaccaaagatatataaattttgttg

SEQ ID NO: 34430 - DNA, 3534 bp, Zea Mays
acacgtgcctgtggcacgtgcctctcaagtctcaactagtatgtagaaattggctagtcgatcggatactccctttccctgcgaagtgttctacgactggtggactctcttggctgtggctgctgatccgccaatgtcaaaggcacgtgcagcagcagttgcccttgcccctgggtctggttgatcgcgatgcacatgaccggagcctgactttggtgcggcgtgagcacgatgatgcgttgcgcggttcggattcgtgagagctgtagtcaaaaggctggaacggatggaattatccgagcagattgggtgggacggcggagggagccctttgcgccgtcacaaatcgcaaccaatcgccgagttgcttgtgttaaatagctcttcgcgtacgacacggcaagcgggctgcgacggcgactttctcatctgctcactgctctgcttctccactccgctccgctggcagcgcaggccatggcgacacaggcgctggcgccctccctccgcctcctcctgctgctaccgctgctcgccgccgccgccgccgccgccgcgttgtctcacccagcgcacgagttctgcgcggtcgggggtgacgcctccggctgcggcggcggaggagacggcacgaggatcctgatcaagggcgggacggtggtcaacgcgcacctcgcggaggaggccgacgtctacatcgaggacggcgtcgtcgtcgccgtccgcccagacatcccggtggaattgaccctcacacgcacctggagatggagttcatgggcaccgtgaccatagatgacttcttcagcggccatgctgcggcactggcgggtgggacgacgatgcatattgactttgtcattcccgtggacggcaacttgactgcagggttggagtcctacaagcacaaagccgcaaaagctgccatggattatggctttcacatggccattacaaagtggaatgatgaggttgcaagggaaatggaagtgatggttaaagaacatgggataaattctttcaagtttttcatggcatataaaggctccttgatggttactgatgacctcctcctgcaaggcctacggaaatgcaagtcgcttggtgcccttgctatggttcatgcagagaatggtgatgctgttgccgagggacaacagcggatgattgaccttgggataactggtccagaagggcatgctctctcaaggcctccaattttagaaggagaagcaactgcacgggcaatccgtttagctaagttcatcaatacgccactgtatgttgttcatgtgatgagcatcgacgcaatggatgagattgccaaggctaaaagagaagggcagagagtcatcggtgaacctgtggtttctggactagtgcttgatgattcttggctttgggatcctgacttcacgattgcttcaaagtacgtgatgagtcctccaatccgggaagcagggcatggtaaagcactccaagctgctctttcatcgggaattctacaggtactgatcactgcacattcaactccacacagaaagcttttggttctgatgattttcggaagattcccaatggtgtaaatggtcttgaggaacggatgcatatactttgggacagcatggtggagactggcaagatttctgtaaccgactatgtcagagtgacaagcacagaatggtactatacattaaatctgctcaaaccagggtttagtttagaagtaaccagattgtcatatcaaaatgcattgttcaactagcaaaaaaaaaaaaaacaatggtacaaattactcaaccattttcagcgccaagaccttcaacatattccctcggaaaggagcaatcctggaaggatctgacgcagatatcataatcctgaaccctgaaaggagctttgtgatgggtgctctcacacaccattcgaggtccaacaccaatgtgtacgagggcaggaaaggaaagggaatggtggaaataacaatctcaaggggccgagtggtatgggaggatggcgttctgaacattgcacctggttcaggacgatacgtcatgatgccacctttcggctacgtctttgatgggatcgagaagtccgatgcgacctacagagcttccctccgagcccctgtacagcgtggtaaagctgctgcatagctatgacagctgctgatgccattgacagggcagtagccccccatctgattcaagaacgagttgctccaagatcggaaaataacaaacatccaccataacaacaaaaaggaaacatcctaagagagtacacatggaaatctttgcgagccccttccttcttttccagtccgatcggttaagatgctcccgctacaactatgggagggatgttagttaggatttattatctcttctgctatcatggagatatggacctaccaccgtgatgatctcatgtgccctggttggggacatgcatatcagcatatgtggtccagtgatcagtgacaagaagccaagcccctgacagttgaccagggcaactgttaggccagtgcagtgaagtgaggcaggatggcacatgaatggaaaccattgctcatcgatctcagtccttgcacagttgctagaagagcataaggccaacagaaacctcacttcagagttcagataacaaagttgtcatccaatgattacaacacatgaggtgaaaggtctagtctaatcagaaaaaagcaatcgactttttcctcgtggaaagcagaggcaatcaccaccgcaatccatgcgctgcgcagtacagtgaccaattagccagaaagcaatcagcaataagcagggaccatatgatgcccatgctcgtgcacggacaggtgagacggccacaggaagtcaggagcacgcggaaacgggaggacagatgaacgggggaagaaaccatgagcaaaagaggaagcggggacatacatgccgtgctgaggtggcccaaagctcgtcatcgccccgctcgcatcttctgccaccgaccctcctcgtctactctccatcggctaccatcaatcagcatgcaaccgtccggcgccgctgtcgcctcaccgcaggcccgcgcattcaaacaagcatcgcaagccaagcagaagcggaggaggattcctgtcgaaaaagcttggacttttgcacggcctggtgatcagtgggcgatttgacaggggttgtgtttcgaggtgattggggaaggacgaagggaggtggtgggttgagaagaaagcggccggttgtgtttgggcgaagcgaggagaaaatggagagggtggtccgtccgtccactccagcggcggcaggggccaggggcagcagaggttgccaacgcctcgaactgcggccatttttataatgatttctcgagcttgcgagtccccatcgccactggaagaggagtgacgtttggaccataccaatctcaaggcgggagccatcccatcccatgcttccgctcacacagtggccagcgctgaggcgagctcagacgtatacatcctctatagtcgtcctttac

SEQ ID NO: 34431 - DNA, 526 bp, Zea Mays
attgaagtgatatctgcaggtattgttgacacagggaagggttatacaacctattgtggttgttcgaggaaatgagatggtattggttatattgggactattgagttctatatctacaagtatttctgatctcaattgggattcctttaaaatgttgtttaattcaatttgtggtttaaatatctcgtcaaaataatttgcttgctgagatgtatcatctcactcttgcattactcaatgcaggtatttgattcatgttgggaatgagggaagtagcagcacgtccaccttcactattataataacgctgcccagttggagccatgatttaattagaaactcgatgtcaaatgatgtttgtttttttctagtcgtgtgcactggttaattcagttcatgttgttatgtttaactttcctttgctagcatattaataatgcttagtatgttttttgtcatgatatatgtttatacactgttgcccctcgtttatgcaatctttcaaaggagatgctgccgaaatttt

SEQ ID NO: 34432 - DNA, 2613 bp, Zea Mays
atgattctggcaaaaatgtgctgcaagtatttctaagtccaccaagtaaaaaagaacatagacttgcagcatacgttctgccctacatattctcaatcgcttcagtcagtcagtcttactagtagccagccattggcttcattttttagccaaagacaaacaggaggagggaggagggatggttctccttcgtccctggcacatcctcttcttcctcacatgcttctccccatcctttgttcatcctatggaaccaggcacctaccgttgctccaatgtttccatcccatatccttttggcgttgctggtaagagcccctccctgtcccgtggatttaaagttgtgtgtggacacagtggtccgttgctgtccatcggaaacagcatgcttgggattcttgacatctcgttgcttgatggtcttgtgagcatattggctagtgctagttctcagcagtgcataggaggggaggcgaactctagcgttaaccttgaggggaccgtcttcacattctcagacacaaggaacaagttcacagctctgggttgtaacgtggtggccatgcttttgaatggcagcacggggtatagcggtggctgtgcttccttttgctctagcggaaatagcatcatcgacggctcatgctctggtgtggcttgctgccaagcgcctgttcccaaagggctaaagaagctggacttagagttcagtaatattaatataaccaacagcggcatcgattacgggccatgtggtcaggccttcatcgtggagcagaattcatatgtgttttcacttcctgatctgaactacacagttgacacaaaacctcaataccgacatgttgtgctcgagtggtctgtgaacggcagcagctgtgaagaggcgaaactgtccggatcatacgcctgcgcagagaatgcctactgctacaactcatcaaacggaatcggttaccgctgcaattgctccagtggattcgaggggaacccatacctgcaagggccaaatggatgcacagatattaatgaatgcatcaccagaaatccgtgcaccaataggtgctcaaacacaataggtggtttccagtgcacgtgcccagcagggatgagcggcgacggcctcaaggaaggaagtggttgcaatggattgcaggattagctctgctagtgcttctcctcatccttggcttctggactcactggcttgttaagaagaggaaacttgcaaagacaaggcaaaggtacttcatgcaaaatggtggcctgatgctgaagcagcagatgttttctgaggaggcgccgctgcacatattcacctccagtgagcttgacaaggctaccagcaacttcagtgatgacaatattgtcggcagaggagggtttgggactgtgtacagaggcattctgtccaatcaagtggttgtggcgatcaagaaggcgcagcgagttgatcaaacccagacggaacaattcatcaacgagatgatcattctttcacaggcgaaccacaaaaacgtggtccagctattaggctgctgtctcgagactgaggttcccttattggtctatgagttcatcaccaacggggcccttttccaccatcttcacaatacgtcggtccccatgtcatgggagagccgtctaagcatcgcggttgagactgcgtcggcacttgcatacttgcacttagctgcaaagatgccaattattcacagagatgtcaagtcgtccaacatactcctagatgacaacttcactgccaaggtgtccgatttcggtgcctcaaggccaataccgcacaaccagacccatgtgacaacattggtgcaagggacactagggtacatggaccctgagtacttccagacaagccaactgactgagaagagtgatgtgtacagctttggcgtcgtactcatcgagctactgacaagaaagaagcctatcatggatgatatcgcggaagacattagaagcctagcgctgcaatttagtatgctattccatggaaataagctgttggaaatcgttgatcctgtagtagctgaagaagctggagtcagacatgttgaaacggtttcgaagttggcgttacgatgcttaaggttgaaaggggaagaacgcccaaggatgatagatgttgcgattgaacttgaagcactgagaaggctgatgaaacaacacttcatcttgaagaacgagtctttgcttcaggagtcatgttgcaatgaagaaatgagcatcgacgcaccatcaagtttgttccttggcgttgatggcatttctgacgatgaaggcatggagatcattccacttacatgtccatccaaaattctcacatcctatccctaactcgcaactatcacaaataaaaaggattttagctgacttctaccttctcaattgccaattccgtcttagtaatctcttcgtcttatgattagcttccaacgtaactacccggttaatggaatatgactgagttatttggcttatcgtcattcagctatgttctctttttgttcctcttgcagttcaaaaggcgatggtagtttcgctatgttggtatctctactgtatcgactgtcaacaaagaaatcaagacacata

SEQ ID NO: 34433 - DNA, 276 bp, Zea Mays
gtgatagtagcgtgggcagagccgcccacgggaggtcagtgcaacggagcgccctggttcgccaatggcggtgcatcggctctccgacacagtgacgccccatacaaccaccgccgtacgggaaacgccgcggagcacccctgcttgactccgcccttggcttcccgcgcacacctcgcacttcgacggctgatccaatcctctggcctctccctttccctttccctctctcctatcaacagtttcaacagaggcaactcccagcgtggcgcaaat

SEQ ID NO: 34434 - DNA, 2686 bp, Zea Mays
aaaatagctctcctggctaagcaagcttcccggggcatgtgccgataagtgttctacctggaagggcatgattctggagtttccttgagaaagggagtaagtgctcaaggatggcctcaagggctatcatcaggaggaggaatgacattctacggcacactcatgtgcctattttgtccccttcattcactagcacaattgggcaaggacaatttgattgtgaggttgatcatcaaagatctgtatgttacttttcaaaggaaagtttagcagattctaatcatgctatggcacattgtactttaaataagcgaaagctttgtcatctcagtagcggtttcgcatggcatccagcttgtgaggtttctcttcctacttatggttctagagcacagaactttgtattcccattgggagtcaggtgtttcctgcagtcagtccgcaccacatcaaacacaactgcacagggtcaagttcatattatggacaagaagagtgaggatgagaagcagaagcaacaaaaaaaggaggcatcccctgaagaatgtgatcaggcagtggaaggattaagcactgcaaaagcgaaagcaaaagctaagctggaggaagtgcaaaagactgaccaatcagtggtacagaaattatgggcaaagcttcttggtattggccctgctttacgaattattgcttcaatgagcagagctgattgggctgcaaagttgaagcattggaaggatgaatttatttctacactgcagcattattggttgggcactaagctactctgggcagatgttagaatctcatcaaggctgttagttaaacttgctagtggaaagagcctcacaagacgagagaggcagcagctcacacgcacaacagcagatctattcaggctagtaccttttgcagtttttattatcgttccattcatggagctcttgctgccagtgttcctcaagttgttcccaaacatgttgccatccactttccaggacaaaatgaaagaagaggaggccctaaaaaggaaactgaaagcaaggatggaatatgcaaagtttttacaagacactgctaaagaaatggcgaaggaagttcaaacatcacgcagtggagaaatgaaacagactgctgaagatctggatgagttcttgaataaggttaggaaaggtgggcatgcctccaatgacgaaattttgagctttgcaaagctatttaatgacgagctgactttggataacatgagcagaccacggcttgttaatatgtgtaaatacatggggatccaaccttttggcacagaccactacttgcgattcatgcttcggaagaaactacaagacattaagaatgatgataagatgattcaagctgagggtgtggagtctctttctgaatatgagcttcgacaagcatgtcgtgagcgtgggcaccttggtttgttgtcaacagaggagatgcgtcaacaggaagaggagaaaaggcaagagaaagatgacaaggcaaaactggaggagccaaaggctactgaagaagatttggctttgaaggaaatgactgagcctactgttagggagaaagaggaactaaagaaagcaaaaacccacgataagaaagagcagctttgtaatatcagtcaagcattggctgtgcttgcatctgtttcttctgttaccaaggagcgacaagagtttttaagccttgtcaacaaggagatagaactatataataacatgctcgcaaaggagggtacagatggtgaagaagaagccaggagagcgtacaaggctgctagggaggaatcagaccatgctgcagaggcagctgtgggagaaaaggtctcttcagctttgattgatagggttgatgctatgcttcaaaagttagaaaaggagattgatgatgttgatgctcgaattggcaatcgctggcagctgctggatagggactgcgatggcaaggtgactcctgaagaggtagctgcagctgcaaattatctcaaagacaccataggagcagaaggcgtccaggagcttatcagcaatctttctaaagacaacgaagggaatatccttgtggaagacattgtgaagctggcgtcacaaacagaggaaaacaacgaagctgaagaaactgcacgatgatttggaatagcagccacattcttggctcttaaaactcgacggtccattccttttttaaaaggaaccgcacataataaagctagttcctggcagtctcatgcaaaaatcaccaagcaggatggtcattctttttgttctgactggcggctgcagagaaaattgtatcctgctgttgaaagatattcatttatacagttaagtcccagcacaaccgatcgttaggttaggaattctgtccgaaatggcaacttgcatttcaaacgtctgccatgaaaatgagaataaattcggcgggctctacagatttttcatctattgtctgaacaaaagtataggcatcaaataagtatctgggtaagtttatactatttgaataagaatcagctggatttgtttaaattcttaacaagaccgttttagcagtttgactatatggtcaatcaaaacactattttgtattgtatattgtactatgtgcacttttgcagtgagatttaaatatgggtatagagatagataagctactagagatagcctaaatg

SEQ ID NO: 34435 - DNA, 211 bp, Zea Mays
tctacgtcgattagaggagtctaggtcggccggcccgagcctagacaacccctaggatctctcctccccgacggggtccctccccgggagcgagatccaggcgccgccggcgatcttccgccgccactgcgcacgcgcggaccgtccggccccagggcgcggaccgtccggccgtcaggcaggaaaccttagcccctgcgccaggtcgcgg

SEQ ID NO: 34436 - DNA, 4029 bp, Zea Mays
cgggcggcggcctagccctaaataagaggcaagaagcattgaggcattcttcaccgattcaaaatcagtcgaccgatccccatttcccctcctcatctgcgtttcatttcattcatcatcatcatccatggaggcttccacccccaccgctcgccgaggtggagcccccgccgactacgccgccatgtccctttctccctccccctccttctcccacacgccgaggagcggcgcctcgtcctccgcccacaagccccccaccacaagcaggcaccgggatcgggggcccctcctcttcaacggcaacagtaacagtaacagcagcatcgctgcccagcaggccgcacagctgcagcaaacctccaccaccacctcctccaaggggtcctccggatccggaggcgttaacatccaggtcctcctccgatgcaggccattgagcgatgaggaacgccgcgtcggcactcccgtggtggtcacttgcaatgaccagagacgcgaggtctccgttgcccagaacatcgctaacaagcaaattgatcgcacctttgcattcgacaaggtgctaggaccaaagtctcaacagcaggacgtcttcaaccatgctgttgtgccacttgtcagcgaggttttggacggttataattgcacaatatttgcatatggccaaactggaactggcaaaacatacacaatggaaggaggagggggcaaagcactgaatgctgacctcccgactgatgccggtgtcattccaagggctgttaagtgcatatttgacatcctcgaggcacagagtgcagagtacagcatgaaggtttcttttcttgagctgtacaatgaggagctcacagatcttctagccgcagaggaatcgaaattctccgatgacaagtccaagaagcctttggcactcatggaggatggcaagggtggagtctttgttagagggctcgaggaagagctagtttcttcagctgccgagatctacaggatactggagagaggctctgcaaagagaaaaactgctgaaactcttctcaacaagcaaagcagtcgctcacactctattttctctatcaccatccatattaaggaatgcacacctgagggtgaggaaatgatcaagtgcggaaagcttaatctcgttgaccttgctggctctgaaaacatatctcggtccggtgctagagacgggcgagctcgcgaagcaggagaaattaacaagagtctgcttacacttgggcgtgtcattaatactcttgtcgagcactctggacacataccatacagggatagcaagttaacaagattgttaagagattctttgggagggaagacaaagacttgcattatagcgaccatttcaccttcagtacactgccttgaggagacgctaagcaccctggattatgcgcatcgtgcaaagcacatcaagaataagccagaggtcaatcagaagatgatgaaatctgcgctcatcaaagatttgtattttcaaatggaccgtctcaagcaagaactatatgctgcaagggagaaaaacggtgtttacattccgagggaacaatacatagcagatgaatctgaaaagaaggctatgtcagagaaactggatcgtttggagcttgttttggaatcaaaagataagcaattggaagagcttcatggactctatgaatctcagaaagtactgagtgcagatctaagtgatcaacttcagacattacagaatgaaggaaacagagtgcaccctagcggatcttgaaacgagatacatgaaggcaaatgatactattaaggagaagcaatatttgatagaaaatcttcttaaatcagaaaaagttcttgttggtgaagcacaaacactccgatcagagctggagaatacagcaggggatctacatgggctattttcaaaattagaaaggaaggaaaagatcgaagacaaaaatggaagtataattcaatatttccattcccagctgatccaggaaatgaatgtattgcatagaacagtctcaacctcggtctctcaacaggagagacaactaaaagcacttgaagaagagatgcagtcttttgtcacctcaaagggcaaggttgccggaggacttcaagagcatgtaagaaagctcaaagagagctttaattctaggatagcagaattgcatggttttgcaaatgaactcaagcataaatctatgttgagctttgaaaaccttaattcgcaagttaccacacacacatctagccttgaggattgcatgaaggacctattggttgatgccgatgaactactcattgcactacaaaatgggctttctcagcatgaagtgaactttgctacgtttattgagcaacagcatgaggggctctctagaaatttagagggaacaaagtttgtttcggcaactacaatgaacttcttcagaactatagattcacatgcattgggactcctaaagattttggaagaatcaaagatggaacatcaaaagcaactcttccagcttcagaagaagtttgaggccgttgttgctgacgaagagaagtacttgatggagaaggttgcagggttgtttgcagaatcaaacgctcgaaagaaaaatatggttcaagatgacatatgcagcctcaataggactgtttctgagagttcgaacaatttacaaaccgaaactaccaagctgcatgattttacatcttctatgaaagagcaatgggaaggctacatgaagaaaactgaagaggcattccagcaaaatgtatcatctattgaacagaaaagaggcttcttggcagggaattttcagcagtgcaaggaaaaggtagaatcatgctcagaacaatggattactgcacaaaatttggtgttggcacttggaagaaggaatgcagaagccatcggtttggttataagtgatgggaatgaggtgagcaaccaactgggtgcaagaatttcatctgctgttgctgctggatttgaagataatgacatttcaagcaaatcccttctaagttgtattgacgattcattgaagttggaccatggtattcgcgagaatgtgaaatccatcgtcatgacatccagagcacaacttcatgacttggaacatggtcactatgagatgacaaaagcaataacagggaatgccgataggtctctgggagaagattataaggtggatgaagcaacttgttcaacaccgagaaggcgtgagataaacattccggacagccaatcgatcattgagttggtaacccccctagaagatatcgtgaagtcattttgggacagcagaacaccgacgaagcctgctctaaatgcaaaagggaagcagcagttggtagggtcgacgacccctgaaacacaaagagcccctctttccgcaataaattaggagtttcattactgtatatactacaaacattcttgtgtggtcaagtaatgttgatcaagaatgttgagagaagttactggtaaaggagagctgtgtattctccagattcatccaatgtatgaacggaatcatacatccaatgtattttggagtggagtgcaactccaaaatacagagcaaatcgagcatgaccatttgtcaagttccgtgaaatggactcatttatttgtatctatgctgttgtgcacttgtttttaataccttcgtccttaaaccttcgtccgtgaaatggactcatttattcgcgagaatgtgaaatccatcgtcatgacatccagagcacaacttcatgacttggaacatggtcactatgagatgacaaaagcaataacagggaatgccgataggtctctgggagaagattataaggttagcgatacttatcgtctaaaagaagaaggctaagtaggaaaaagtatgatggaatgacgaagggaatgtaaaaaaggacattgagcaggacatttcaagtacatatacaaagacatgctatatacaattttacgttcaagtacatatacaaagacacgctatgtatttccttgatttttcatctattgtcaat

SEQ ID NO: 34437 - DNA, 3942 bp, Zea Mays
gctgtcaatcgcctccccactgcggcagatccgcaatccgctcctccaccaccgcgctcctcacccacgccagggacaagactgtctacctccacgcccgcctcaccaactccgcggccaccgccaccgccacgcccctcccccatggtcgtcgagtccgagtggtggaaccagcgacgcatgcgcgtcgagggcgacgtgaaataggtgctccaccgcgggcacaacgggcacagtggaggtggaacgagcaccatcgagttctggttccaccgaatccaccgctcgcacaccggatccatcgctcccacatgcccgcacaccggatccaccgctccctcccccgcgatggcctggttccaccgagacaactgcggggctagggtttggattcgtgggtggagcccaaggctagatccagcagggggagggaggtagaggaggggagggaactgctggtggtcggcagtgggcgaaggcgcgacaatccaggatatggattcctgagcgtcacccacccgcccatccacgtcgcgcggtgtagtcatcccctatccgcagccgcctcgctccctctcccacaacaaatccattctcctcctcccactcgacgaggatcgcgaggatgctggaggacgtcgtcgctgtcacgcttgacgttagggcctccgatgcttgacgttagggcctctcgcttgaagaggaacacaaacagagctcatgttttttattttgctctgcattatctactgcttctctgtgggggcgttatttacagtatgtggcctgtttgttgtgttgttcctgcggaagggcgggcgggccgaaggtgtttaagaaaatgttgttgtcaacatcaacctcctggaagggccagaacgcaggcagcgcctcaactcgtcaccccatcagcacggtgagccccttatctggattgttatcatggtacgcggtgcgctgcaagcctgcaagtgacatcaaattggattggtagtcagcgggtgtcatagtgtcagttcgatggaatggttctgcagtgcatgtgcttctgtaatttccgcaagaagcagtcaacttctccctgatatggcactaggacattgtagtgattcccgcacgtttgtggaactcgacaacctaccagagcgccagatgtttcattgagaagagaactcctccagtctggctttccactggtctagtctctcctttaaaccaaatttgataccactcattgaagtcaatagctgggatgtagacatgtgaaaccacacctgtggaactttcagcgtgtgatgactgggtcactggtggaataccgtgttttttgagctgctcgctttcagttcgcggtcatagtcctgtgttttttgccttcagtttcttgatgtagttattgcctaaaatttctatatcttgttcatcgtactggagatgctacttcatgtggagctggtatgtaggatgattatcacgagtacttcaagcgctcattttaggaagacatcgctgcgcaagtgcctcaaggagtggaatggtgagcccctgtccatctactgaacagagaaaataccaggagcaaatgactgcatttttagttaatccttttattcctaaattaattgtgtttgttaatgcttttattcctaaaataagtaaccgagctcgggattcttcgcaatttgatttgcgagatcacccccataaaggcatcatgaatctttatgcctgtaaagacatcccactgtctctttcgttttcgataagatgttttggccgttacataatgcctgtaaggtagaatgccattgcagttgttgcatcagaaagcagccatttaacgccattgtaaagtgagtgatgattaaatacaaccacacttctgtctctcaggtttctgtacatggagtttttattgcacctcttcttccccagcaattagtacttgcagttagactaaatgaatcttgaatgccccttaactgttggctttacatggaactacttttgcatataccagacaactattttgaacttcaatatgtttttcaattccagcaattgatcgaaacatgatatatttgacatattcatgatggatttttgtatttgatgtgtcgctttttcatctatcaatgtaattcttggacataacattgcgcacaggtaccaaattcacacccttgttattgcgagttctgtaaatcatgatgttcacatgtgatggtttgattcagttcaatggttagcaagctatttgaacatgatactatagtagtgcatatttgctgtacaaatggccactgcccagctatttgcataagatattatgtttctcctgtgacattttctatgccacatacatttatatggcatttttgtgcaatttagtaccggtttttggttgatggtgtctggaggtgtgatgagacaaaaccctttgtacgtgatgaatatggactgatcagcaatgaagtgcttgtggaaaacaatgtactacccgttgtgcagccagagccttctatcagaggaactaatatggataaggatgcccctggagccatcatctcagaacccaagcatgcaaatagcagttatccgccatgtggtctctggaatattattacacaataccatatatgacgttgttcccctttctagcaagggtcttgctctggttcctttttgggatgaccgtcagggaaccataacaggcatgctcactgcatcagattttgttttaatcttgagaaagttgcagagaaacattcaagttattggcaacgaagagcccatttctgcttggaaagaagcaaagctacagttctatggtgggcctgatggtgctgtcatgcagagaacgccattaatccatacaggcaacattgatctcagggccaagaaagaagctcaactcggcatgcttcctgtttgaagcaagggcaacaaacttaccccaccagatctctgtcgccaaagcagggctagtgaataagctgtgtttcctcccggattgtcactgcttttatatttgtgcatttattttgagggaaacattttgcccaaaaaaggcctgcagtgcacgttttaaacaagtcatttgaaccaactcttatgctgaaaactgtatgtgatactgcagaaggcaacacactagcttgataggaaagttggttggcaagcatagtctggttctcatggcaggtggactctggtgccttcatatatctatatatatattttaagttgacgatcttcgtgatgctgaaactgatgaagacctccgatgaaaaaagagacatgctgcacatgcacgagggtacttgcagatcgatgtcggctctatggacgaacactcgaccaagtcagatgaggagtatgagggcctagccatgcgcgacgtgatggctactggtccgacgatgagcagcaagctgtgagttaaagatgaactcacctgccctggagagtaacatccataggagtgaggcaaaatggctggtaccaccacaacatggacccgttcctgaagatgtccaaggaggtggtagccgacaccataatgtcttgtgtcattgtgtcaccggtcggcaacacactgcgctggtaccggcgggtgttgtgtttcttaggcgtctgcttctgtgctttgagttgtgctatagagtggttgtgccaactactgattttaaaagaaaaaggtgagctgagaatcattgttgaaaacaaacatgtaattgttcgttctcatcagttgtgccaactaccaagcatttcattgatcagaatttatcgttgctcatgagaaccaaaagtaagacacttctcaataacattggatgcaaatttctgctagcttatcttcactatcttttctcgtatcaatataacacacatttatacataatttttgtgttattatatgttttcgttgcaacgcac

SEQ ID NO: 34438 - DNA, 1536 bp, Zea Mays
ccgccggcccagcgagagcgagccagcgaggtgcccaggaccaggacggctggggaccctgtcatccaatcagtccgtcacacgaacacgacacgattcacacatttcaatcactcgcttcccatgaattcgctcgctttccctagctgcccgtcagcattgacgcccgcctccaccaccgcccccgcgtcctctccctttccctcgccgcgtataaagattcgctgcccgcgacaagaagatgcagctcattaccacctccgcctccgcgatcgaagctcctcacaaaccgttatcgtcgccatggcagccgccgcgcctgcaagctccgtgaaggaagtgctgccatctcccctgacctccgcctccgagccccctcccctcttcgatggcaccaccaggctgtacgttgcctatcattgcccgtacgcgcagcgcgcttggattgccaggaactacaagggtttgcaggacaagattaagatagtcgccatcgatcttgctgacaggccaacatggtacaaggagaaggtttatccagaaaacaaggtgccttctctggagcacaacaaccaggtgaaaggtgagagtttggatctggtcaagtacattgacagcaactttgaaggcccatcgttgctcccagaggatccttcaaaaaagcagttcgctgaggagctgcttgcatatactgatgcatttaacaaagcattatacttttgtatagtctccaaggaagatgtgtctgaggaagctgtcgctgctttggataaaatagaagacgccctcgggaaattcaacgagggtccattctcccttggtcagttcagtctggtggacattgcgtatgtaccattcatcgagaggtttcagatattctattccaacataaagaactatgatattacaaagggcagacccaaccttcagaagttcattgaggctgaatggcccaatgcaaacagttttcttgataatgctttatcgaggagaaattttaactcgtggattggtatattttaggaagtggacaagattgatgcatacacacagactaaacaggacccacagtttttacttgagcagacaaagaagcggcttgggattgcttaaagcttgcggccgaggatgactctcgacagaaataccagcatagtagatcgacacttgtttagtcatttgtgtgcttgaataatgaatactacatatatggttttcaataagacatggtcctctatactgggttgtacttctgaaaacaaactagttgtcctgatattatagctttcgtggtgtgtttacgtcactgtatatgaaagggtggggagagagaatgatatgccatgtattctgtcaaatgtttttttataatgtcaagagctctgacttttaattaagaagaaaaaggattatatataagggccaaccaaacacatgatgctgccaaacaatatattcgaatggctaacccacctatgcaatacggcaaagcattatcatgaatcatggttgctactaaaaaaaggaaaaaaaaaa

SEQ ID NO: 34439 - DNA, 254 bp, Zea Mays
gcaactatttattttgttatttacagagtactagagtctagagagaggagagttagcgatgggcgagtcggatttggcatctcggacagcgagcagctagcgcgcgcatcgtcgtcacatgcatgcatgatgccgtagcagactagcagctactagctacgagcatccgtgtcgtcccctgctacttcccttccctgccgccgtccatcgaaatcgaaacctggatccgcagtggggtttttcttttctgatcg

SEQ ID NO: 34440 - DNA, 1461 bp, Zea Mays
tttccggctgcgacaacaagcgtaaactaggagagaaccagcaccccaaggatatcctgaacgaggtgtcgaggactcatcaagcaatacaatcgctggacaaggcggtgtccaccctggagatggagatggccgtggagcgcgcgaggagcgcggcggcgtggcatccggcaggagtcctccccagaaggccttcgtcgtggtcggcatcaacacggccttcaccagcaggaagcggcgcgactcgctccgggacacctgggtccccagagggcataagctgaggaagctggagcgggagaagggggtcgtgatccggttcgtgatcgggcacagcggcacgccgggcggcggcgcgctggaccgcgccctggacgcggaggaggccgagagcagggacttcctgcggctcgaccacgccgagggctaccacgagctgtcgtccaagaccaggagctacttcaccaccgccgtcgccacctgggacgccgacttctacgtcaaggtcgacgacgacatccacctcaacctcggtgcgtatacgtacgtactacgtgctcgctggccaaacacagaacgcggcgtcggctgtatgaagtctgggcctgtcctgtcacagaaaggagtgaagtaccacgagccagagtactggaagttcggtgactagggcaacaagtacttccgccacgccaccggccggccaaatctacgccatctccaaagacctcgccgcctacatctccatcaactagccgatccttcacaggttcgcgaacgaggacgtctcgctgggcgcgtggctgatcgtgctcgaggtcgagcacgtcgacgaccgaagcatgtgctgcgcgacgcctccagactgcgagtggaagaagcgagccggcaacgtgtgcgtagcgtccttcgacgggtcgtgcagcggcgtctgcaagtcggcggacaggatgatgcggcacatccactgcggcgaaggcgacggggccgtctggaacgccgccacgtgagattgcccatctcacatcgggaaccccaaccgttgctgtatgtggaggtggagcttcactcggcatccgattttctgaaaacgccaaggcgagagggaagcgaggtcgttgatccactgtttggcatattgagcattccgcatatgcatgacaagtatatggccgtttcacttgagacgtcatgctgtgatatgatccacgtaaaaagcgcatggattggtgtgtgtgaatgtgaatgtgaatgtacagacagggagtgaggggcttggattaatggtacttggtcgaccaactgaagtaatgctgttcactaatcatgatttgttttttttggcctattttgaactaaccagctccgtggcccatggatatgtttactaccatgtatcactggcccatgggtatgtctactactatgtatcagtactcttttgtttactactatgtatcactg

SEQ ID NO: 34441 - DNA, 5801 bp, Zea Mays
ggttctttctccaccccgatgcccctccccctcccccgtgtgatcccctctccagatcgatgtctgccccggccgtaacccccgcggctcaccgcacgaaaccgccgcgagatcttggagctcagcctctgacgatggctacgactacctcgccaacctccgcgagctctgtccccctccctctcctccaccggcggcgggggatccttggccatgttcctcccgaggcgccggtccacgcgcttcggcctccgcgtggtcatcaaggtcctaccaccgcctcacctcctccttgccgccgtgcggttgagcgccgacgacgttcgggctccggcggttcctgcatggaccggaagagccatctcatactctttctctacagcctttctgatggctcggaacagaggtcagctatgcgatgtggcgtggcgaggttaccgcgggcgccgcggaggtggagggggaaggggaggacgagggcacgggcaagagagcgcatcgctgtggacggtctcgtgagatccagacaaccgcccttgtgagcctgccttcctgcctactacctgcgtacgtacaggagggaccttgggtgatccgggtgcttggtttcttggttctacggctttcgctgctgttggatttgccgagccggagccgacggagatgaccgtcgacgagctgaagctgcaggcaagggccagcggcggccacgacctaaggaccagttccccgtcggcatgcgcgtgctcgccgtcgacgacgacccgacctgcctcaaggtcctcgagaacctcttgttccgctgccagtaccatgtgacaacaatgggccaggcagccactgccctgagctgctgagggagaagaaggaccagtttgaccctgtgatcagcaacgtccacatgccggacatggacggcttcaagctcctcgagcttgtgggcctcgagatggaccttccggggattaacagctgaaaacctcgcccgatttgtaaagaagttttcttgttcaatgcggcattgaatttgggaggaatgacaagtctcatgaaaacttctgtatgccctacacgtgaccactaaaagaaagagttagacaggacaaaaggctgcagcggcagaagaagagcttttacatacccttacaatgctgattttgatggagatgaaatgaatttgcatgtccctcggacggaggaagctcgcactgaagcgcttaattctcataggggttcaaaataatttatgtactcctaagaatgtgatgggggatacttcaatgcaataatgagcttcccacaaaattacccaaacagcccaccatcagtcagatttacctctgaaatgtggcatccaaatgtctaacctgatgggcgggtttgtatctctattcttcatccacccagtgaagatccaaacggttatgagctcgcaagtgagcgatggacacctgtgcacacacttgtaggtactgatcacagcacattcaactccacacagattgtccatgtttctttcagtcaccatgatttatcactaggtcattgtgtttgtggccaacgagtattgttctaacagttatgttcccatagctagctagattcattgttgtgttttgttcagggtactttcaccacttctggtatggttctgtctgtaatgtgccagggattattatattgtttttggtttggatttggaatggtttggggtccacaacgatgatgcgtcagagctgttccaaggattggatgatttccattcccctgctgccaattcgactaggctcgccgtctccgctctgcccaactggcaccaagcagccaatggaacttgagcagccaatggatgatttccattcccctgctgccaattctccgaactgctttgacccttcaactcaatccgcatgtacccagcctattgtggcagcaaacagcgactgggtgcggaagccggaagggagaggcgcttggttgacccagaacggacgacaagacaccgccgggggttcgctgcaaccgcacgcgtggtggccggtgtgggaaggagcccactgctcaagcagcgacgacttccgtaacttctcaggccaagttgtagggagggagggcagcaaagaaagcaagcaagaaagaagccgattccactggtggttaaggttttggattaaaggagagaggtgcagagaaaaaaaggcaatcttactcttaatctctgtgtccacatcacttccgatcatgccgtgatcgacagaagtacgggtgccatgtataagtgccccctccaactcaccaaagtaataaggagcagctgctgcaggttgcaactccctgggccaagcagtagcccagcaagttcagcaccaatggcagccatatgaaatataaggcaaagcagataaaaagcttaatttttttcaataaggtaaaggcaatgacagaaaagtgaggagggtcagaggtgtacagataaggatgagggctgaaaagaggagcaggaagggcatgatgaaatcagtgtttgctatttagcctccttcacaactaagatcatcctacataatagatttagacaacaaaaacttatggagtttgctgaaatgccctttcaggcatgctccatctgtgctacaagggtcagaatggacttgataggacatttgactatacaacatggaagttatttcaagatatccttttttaactatgctgtcgttgctgatcatttgcatttttacatttttcacattatactatagttgaagatacattcctgaggacgaatgggtgcagttatgggcttcctgcttgctgccagcagtcttttggtgcttttatattgctattaatttgtttgaaatttattatggtgatgactgggaaggtctttttgaggctattactggttatggccttggtggctctttggccgtgttggtggtggtatttataccaaggctgctgatgttggtgccgaccttgtggggaaggtagaaagaaacattcctgaggacgatccaagaaacccagctgtcattgctgacaatgttggtgataatgttggagatattgttggaatgggatcatatctctttggctcatatgctgaatcgtcatgtgctgctcttgttgtggcctcgatctcgtcttttggaatcaaccatcaatttactccaatggtgtatccccttcttgtcagctctgttggtattatagcatgtctcataacaacgctgtttgcaactgatttcttcgagataaaggctgtgagtgaaatagagcctgctctcaagaaacaacttataatatccactgttgtgatgaccattggcattgcgctcatgttggcttggtcttccatacaccttcaccatttataactttggagcccagaagacagtgcaaagctggcaattgttcttgtgtgtggcggttggtctctgggctggcttagtcattggttttattactgagtactacacaagcaatgcctacagccctgtataagatgttgctgattcctgcagaactggagctgccactaatgtcatttttgggcttgctctgggttacaaatcagtcattatcccaatttttgctattgcgtttagtatcttccttagcttcagccttgctgccatgtatggtgttgttgtggctgctcttggaatgctgagtaccattgccacagaccttgctattgatgcctatggccctatcagtgataatgctggaagcttaagtctctccaccgccaccaccataggcggcgctccaaacacggtggcgccatgcgcgccggcgtggtgcggggacttggccatctcctacccgttctggctcgcaggcacgcatctgcccaagtgtggctacgaccaagggttcaaggttacctgtgacaaagccaaggacgatggcacttgcaacatcgacaagttcgtcaatgcctccttcgtccccagcccgccgttcgaaatcgagccccaacaaaaccaggagctgttcttcgtctacgactgcaacctgcgagcgccgcagctgcctcggtcttggacacccttgcgctgtggcaataatggctcgttcacctggctttctggggagtacaggcccgaagacagctccatggcgatgccggggaactgcaacgttgcgatgataccggtggtggcgtacgagggggcgaccgcggcagattatcagtggttcgtggagggaggtttttttcttagttactacctcacggacactgaggacgacgactactacgaccagtgccaagcttgctcgtaccgcgctggccacggccaatgccggacaattgtcagtgacaatgggttccagtgctactgctctgacggcgtctactcgacgacggcctgcggaaccaagagggctaactggaagacaacaattgtagttgtagttgaatcgaagcgggaactgaatcaagaatgttctatttatatcggtctcagttgcatggaagcgataactgaatcaagaattctctatttatatcgatctcagccattttgaaggatgaacgagcaccaggagagagtccgggaggaggcatatactgttgggacgtgtccaagccagtggagatgcagtggagatggaggagatcgacattggcatggagaagctgcgaaacccaccgcagcagaaccccacctagaggaagaagtagaaaacttgtgccggtatgagcttcctaatgagagctgggaagtaaatttgcctcctgaaaaggtgtctcctgagctcccagtaccaacattaggcataaactttgcaagagatggaatccagaaaaaagagtggttgtccatggttgctgcacacagtgatgcatggttactttctgttgcattttatcttggtgctcaatttggtttcaataaaaattacaggagccggaagagttctcgttgaggagaagcttgttgcgacccaaagagagaggacacatacatgtggacgcgagacgactagagccagaggaggactgggcacgcagaagagcgaggaggacaacgagtcctcacacctcaccgccaggacgtcgtagataattttggttttcttgtgattctctttatgaagtgggtggtacctcaaaagacatagatgatctgttgacttatggcagtcgggcattacatttttttgcatgaaatcgacatctgaggagtgataattttgttttgatcgcttctctattgcaagatttagatggctactatcctttgcgattgatcaagaatggtgagctattctaaggaagcttctgaacaatatacccgctgtcctagagtgtcatagatcagggttgagatgattccatcatacttatacgaagattttcctagcaaggaatggtttgaacaatgttgtgattaggcaagggataatgggtacttgctctgtgatgactcaaaaagaatgagattgatcgtacgtacggggagagttcctccatagacaaagatgaaaaaaagaccttgtatttgatagaatgtgctgatccattcctcaaaccgaatagaaatgtgaggtcggttgtgattaatcttttgatcttaggtaaggtcaaggttctactgggctgctcgctgttgcaggattgtgtagctgttgtagctccaattgagaaatattatcagtattaagctgctttgatggttgcccggtctattgcttgcatgtagcatgcatctccgcggagatccaagttgttatgctttgagctattgcatcaagagtttaagatagtctttatatattttact

SEQ ID NO: 34442 - DNA, 1221 bp, Zea Mays
ccaatctttccactcgccaattcgctcgatctccaatctggcaaatcccctcatctctcacacaacctccgaatcaaacgctgaatcgcgccaaatttactcttgatctatctccaaacccgccgctatctctcatcctgctattgcaatttcatccaaaacttgctccctcggaagccatcaccatggccgcggaggcgggcagtcggcgcggggcggcggcgcggaggaaggcgaaggaggcggcggtgggcgccgccgcgagggttctcttctacccgacactgctgtacaacgtggtgcggagcaaggtccaggccgagttccggtggtgggacgagttcgttttgctcggagcggttccattccgcagcgatgtaacacgcttacagaagcttgggatatgtggtgtgataaccttaaatgaaccatttgagactttggtaccatcatctatgtataaggcaagtgacattcacgtgggatcgatcaccttgttattcctacaagagattatatgtttgctccttcacttgtggatattaatcaagctactgatttcattcatagaaatgcgtcttgtgggaaaataacatatattcactgcaaagctggaaggggccggagtacaacagtcgtcttgtgctatctggtcaaatacaagaatatgacacctgctgcagctttcgagcatgtacggtctaaaagggctcgagtgctgttgacacattcgcaatggaaggctgttcaagaattcagcaagaagaacacggaccgtcctgctctcacgagcggtcccgcaacagcatctccagcacgggacgcggcaccggtaacagtagcggatctgaacggcaataatgctccagagtttcttgcggaggatgccagcttgtctagacgcaacaccacaccgtcgaggccaacgattaagatgctgtcatgcttgtttccttctcgcgtctgatgaatggtcgctggacgtcgggtgtccgaggcgcatgcgtggtagcccccggtcgatctgtccgcgaagcggtgtgcagtgcaggacggcggcagcatacctttccgaaaagaaaacggcatcagcattggcgttagtcatatacttgtccatattcacccgatttgcctgtatatatatataccttcgtcatgtggaaattcgttgttgagaattgagatgcatctcttacccgcacttgaatgaatggcctg

SEQ ID NO: 34443 - DNA, 3290 bp, Zea Mays
taatcttttgagggttttagtgattgaatgtcaaagagattaaaagtactaacaactttatttgagcatgtgtatagttcttaatatcctgtgaagtgctcatgctcatgccaaagagtcaaaagagcatgaaacgtctatgtgaagttatgcaggacccaaagaagatatatcatgaagagcgaatcacatccaaaaatcttttgagacatattcaagattaaactcaatactcaagaatcgagatcttggttgacttttatttatgtcattgaatataggaatcgtcatactatcaagagggatcaacatatggtattggcgttgttgctaaagctcacactctttatttttgagtgaactattttatttcagctccactgtgattgaagtgggctgttcaaccagtccttggcccacctcaaccttgtttctctttggtctccagacaagtggaaacttgtttaacaatgaccccgctccaccacctccaccatcaccactagcaccaaatacccctccctattggcaacctgatgttccagcttacccatccccatacttatatttaaactctactcgcgaacggtgcagtctacgatgcagaacaatgtaaaatagtacatatgggtaaactttgggtaatctgctggagtcggcctaaagtctaagatacccagccgaaaatggtggcagacactccaaacttggtgatggtgcagttgcaggaatcgtaatatgtttgctggatgttggtgcaatagttgcattccttgtaatcaaaaggaaatcttggaggttatcatggggacaagacccggaacaaaatgaacctctcagtcctcttgcttctggacttaaacagatgaaatctatcaaaatcatatcgacaattggcaaagaagaactgcagaagactgtttagatgagtttgaagccgccaacaaaaattgacctccacaagtcctttgatgaaagtgataccactaacaagtccatctcaaggtaaagtaagtttgtcttccataacaatacctgcatagacggtggcaggccttcaggtgcaacaggcagcttcggtcctgacagtcttatctgtgaggggtcgttaggccccgcgtttacaaagcgaaattcggtgatcagaagattcacgaatttcaaattatgatcaaaactattgcgatatcatcactttctggatggtaaatttcaggtcccgaccgcgggccgagcagtcacttgtccgatgggctactccgcagccgcacgacatcgacgcgctggagcagatggtcgaccccgcgctgcgagggctgtacccgtccaaatccctctccggcccacccgcttcgccgatgccatcgctctatgcgttcaggtgaagaagtatctccagtccatccagctcgatctcattgcccctattctatacggcagtggcatttctggcgctgcggctgaattgctggcgccggctggttcctgcaacctgcagcccgagccggagtttcggccgccgatgtgggaggtcttgcagtcgctggtgcgccagcgcctggtgcaaagggcgaacatggcgaggacgcagtcgcactcgcggcgccacggcgaacccgttactgcttcaagagatgttctcgtggtatgctcatctactggatggacagatgaaaagcacatgctttatcttcgattattggaagaaacatttgtgcaccaattacatggaagtggttgcatttttaagggactgtttaattgctctccaagatattgtaggcaaatgaaatcatctaagcaaattgttaaatacactacgcctggtcaggtataggcaaaggctatgttctttctttagttgacagaaaatggaggaagcacctgtaacatatatttttgtatgatgcagcaggggtgtgccatagttgagggtggcaaagtcaagtcctgcataaaggctgagcatgttgagtcaccttcctgttgtggaaatcagcaagatgaaaaagttcgttccctggaagataatgcatcaaccactaagcccatggaaaaagccacttcccatgcaagggcagcaagcccaggacaagcttccacgtgctatgttggcaaacacagacattctccttccagaagtgcaggtagggggtatccattggatgtccttttgcaaatgctgttgcatatcgatctgtagttactccaaaaaggaagaaaaactatttccaaattttgattgtcttctattagattattgcaaaacaaagcaacaaatgatttccccaaatctgctttttattaaggaaaaaaaacattttccctggctgtctgccttgttttgtttaaagtataagctgttaatattgtttgtgggctggaaaaaaggcatcatctttccagtgtcttgttttcttatctttctgagatctgaccagtagaagtacaccttgggaattatgccatgtgtttcttcatatccagattatgaacaccagatatttataggtattaagttcatttacttgagtgacgtggccagatttttaaaagagaactactcgtgcatttactcagaggggtcggatcagaactttgatgaggaaacccaagggactggagaatcaaaacatgaatacaacccgaagcgactgaaatctgctgatggcacaagggatcatcaggtgaattgatcataagcgtagcgtagctttcgttgtgttctgccgctgttctacgttttatgaaaacattcttacttcacatcacattgtcaataggttgtgaatgcagaagctcatcaggtgggctgccttgatgtgagtgacaaaaatagcgagaacttcagtgcatcgtcaaaagtgcttgctgcatcacttgatgttgaagctgggtctccctccggcgactgcaaggatcatggaccaaaaggataatgcaatgtccaccgagtgttttctggagttgactaacacacccacctggcgcgccgcaactgaatcagagataggaagtcaatcagtgcaagtttgtaagataagctagcttgcccgttattctggtttggaagtcaaaatagttcgttcaacttagcctaggcagttgacggttttgttgtgtttctgagggactctgatacgaaaatcaaattccctttgttctgtgtttggcgctgcaacctgtaaatggagtgctttttttttgcgtaccgtgatatctgcgttttggaatactataatatcagaatttggagcgtgtttcgccatgctcgcctcacttgattgggc

SEQ ID NO: 34444 - DNA, 1775 bp, Zea Mays
ccctaaagtgttggaaccaccctcccatgtttctcgatcacacctcctagaaatctcctccggttcttccacctccctgtagttctcgctctcctgccaccattctcttcgtgctcctgctccatatgccctcctttcagtctgctgcttgatgatccatcgcccagctgctggttgatccgtcgcccagctggtaacagatttcttcgtgggtgcagtagtaccataactgacccaccctctaatctttactccgacctacaaggtactgctgtagcctgactcaatcaatgtgattttactgaagcattcaccgattatacaatcatttgtagccacaaatgcacaacgttttttaatctgctgtcaacgattgcaacttttttatttcaatctggtaattcttaaatcaatctgctgtcaccgcatgcaatacttttaattttgatccggtaattcttagattaatctgctgtcactgaatgcaactatttgattttcatctggttattcttagattaatctgctatcaccgattgcaaatattttgattttgatctggaaattcatggattaatctgctgtcaccgaatgcaacacttttaattttgatctggtaattcttagattaatctctgtcactgaatgcaactatttgatgataattcttagattaatctgttgtcaccaattgcaactttttttaatatttgcgtcagtactggagcattgaattctattgttctgagttctgtttaccaaattgtctgtctgcagttgcaccttgtgttacatgattttaattaaactgcataagacaaatgaaattgttattcttatgctggctgtgtaatcttgatacatcctatttcaataatttttagcatctcctgtaatctgaaatgttaatcttgtagggaaagaagtaatgccaatgaaacacagaagactacaaagtctgaacttagaagctgagacacaggaaaacgtggaacaacatgaagatgtccaagatccacaaccagagctcaccattgggtttcctgagggagaagcgccaacaaggaataagtcattcaaaataatatggcaaaatggagttgttcgggaggtttttagaaatttccgaacagctgaattgtgggatctgaaaggaggaagagtactagttgaaactgacaagaatggcattcccaatcagtggtctgaatccattctctcgtcataccttggtgagcttgcacagaattcatcatttgcaccattacacattccgagatgggacaacaaattattcaaaggtccaaaggaacgcatcatcaaagatgttgagaaaaaatttatctatagtagtgagacaaaatggtctactcgagattggattcttaagacagtgaataaaaggtggagagactacaagtcagacttgaagaaacaatacttcaatccagataagaggtcttttgaccagattgaaaaggatgtccctgatggtgtgaatgaaaatcaatggagttttctgttaggcatatggtgcagtgaagcacatcagaaattatgccggacaaatgcggaatctggaaagaagcagaggcatccacacactagcggtaggaaaagccatgctagacttaagaaggagatgacaagaagaaaggaagcatcactaaaattgatctttgggacgagtctcataagaagaggaatgggaactatgtcaatcaaaatgtgcaaacacttatgggtaaggccttcgatgaattagagaacaggag

SEQ ID NO: 34445 - DNA, 2038 bp, Zea Mays
ggagatggccactcactcaccgatctcgcttccacctccacgccagaggcaacgggctccccgccgtgagctcttcggccacgcgggcgtcttgcctccctcgtccttcctcaccgcaggaggatggccgcgatagcctcagcttcgcccaggaccctgatccctccgcggccgcgccaccacggcgccgcgccctccccatccacctccgacgtctcctcgctccgactcctccgcgcgcacccgcgccacgtccgacgcagccgcggagtgtccatctcgatgcccgtggcgcggagccggtcgttcgtcttctccccgcgcgcggtggctgactccaagagctcccagacctgcctggaccccgacgccagcacgagtgttcttggaatcattctgggaggtggtgctgggactagattgtaccccttgacaaagaagcgtgccaagcctgcagtgccattgggtgccaactatagactgattgatattcctgtcagcaattgtctcaacagcaacatatccaagatctatgtgctaacgcaatttaactctgcttccctcaaccgtcacctctcaagagcctacgggagcaacattggagggtacaagaatgaagggtttgttgaagtcttagctgcacagcagagcccagataatccaaactggtttcagggtactgcagatgctgtaaggcagtacttgtggttgtttgaggagcataatgtgatggaatttctaattcttgctggcgatcacctgtaccggatggactatgaaaagttcattcaggcacacagagaaacaaatgctgatattaccgttgctgccctaccgatggatgagaaacgtgcaactgcatttggcctcatgaaaattgatgaagaagggaggatcattgagtttgctgagaaaccgaaaggagagcagttgaaagcaatgatggttgacaccaccatacttggccttgatgacgtgagggcaaaggaaatgccttatattgctagcatgggtatctatgttttcagcaaagatgtaatgcttcagctcctccgtgaacaatttcctgaagccaatgactttggaagtgaggttattccaggtgcaaccagcattggaaagagggttcaggcttatctgtatgatggttactgggaagatatcggtaccattgcggcattttataatgcaaacttgggaataaccaagaagccaataccagatttcagcttctatgaccgttttgctccaatttatacacaacctcgacacctgccaccttcaaaggttcttgatgctgatgtgacagacagtgttattggtgaaggatgtgttattaaaaactgcaagataaaccattctgtagttggactccgatcttgcatatctgaaggtgctatcatagaggacagtttactaatgggtgcggactactatgagaagctgataaaaaactccttgccgaaaaaggtggcattcctattggtattgggaaaaattcatgcatcaggagagcaatcattgacaagaatgctcgaattggagacaatgttaagatactcaatgctgacaatgttcaagaagctgcaatggagacagacgggtacttcatcaaaggtggaattgtcacagtgatcaaggatgctttactccctagtggaacagttatatgaagtgaacgtgcgacatgcagctgtgtgtctcgacattcgacaatgatcagcacctggttacatgcgtgatctgcagatcagtctgttggagatcatcggagcaataaaagtgtcatccaaggcattttttctttctttttgctcttttgtgtccttcaatgttgtagggtagaatgttgtagcagcaaatgttagttacatgttgaatcgacattgggggcctggatttggggatacatcatgctgtaaattgatcagtttaattaccatactgtgctgctttgagcgaagccatggagaccatgctccacttttgtgcctgacgaatataagcgttgctggtttggagtgcggattttaaagat

SEQ ID NO: 34446 - DNA, 2145 bp, Zea Mays
cccagccttatcctgtgcactcacttcatcttctcccacgcgcatttgattcttctagccgcggtacttctctgtcccagcgcctacttcctttgcttctccctcacggcgctcctgctccatctccggcgctcctccagctcgcccatggtgtcgcgcgcgctgctcccctgcaatcttcagccttcccgcacgccctcctgctccctagccgtcatgccatgccggccggagctcgctcggctacagtctcatcctggctcggctcacttctccctcaaggtccctcgcgctcgccgtgctctggtcggagggtgatttgctgcgcgcccatctaattctgctcggaccacgccctgtcatcctccatggctgcgcgcgcgagttcgacggtcctccctaccccgagcttgtccctatggcgctcggaccatgcccctcaagctccagctcaatcgcgacctagccgagctctctctccctcgtcttcttcccctacagcgcgctccttacttgcggcagtcggcctccatctcgttctccgccttgtcgtggccgcgcctagccccagttctgttggtcgcttcttccctacgcaagccgaccccatgccgctacgcacctatctttcttcctctctgctcggcggatcgcacagctcctgcgcgtgcacagccgagcggcttcccgcgcgcgctgctccctgcccgtttctctgctcgtcggcgtgctcttcctgctgccgcgcccggtctttgtctctgtcgcgctgatttgcgctcgtccgtggccatcgaacccgcctagctccttgctcgccatggccctagtcgtctcatcactgtgcgcaacggaagcgtggtgggtattggtcgcgggcatggttgggcgacgcgagatctgggaacaccgtcgtttcattatgcccagcatcgtgccttttgtgctagtcgtcgatttattattcaccacaacaccgtcatcccctgctgtgccccggatgtcatgctcgctgtggtcggctcaggtggtcgacatcgtcgactgtcaattccgtcaatagccacgttcattcgttattgttcagtactccacgagaaagaaatctatggaaatctgggtaaagaaaaagtgaaccccatctgtcgcttccatggtgtgctgagaaatgctcccaccagacatcgtcgtcaatctcacgaattcagatcgggtttaggtacgcttattaatcatgagatgtggaggacaagagtcaagtcggccccaagcgcgggctactccgcatggtgatgctgatggacaaacctgcctgatcaagtgctaggacaaggatgatcgtcaagtggatgtcatctaacaacactaacctagtgttatccaggcaagcctcggtgcatttgccccttccttgtgttttaaatgctttatcacctgatatgatgcattaggttgataggagttatgtgataaacaattgatgccttaccattccttggaaacttcttaatccctattttataaaaagaactgataatgcttagcccttcttagaaactgaaaaagcatttgttttcaaaaagaatgattgtggaacattggttatgggctttttgattcaaaaatcaaagcaaactaaggtgatgactccacttcggccggagtgggctcatcattggaaaagagtacccctgtcgggtaccaaaaataggaaaatggtttgaataaatctagactaggcgctgagccgacagagtcgcccgtttgcgtcaattaaggatcgtatcgattgttggcctgctgatctaggaccctttaactggtcacatacctcatcatgggtaagcttaaacccgactattccatacatgaaaagacaatcgcgcactgggagtggagagatggcgagagtggcacataccctcctggcaacggaccacataaaaggggtggtgtgctctcaggtagcgcagaccagttcatgtagtggaggatccgtgggaatggttgacatatgcaagggttaagtgctacatatgtcgtgtggttggagatccccagctgggtattaatcgattcagattgccgtacttctcggatatgaagactggatcactgccctgcatcgtagtttaataagtgaaa

SEQ ID NO: 34447 - DNA, 3183 bp, Zea Mays
gacggcattacctaaaccataccatagaccatcaatcacttctaacacttttcccgtctcccccttcctcgccgcctccactacagggctttgctcctcccaactctcgaaaccctacccacgcgatgagagatcgatcggtcgagcgcgaattccccagccgcgagcggggggatcggccgccgcccggggtgctgggtcccccgcgccgcgggccggcttacaagacgaagttgtgcgcgctgtggcagcgcggcggctgttcccgcgacacatgcagcttcgcgcacggacacgccgagctccgccggttccccggatcgcgcacctcgttcccaccccgcgccggttttgttgtaagatgtcactaattctgcaccctaccgtgaatggttgctcatgtaatccatgtgatctatctgtttcggaagaacaacggtatgtgaccattcaatttatgagatgaagaagaaaggccatggtgcagcaaaaaaagggggatatttaactttttgccatctttatggatggccctaaaccaccagtcactgaccatctgtggagctacaaggggtgacatacatggacatggaaccacatgtgtctgggtatcaatgtccgatttaggtgtatgatttagcagattttttgaaatgccgaatagcacctgaattctgacacggtgtttataattatactggtgtcagtccgggtaactaatgtacctctggacatcgtggttcaaatggaactttattttttctccatgattttatagtagcatgttctctatgttttgtattaagtgctcgtgtgttttattaaattcgtgcttcaattcaacctcagttgctgcagatagaaaataattctcacaagtggaagcttgttgcagtctgcagaattaggcggcattcttactggttgccttttgatttaactaccattcaaattagcagactcctgagcagatttattagattcaactgctgccagaggataagatgacttttatatagattcttcagttggcatttcaacgatttattgtgacctgtaatgcttgtccctacatcaagaaggtgggcatatcagtatcttggatgatgactccactgaatgatgtccataatacatttgatgtgctatggtcatgtgcttagcagctttaacggttaattgcacatacccttgaatattgtgcatcagttagatcattgggaagtgttattctcactggtaattgcaagttattgtaattcttgcaagtcgccgcggaagatatctggacaaatgatagtagatttatattgtgatattgggattatagaagacatcaacttgtcataattgttatgtgatgttgttcatggtcttcatcaatttgattttcaacaatcaacattatgagtttggtatcatcttaatgggtatgtcagtggtttcataccatactttggtatctacccatggcattaatttttggctctactttgttgtggctaatgatattatcctggagacccttctacttattgtgcattgaattatcttatagctcaaaggctgtggtaaggttacaggcttatgggtgacctatctctattagttcatattgacacattttttgttcagcttcatttatccttttcttgtataaatttttctctatcctgacttctagggagaagagattatagaggtggtgactttagagataggtttgataggaggcgctcacctcataggaggcattcccctgatggagattccaggggccatcgctcccttcgtgaccgacgaccaaattcccaagaaagggaatctagctattcacggtctcccagtaggaagagtgaaatgaggcatgataagaagcctgatgatggagaaactaactcatctaggagtctcagtgtctctgacaataatgatgatagaaaaaaggagacactgttaagtggtgatgataaagaggatcacgaaatacagctcaaacaaataagacaggacatggaacttttgcgtgatgataaatctctcttggagataattttggatgagaagaatgctgaagtgcgcaagatttctagcagattaaatgatcttgatctgcagttaaggaaggagaaagaggaatgccacaggatgacctcaaaaattaaaaagttccttaaagcccatgctcgctttttgaaagcacaggaagaattaaaaaggtcacaagctcgttttgagagactcggtgatttacttgcttcagatattctgaagcgtggtgctaatgaagaagtttctagtatcaatgttgatgaagatccaaatgttccttatgaaaggagcccaaatgctgctatagctaagaagagatcaataccatactcaacaagtgaagaagcgaaagccgtgaagaaaagaagagagcgggactctgacacaactaggccagataaatataggtttgaaggtactattgcaggatttgaaaaactaagcaagggaaccgagccaacaaaatctttatatttgaagaagaaactgtgggaagatgaaaaggataagataggcaactttgtctcctcagccaacaccgacaaggtcaaagaatctccggtcaaacatgttttgccctccactggtatggctgctcatgctttggacgatctgtttgaagctgttgaactggaggatagacgtgacacatcaatagaaaatgatgctgatgacgaaactaggtcgcctgttatgcccccacaaccaccaccggtggttaatacttacgagcagtacgaggctgatgacgaggaagtcgacgtggaatgattagaatgccgagatggtactggaatgagctatatagctctcgcgcctgtgtaaagcattatgtaatatgtatttgatgctggagtttaccttgcataaaaagaatcgtcattaatgatccttggtggatgcggtttaagcactcaacttttttgttaatttgatgaaggcaacatgccctgttacctgtacctaatataccacgtggtggctagctagccagccttgtcagtgccctggtacttttgggtggtcttgctgtgctgttcgcggcacttgaaaactgatgttttgtaggactgatgttttgtaggagtattatttgaatggtagccgttgatcttcggctgttgatgcgct

SEQ ID NO: 34448 - DNA, 873 bp, Zea Mays
ctaataatcgcatatctctaacaaatttcacaacgcacatacacataaattgtgaatcacacgtgttcatattacaacaaacaaaatatacaactcatgaatcgaatcaaaacgtacttttataaaatacacaaaataatttgggtcgtcttcaaccttcggttcgtgcatgcgacggggaggactcgacggggtttcggccgggtgaagagcggggctcgactacggacggcgagtgcgtggctccggcgacgaactacgggctctgtgaactccggcgacgaacggcaacaaacgacggcgtcgagcagtgtactggcgagctagagagatggggtgagcttggtaggcaggagaagggagagaggtgtgctgccttttatagagagcaggagggaagagggagagtcggccagagagagggaggggtggccggctgttcaatggggcaccgtcggacttcatggcgccattgatgggtctgtttcttcctcgacgtcaatggagagagggagagagtaatagggagggagtaacggacacgagacattcatggcgcggcttgatggacgtcgtggccggtgcggctcgggtgttcggtgcgcgggcatcgcggcggcatcgcggcgctgcagtcgggctcggatgtcgctcgggtgcaaggaccgtcgcggcgtcgggtcggctggcgcgcgcacggcttctaggccgcggcagcggctgctgcgcgcggtgggcacgcggggagcagggcactgcggtgcggtcgctggtgctgctgtgcggctacgcggcagggagagatgcgaggggagagagagaagcgagggagtgaaggagagagagagttaggggagagaagagagagagtgg

SEQ ID NO: 34449 - DNA, 1650 bp, Zea Mays
tttgcacgtctgtgtttaaaaacatagcaccttgctggtgggtaactttggagtaccagtgatgcaaagggacactagctctagcgatgtttctgcttctcatgtagggcgtgtaagacgtcgcaaacatccatctgaggctaccacagatgggaatagagctaatggacaaccgttgcttgtcaatgatcagaacaagtataaatcaatgcttatccgtacatattctacagtatggatgattggaggctttgcctttattatttatgtgggtcatctatatatctgggctatggtggttgtgattcaaatatacatggcaagagaacttttcaacctactcagaaaatccagtgaagagaaacaacttcctgggttcaggctactgaattggcacttctttttcacggcaatgctgtacacttatgggcgctttcttagtcggcagcttgtgaatacagtaacttcagatcacttgctttataaggtcgttagtggcctaataaagtatcagatgtttatctgttattttctttatattgcaggttttgtatggtttattttgactctcaagaaaaagacatataagtaccagttcaaacagtatgcctggacgcacatgatacttctaacggtttttgcacagtctgctttcactgtggcaaacatatttgaagggatattctggtttcttttgcctgcttcacttattgtgatcaacgatatatttgcttatttatttgggttctttcttgggagaacaccattaatcaagttgtccccaaagaaaacatgggaaggttttattggtgcatccgtgacaactatcatctctgcatttctgttagcaaatgtaatgggccgtttccaatggttgacatgcccaagaaaggatctgtcaactgggtggctttattgtgatcctggtccaatgtttaagccagagcattactcattgggagagtcggtgccacattggttcccatggaaagatctagccattatgcctgtgcagtggcatgctttagccctaggtttatttgcgtcaataatagcaccattcggaggattttttgcgagtggcttcaagagggctttcaaaataaaggattttggtgacagcatacctgggcatggtggaattactgatagaatggattgccaaatggttatggcagtgtttgcatacatataccaccagtcattcattgcacctcagaacttctctgttgagataatcttggatcagattctaagaaacctgacctatgaggagcaaaaatacctatatgaacaacttggggaaatgttccatgagaggcaattagggcaaaactgagagttagcgtgcttatgaaatgcatgataatttcttgtgtatttaagcattctgctcattatgtagctatagtccttgtccaaacctttgtatagaatggtagaatggagagaatgattgggttttaggtgctttattcactcttcactgacgctgcttaattcactccccttgtcatgatttctgcactctttgtaaaaggggacctgggaagttttattgtttcttatcacttcgtggtgctgtcctcagatcatatattcgaggattcacagaatataagatgaagcagcagtgctagttcttatttg

SEQ ID NO: 34450 - DNA, 643 bp, Zea Mays
ctcgtgtgagctttccaggtagccatctcctcttttgacattttatcgaatattatcgacctgtgcttagcctctctctctctctctcatttgcagtcattaggtcaggatgtcgcgcacgaagaatgtgtcgacgccagggggaggcgatgatgaggatcctcgtcgccccttcaggcaggtcaagggcaagactgtgtatttggagcagcaggaaggccgcaagaagcggcgtatggacagagcagcccgagcagcggcagcagcagcagcagacgctgagcaggccgagctaggagatcagcctcagactccttcagatcagattgcgtactgaaagtcacctagagggggggtgaatagggcgaaactgaaattctcaaaataatcacaactacaagccaggttagcgttagaaatataattgagtccgcgagagatggtgcaaaacaaatcgcaagcaaataagagatgtgacatgcggatttgttttaccgaggttcggttctcgcaaatctactccccgttgaggtggtcacaatgaccgggtctctttcaaccctttccctctctcaaacggtccctcggaccgagtgagcttttcttctcaatcacttggaacacaaagttcccacaaggacca

SEQ ID NO: 34451 - DNA, 732 bp, Zea Mays
cccggcctcgcagacaattttggtccgttgatttatctcaagtagtccaaaacgcgtagcatatcgcccgcagctgcccctgcccgccacgatgccgccgcccctgcagcctccactgttgctgcgccttcacctcctcttccgctctgaaacccaaattcctttactccggcgacgacccagctgcgacgcgccccattgccggaccaggagggttggaggcggcggcagtgggcttcgtcaccggtaagaggaaggccaccgaggtagcccaagcgtaggttctggagaaatattgttcagaaaggggatacggtggtcgatgccacatgcggccatgcgggaatgacaatgacacgctcgctctgcttaagatggtggctgacaaaacaggccgtggatgtgtttatgggatggacattcaagaatctgcgatagagaatacttcctcttttctgaaaatggccgtggatgatgaacatcatgtgtgggtttgaactatgaagcttttacctaatttcccctgaagaatgaaatagaaaggagacacttatgaattctgatttgacattattatttactattcagatacagaggatacttgtcatcttctcactgaatatttgatatatctgtacctgtcattgtatttgttttatgtggcagcagggactggtaaaactatttcctatatggtcatagtagaatggaagagattgttcccaaagacgc

SEQ ID NO: 34452 - DNA, 1025 bp, Zea Mays
gtcgctgctcgcttcgcatcaaccgtatccgcttcttgggaaggctccatgcctcgccccgccgcaacaaactcctccgctccacacctctcaccaagaccgccccttccctgcccgcacacggcggcgccccaatctctccaccacgtgtgacggcgacggcgccccatccctctccagcgcgcgtagaggcggcgtccctccctctcccgtgcgtggcggtggccggatgcggtggaggcggagggtatcgccatcggcggtagcggcggcggcggaggaggcggcgccatgaggggggcgcgggcgggagtgggcgctggctgcggcggcaggaggtgggacagcgagcctgtgagctctcaagataatttccaggcttcagaactttgacaggagcagtgttgcatctgttgtcacagctgcagataagaatatttttttgtggaagtggaagggttctagcagggattctcttcccttcagccgaaaatcaacaaggatctattcagggtggaactaactgacatcgaggtttgctcgagctccctcagcacatagctgaacaaggtcccgatgaccgctgttatctgcgtacactggtccaaatcatctgcactgaccagaagaggctcagctacgacacttgaggacgatgacagtgaactgaatatattttcacaattagtctagatttatggatgtgtgccttcattaatggtgacagtagtactcatgtggctccattgctcattgagatatggtggcatgttgaattgttgaccccccctacgttgtatcacatattcacatctactagcactggtagttatgaactaggacaacaactctttttatttttcgtattagccttctttgaaatgatcatgcgaatattgatattttcacattgtttttttttgcgattttagccttaattttcatataactagctcatatcgtcattgaatataagtctttaggttgttatgtttaggctgtctctagcatcctttgtatcccac

SEQ ID NO: 34453 - DNA, 2694 bp, Zea Mays
ttcactaagctctcaacttggatgcccgattgcacagcatggtgaatcaatgttaggatctaacaatcaacaagcaagcttgtccagtctcataagtaacagctacctggtgtagaagggttgctgctatctgcctgtcttcaccttatgaaggaaacaagagaggagcaagaaaggccggattctggcagcttcctctagtacattggctgcaatttctctttcagtttctaccatgcctcgcaacttggaatgcccagtgcagacccagatggcagtctcagccttggaccgaactcttagcagtgagtatcctactaaaagcaaaagcgagaccaaggttggtggatggaaacgtgtttttgtccaaaccgatgttggttgtgtcctggctattcaattgaattgtggtgacaatgcacatacggtcaaaagaaagctgcaggtggccctaaattttcccactgatgagagtgttctgaaaaatgatctcagcaccattagaaatgatttccctttgcttctcaccaagactttcatgcatcgaagttcctccacaccatgcttgtctcctagtggcaaggatctccaacagcaaaaagataggggctgtccaattgaactgttagtatgcccgagccgctgttctcgaacaaggcagctcgtgaaggatgttgctagggcaatcaagaaaggtgtggatccagtacctatcaaaagtgggcttggtggtgcttactatttcaggaacagcaaaggtgagaatgcagcaattgtgaagccaaatgatgaagagccttttgctcccaacaacccaaaaggttttatagggaaatcccttgggcagccaggcctcaaaagatcagttcgaattggcgagacctgttttagagaggttgcggcgtaccttctggactatgataactctgctaatgttcctccgacgttacttgttaagatttctcatcctgtgtttcatatgaatgaagacatcaattttgctaacaaaaatattgctgatggtagcattcaagctgttagcaagactgcatcatttcagcagtttattcctcacgattttgatgccagtgatcatggcacctcaagctttcctgtttctgctgtccataggatcggtattcttgacatcaggatcttcaacactgatagacatgctggcaatcttctggtaaggaagcaaaccggagcaggaaaatttgggaatcatactgaacttattcctattgatcatggtctctgccttccagagtgtttagaggatccttattttgaatggatccactggcctcaggcatcagtcccattctctgaggatgagctcgagtacatagcaaatcttgatccagtaaaagatgctgacatgctgcggatggagttgcctatgatccgtgaagcatgcctgagagtactaatactctcaaccatatttctgaaagaagccacagcatttggtatgtgccttgcagagattggggagatgatgagcagggaatttactgggatggaagatcagccaagtgagctagagtttgtctgcatggaggcaaggaggctggcagcagagcaagaagacagttccacagaacttgactctgtttgagtttaagacaagaaactccagaaaccaactgtccaaattagatgaagccaatgaagaagaggaagaagaggaagatgatactgaggaggtagaaagtgatgctggaaaattagcatgtcctaggcctgttaataagtggcttgctaacatttcaaagctgtcgacctcactgaagggtgtcaatctaacaaacaaaacccagcgtcaactgtatgctggtcctaagtttgtggatcctgtgaagagcaacagcaatgacagcggctctcagcattgtaactggggaagtgcaaacgacatgctcccttcaagtgtgagcttcgtcaagctggctgacatgaaacctgagacgtggtgcctgttcctcgagaagttccatgagctccttcctgagacattccgctcacgcaagtgcattgtcaaagagcaaagggcgaagcagaggcttggcacttcttgccagttttgagttggcacaggagtagagaggtgagcacctgctcggccgttgctgtggctttcatgcaggtgttgagctctgcagttatcgaataaagccatttttcacaggattgtgatttgcaacaggatttgagtgagtgggggcctgaacctgatgtccatgctgatatgatggcctcgctttgtaaatacattttccccctttttcttagctaggctctgctagacatgagttgcttgaaagaagttgggattcaatgtctgcctgtttctggccgcccgactcttccactcatgatatgcactcaaaagtttcattcgaatgaacattcagcagaaagtttctcgtgtcgtaactaacattgtggcagataaacgctaaagatattacaatcgttttgttgtgttgcgattgacatgttcagcaagtcttgtaatttagtcgtttctgcagacctgcagtgactgaattcgttttgttattcacatggcaatggtaaaaatccagtgtctttactcacactgagctactactgtcgaattcagtgtctgtactcacatggccatggtaaaaatgcagtttataaagtctttttttatcaaatgctaca

SEQ ID NO: 34454 - DNA, 1911 bp, Zea Mays
ctggtagtctggtcacacccttcggatccttgttcgcttccggcttccctcgttctctgcgtccgcccctgccgggccttgtcttctcccccaaatcaatccctcgcccacggacccaaccaaatcctcctccacctcctccatctccagccccgtccctacccagctcgtgtaacctcccgatgtccgggggcggaggcggcgcaggcgcgggctcgtcgtccggcggcggcggcggaggtggagggggcggcagggagggcgactgggactgcggcagctgcggcaaccggaactacgccttccgctcgctctgcaaccgttgcaagcagccgcgcctcctcgtcgaccctaacaccccgcgcgactccaagtggctaccccgtgccggggactggatctgcaccgaaagaactgcaaaaagtgtggcctatccaaggaggaagcagcaatgccagcattgcaaatggcagggatggctatgccagcttatgcaacttatatcgcaagactacagagccttgctgcttctgcttctgcatataagatgaactttgggatggctgccaactcacctttgcagcagcaactacttgcaaatgcaaactggtcctatgggatggctggtagatatgggatgcagtcttctggttggccacttggcaacagcagcccaaatcagtttccaggtgttccaaaggattggcgtaatggagactggctctgcagctgtggatttcataattattcatctcgtactcagtgcaaagagtgtggtgcacctataccatcaggcattccctccacaacaatgaaagctacgacatctgatgcctcttccacattaggaactaagcggttagcctcagaggagctggcaaacgactgtgataataaaaggctaaatccaggaaatgacaattatccactttcaacagcaggtgcaaataatttgtttttgggtattgagcaaggagctggaagcagcaatggccaggctgctttttcgaaatttgactatgggagctcaatgtcattaccatctgggcagggaatgtctggtcttatcgtaaaaggggcaaaatggcgcgacggggactggttgtgcaacaactgcaacaaccacaactacgcatctcgtgcgttttgcaacaggtgcaaaactcagaaagaatctgcagttcaccctggtgtgctatagcttgcttttgctggttcatattgttggactcgtttgttgcagggtatgttgctgcctgttctagctgcttcctcaagactgcagtttgagttttttcggttctgctgggtttttgctgctctcaaatgtttgtctcgatattccattagtgcttgttgaagttcccgatttatttatggtataagcgcttgaataaaatatctctggaaagtactggcctaccgcctaccatctgtttttttccaaatatttttattagttgttgtacaatgaggcaaatggtgatatacttatgttgtactttatgaactctgtaggattagtgcaccaaattaaggttttgtggccatgtttcagtcgtcgggttgaaaaagggaactataccatgtcgtgcgtatggttgtggaaaacactattttgcagctgcaatggttagagatttgaaatatgagggaaaatatgagatgagcctcatgctgttgtgcatcatcgatcagaccactataagtaggactggaaatggatgtctggagatccgaattattcgtatttgctgaaaccgttaatatggatatccgtatctttattcgatttcaatatggatgtcaaatgtatacattcgaatttgatttataatacttttctctatccgattctatatttgtattcgaaaaaaccatgaaacatcttatactatccgtattcgtgaa

SEQ ID NO: 34455 - DNA, 1389 bp, Zea Mays
cctaattgcaatccgcgtaaacgtagctttctctcagttcagacgcttcaccatcggaaaggccacagctagggttcgatacttcgatccccactccatctccaccgaagaccgtcgcgtcgctccgccaccgaagcagctcaaggactggctcgggtggggctgcgactgtcgcgcggttggatccgaggctatggagcagtgagctccgtagttgacggccacctcaatctccttggtgaatctgtataggtctggccacctgctgctcgcctccgtgacgtgcactgttgtggaccctggcaactttgctctgctgttcatgggggtggtgtttggtgtgggcatgcgcacgaggaatgggaatcaaaatttacttgatttctctataagatgagctggagatttcctctcttcggctctcagcagcagcaagcagatccaagtttccaggacatccctacgcagtcttggtaccctccctcggtggtaggttcctcttcacgtccatccacccctacctcttctagtgctagtctacaccaaagagcttcagatagtccgcagtcttcatcccgtgggcaaccatctcctgctgaggctgcagggataattgcccgtttgaaggataagagtattgaggagttacaaaggctattgaaagacagagaggcatataatgcattctttaactcacttgatcaagtgaaaacccagaacaatgtgcgtgatgagcttaaaaaagagacattgcaacttgcaagggaaaatttagaaaaggagcagcggattttggaacttaggaatcagtgcacaataattagaaccacggaactggctgctgctcaagaccgcctaactgatttggagaggcaaaaggatgatattatgaggtcctattcccctgccgcactgctcaacaagctccaaacatcaatggcaaagttggatgaggagtccgaggagctgcaccagaagttcctggagaaggacatcgaccttccaacctttgtgcagaagtacaagaagctccgcacggcttaccacaagcaggcgttgctccatctcgccggccagacatcactccgctgacatccggccaggcgtcatggcaactttgttgtatttctgctcgcctgttcttgttctacactatgcttggccctgttttacgagtgcagcctcttgtagggatttgccgaacatcagcggatattgcatgtatagttttatgtcttgcaaaaacgtcttatgtactctgtcctggtgtagtggtgtttacgtatctagtgtccaagttgggattcatttgtggtaactaaacactttgcctattttgttcaattcgatgataataaagcttttgtacgtttgtgtacacatccgttc

SEQ ID NO: 34456 - DNA, 2879 bp, Zea Mays
agataaagactcgacctgcaggataagacaaccccagtacaaaatgcctgaagcttatgacatgggcgaaaatgtcaatcaagagaagagattcgctgtggccatgcaacggtacaaagatcctaaggccaatgataaaatgaacccttttgctgaacaggaagcatgggaagaacaccaaataggaaaatcgaaactgcaatttggatccaaagataagaagccgtcttcagatgagtatcagtatgtatttgaagatacgattgattttgttaaatcatcagtcatagaaggaacccagcctgaagatgattcagataaagaagacgttgaagcaaaagatattttgaaaagggagctccaggatgagcgaaagacacttccaattttcaaatttagggatgaactgcttaaggctgtagaagagtatcaggttatcgtcatagtgggtgagactgggtccggtaaaacaacacaaatacctcagttccttcatgagtctggttatactgcaaaaggaaaggttgcatgtactcaacctcgtcgagtagctgccatgagtgttgcagcaagagtatctcaagaaatgggtgttaaacttgggcatgaggttggttactctataagatttgaggattgcacttcagataaaacaattattaagtacatgactgatggaatgcttctaagggagttccttggtgaaccagatttggctagctatagtgttgtcatggttgacgaggctcatgagcgtaccctctccactgatatcttatttggtctagtgaaggatatttctcgttttcgaccagatctgaagttgctcatttctagtgccacccttgatgcagaaaaatttagtgactactttgattcagctcctattttcaagatacctgggaggcgatacccggttgaaattcattatacaaaagctccagaggctgattacatagatgcagcaattgtcactgttttacagatacatgttacccaatcccctggcgatatcctggtgtttctcacaggtcaggaggaaattgaaacagttgatgaaatccttaaacacagaacaaggggcttaggcaccaaaatctcagaattaattatatgtcctatttatgcaaatctgcctaccgagcttcaagctaagatatttgagccaacccctgagggtgcccgtaaggtggttctggccactaatatagcagagacttcattaaccattgatggtataaaatatgttattgatcctggcttttgtaagatcaaatcatacaatccccgcacaggaatggaatctctacttattaatcccatctcaaaagcttcggcaaaccagagggctggaagatctggacgcactggacccggaaaatgcttccgtctatacacgagttacaactacatgcacgacctagaagataatactgttccagagatccaacgaaccaatcttgcgaatgttgtgcttacactcaagagtcttggtattcatgacttggttaactttgacttcatggatccacccccatcagaagccctattaagggctctggaacaactttttgctctcagtgcactcaacagtcgtggggagttgaccaagactggaagaagaatggcagaatttccactggatcctatgttgtcgaagatgatagttgcttcagagaaatataagtgttctgatgagatcatctccattgcctccatgttgtcaattggcaattctatattttatcgtccgaaggacaaacaagttcatgcagataatgcaaggttgaatttccacactggcaatgttggggaccatatagcactactaaatgtgtataattcttggaaagaaacagactattcaactcaatggtgttatgaaaactatatacaggtgcgcagcatgaagagggcaagagatattcgggatcaactagatgggcttatggaaagagttgagattgagatttgctcaaacaccagtgatttagatgctattaaaaaagctataacatcaggtttcttccatcactctgcacggttgcagagggatggtacatataagactgtcaagaaccctcagaccgtgcatatccatcctagttcaggattagcggaggtacgtccgcggtgggtagtgtaccacgaattagttctcacgacgaaagagtttatgcgccaggtgacggaactgaagcctgaatggctggtagagatagcaccacattattaccaactaaaggatgtggaagactccggaacaaagaagttaccgaagggccaaggacgagctgcattgtagctatgatacatgaagtttcgatggatgtattgtgttggactcatcgtaggagcatcataggatgtatataactccttatatcacgaacaggatacaagatgtcacttttcattgccctgcttaggtttcagagtaagctgattgtgaatgtaaattgtgacacgaagacatgcatgtgaaccgctataattgtcacactggagggagcgccggcatgcaactttcgtgtcttccagccgctacgcttgacgatcgttcgcatcctgccgccgtcgcgactattatccaagaaaatgcatatgtgcctttcctcgccggcctcttggatatggatgtatgttgaacaaacgcctatcaagggaaggataaatgagggatgagtatgggattttgaaaaaaagaaatcctgaatctttctgtaaattgggtaagcaaattgagaaaaatggatgggttgggacggaatcgtgagtcttgaatctgaacaactcagggtctttggttgggaccggattatgggccacttgatccgaccaactcgtaaaaaaagtcaggcttgattgtccaaaaaaac

SEQ ID NO: 34457 - DNA, 1822 bp, Zea Mays
cgcgacgtggcgtctggcgtggtcgagcctctagagaagcgagccgtgcccgtctctcccaatccactccgtactcggcgctcctcccccgtcgccgccggaaatcaggaagcccaagtggtagcgaacacactccgacactcgccacccccctctcgcccccttcgcccgcagctgccgtcgcatgaaattgacgaactctgcttcctcttctcgatctcgcagctctcttgggtgcgctcgtcgccggtggcagtgagccagtgatgcatcttcatctccggcttccttattaggatcagcccgtcgatcgatcatggcgtcgtcgagctcggctgctactactagtggtgacagtcagggtctcaaggctcgagatgcctgcatcgtcggcgtcgcccgcacgcccatcggcgcacttctcgggtcgctgtcgtccctccccgccaccaagctcggctccatcgccatccagggtgctctcaagagggcgaaggtcgacccggcgctcgtgcaggaggttttcatgggcaacgtcctcagcgccaaccttggccaggctccggcaaggcaggcagcccttggcgccggcttgcccaactccgtgccatgtaccaccgtcaacaaagtttgttcctcgggaatgaaggctgtcatgtttgcggctcaaagtattcagctggggatcaacgatgttgtggtcgccggtggcatggaaagcatgtcgaatgccccaaaatatgtggctgaagcaagacgaggatcacggttcggacatgatgtccttgttgatgggatgctcaaggatggcctgtgggatgtctataacgatttcccgatgggaatgtgtgctgaattgtgttcagaccagcactcaatctcaagggaggagcaggattcgtatgctatcctcagcaatgaacgtggcatagcagctcaggacagcggtgcattttcttgggagattgttcctgttgaaatttcttctggtagagggaaaccaccagttgttgttgacaaggatgagagtcttgcaaagtttgatccagtaaagctgaagaaacttgggccaacttttaagacgaatggttctgtaacggctggcaattcttctagtataagtgatggcgctgctgcaattgtccttgtcagtggagagaaagccaagaatcttggccttgaagttattgcaaggattacagggtatgctgatgctgcacaggcacctgagctgtttacgacagctccagcccttgccattccaaaggctatatcaaatgcagctcttcaaacttcacagatagattattatgaagtaaatgaggctttctctgttgttgctatagctaatcagaggcttcttggtatcccttccggaaagctaaacttaagtggtggtgctgtttccctgggccatcctatcggttgcagtggtgcacggataattgtcactttgcttgggattcttagacagaaaaatggaaaatttggtgttgctggagtttgcaatggcggcggcggcgcttcagccctcgttttggagctcatgtccgggtcaaatctgcggcgtcccccgtactccccgcctttcgcctgcacagcgacccacccacctgtaaagccggccccaatttggatgtccccttatcttgccgtccctatatatgcccccaattcgcttcatccacccagcaaatcccgatggaacaaacaagtttaaaaccgcgatgttgtttgacgatgttctagctccatgtcaccgtcggatctagagaggcgaattcgcccggagacttcagattccaaacagattggatacgtg

SEQ ID NO: 34458 - DNA, 1438 bp, Zea Mays
atggcaggctcttcatcatacagcgttctccctctctggtaccacccgtttaactcttgccactttctgctccttttttttcttcttcttgatttgaaggaccagaccatggacaacgatgatgcacaaattggagttgctaaaactcagggaaagtattggggcattttcatctgctggcttcttggaaatggatgtctatttgggttcaatgggatgcttactattgaagattactacgtgtacctcttcccgaagtaccatccaacaaggattattactctcacctatcagccctttgttctcgccacaaccgccatattcacatatcacgaggccaaggtcaatactagggtgcgcaacctggcaggatacacgttgttcttcttgagctcatttggagtgatcatcctggatgttttgtcttcaggaagtggtggaatcgccccattcgttggtatctgtaccattgctgctgcttttggcatagcagacggtcatgttcaaggcggaatgactggtgatctgtccctgatgtgcccagaattcgtccagtccttctttggcggcgttgctgcatcaggtgcaataaccgcggcgttaaggttcttcacaaaagcggtgtttgagaattccagagatggcctgcggaaaggagctatgctgttctcttcgatctcgtgcttctttgagcttctatgcgttctactttatgctctggtgttcccgaagttgccaatcgtgaaattctaccgttcaaaagctgcctctgaggggtctcagacagtcaccgctgaccttgctgctggaggcatcaaaagcctgccgaatccattggctgaggaagatggtgtggtcgaacggttgaacaacaagcagttgctgcatgagaacatggactacgctctggacatgttcctggtctatgtcctgacactgtcgattttcccagggtttttggcggaagacactggatcgcacagcttgggttcttggtacgtgcttgtgttgatcgcgagctttaacgtgtcggacctgatcggaagatacctgcctctggtcgagcaaatgaagctgacatccaggacggggctactaaccgcagccatctctaggttcctgctcgtcccggcgttctacttcacggcaaagtacggtgaccagggctggatgatcatgttaacgtcgctccttggactgagcaacggccatctcaccgtctccgtcctcaccgaggcgccgaaaggctacaaggggccagaacagaatgctctggggaacctgctggtgcttttcctcttggcaggcatatttgttggcgccgtttctgattggctgtggctcataggcaaagggtggtgaccgaacttaacttgttctccccaggttcacagcgttttgactacggaaagtcggaaagcgcgccggaaaagctgcg

SEQ ID NO: 34459 - DNA, 7927 bp, Zea Mays
gggagggagagtcaacggtcagtgcgggggctatggtttgctttcttcccccgagcgcaagcgcaacccccgcaccaaacagacaacagcagtacagcagagcaaagcaaagaggaacaccatttcccttgcctgcttgccaacccaccaccaccaccaccaccacccacgaaggcagcagcaacccagcaccaccgatccatccatccactcgtcattcctccgccccgccgctcgccttcacccatctccgaccccgctccgccaccaaaccctaggctaccagctcttcccaccccgtgtgctccgctcccctgagggcggctcgcgcgccatttctccgctcgatttcctaaaaccgtactctcggattcgggatcgggccgcgacggggcctcctcttgctctcgctcttccgtccggtcggccgctgaggacaataaaggaggttgcgctcatgccgggggcgccgctcaggtgacttgctggggggccatgcataggtactccagcaacagcgctgggttcagcggtggcagggacggcgcgaggttggaagcctcgcccttctcgtcctcctcctctgggtaccctgtcagctccaggcggcagcagcagctagttccatacaagctaaagtgtgacaaagatccacttaataacaagtatgtctaacttatcgaccaaagccacttcacatcaatgagagagctaacgactcttctcctatttgcatgttttttttttaatctcagactggttatgattctcttcctttttttggccacccctatcagctttgacatgatatctgcttataaaacgacgatttcatatattgttcttctatttataactaagaactgttgatttgtcccacgatatggtttcgttggatccttgttgctccttttacatgtctcttctgtaggcttgggccacctgacttctatccacaaacaccaaactgtcccgaagagacattaaccaaagagtatgcacaagctgggtacaaggagactgttgaaggaattgaggaagcaagagagattgtactcagccagatcccgtacttctgtaagccagatgctgtcataaagtgcaaggaggcactaaagaagcgtttaagagcgatcaatgaatctcgtgctcaaaagagaaaggctggccaagtttatggagttcctctttctggatctctactgatcaagcctggagtttacccagagcaaagaccatgtaatgaggacgcccgcagaaaatggattgaggcccttgctcagccaaacaagcgactgcgttcattgtctgagcacgttcctcatggttaccgtaggaaatcactttttgaaggtctaattcgatataatgttccgttgctaagagcaacatggtttattaaagtcacatacctgaaccagctacagacccgacagacacctaacagtatttcagtagcgggttctgataaccaacgctctaatcagtggacaaaggatgttgttgaatatttacaacatattttggacgaattttgttctaaagagggtgcattcgtgcatccatcttttagagagcagtcatcaccaggacctactgctggaaccaatcagataaaaatgaaaactgaagcatctccagctgctggagacattgaagaacccttggtgcacttcaaatggcggtatatggttcgtctcatccaatggcatctcacagaagaattgcttgttccctcagtacttatcgaatggctatctaaccaactccaggagagagattcagttgacgttttagaacttctcttgcctattatgcttggtctggttgacaccattactctctcacaaacatatgtgcgcatgtttgtggagctactagtgagacgtctcaatgatgcttctgttgttgatagtccaaaaggaccttcagtttcttctgttatagcagagttactgcggtacatggtacttgcagtgccagatacatttatttctttggattgctttcctctcccatcttttgtggttcctgatgtatatggtagaggtgctttgttgaagataactagcagtggtggaatttcaagttctaaaaggtgtgatgcttatcggtatttgtcctgtggttatgctgtttgttcaattcaaaaacgtgcatatgatctcgcaacagttgctaaccctaaccttcaagcacgtggtgcagccaaagtggtacaggctttggacatagctcttgtcacaggaaatttgtcagtggcatattcttcactctttaatgatttatctgatacgttaatggaagagagatggattaaagaagtcagccccagtctgcagtcttctctgatgtggattgggactgttgagctatcccttatctgttctatatttttcctttgtgaatgggcgacatgtgattatcgtgattgtcgagcatctccctctcggaatgtgaaatttacaggaagaagagatttgtctcagatacatatggcagtgtctatcttgaagaataaaatggatgagatgaataatttgtctcgttctaagagtagcactcgcgttaccctgaataatatcaccaaaggttcttcactgaccgatgcttgtttgacagcagctgctgtggatgacacttctggattgcaaagtaatgcaaagaatgtggatgagaagaaggatacgaatgatatctttgaaagccctggtccactgcatgatatcattgtgtgttggttggatcagcatgaagttagcagtgttgcaggttttacccgggtggatgttctcatcgtagaacttatccgcaatggtatattttttcctcaggcttatgtcaggcagctaattattagtggaattactgacaagaacgacacaatgttggatgttgaaagaaaaaggaggcatcacagaactttgaagcagcttcctgggtcttctttatttgatattcttgaggaaactaggaccgtggaagagcaacagttatatgagatgatgtcgacatactccagcgagcggcgccttgttctctctgaactttcatgtgatcactcattttatgcaagtggcagaggcgagtatactgcaagttcctgcattcggaagcagagtgatcttccacttgcatcaggaggtgataagcatggaagagtgccagaacaagtagaagatgttaaagccctattgtcaagtctgttgggttttacatatccttccccagtggaatccgaacctcgccaaatcaaaacaagctttcaagaatcagcaacttcaacactctcacaagttgagactggagaagcaaaaagtggatgtgaggtttgtatgaggtccaaagggcagaaattggatgatactgccactcctttccaagggttttcattgattcaatcggacgaggaagatatttggtgggtgaggaaaggcacaaagttacaagaatctttcaacattgaacctgttcagaagtctgttaagcaaacttctaggggtagggcaaaagtggttcgtaaaacacaaagtcttgcacaacttgcagctgctagaattgaaggtagccaggggacatctaccagtcatgtctgtgaaagcaaaatgagctgtccccaccataaacctaatattgatggcgataatgttaaggattttgatcacacgagggtggcaaatctgactgaaattgggaagtcactaaaaagacttagattgcttgagaggcgatctgtctcttcttggttgttgaaaacagtaagacaacttattgaaggaaatgaaacaacggctgctaaagctaccaattccataagcattctttctttgcagtctgatgacaaaacgacatccaaatggaggctaggtgatgaagaactactgtcagttctctatttactggatacatgctgtgatttagtctcttgtgcaaggttccttgtatggttactagcgaaaattcgtggtggaatgggctcttcgggccaacctgggaggagttctatgcatacgaggaacagagatcaccaagtttgtcaggtcagcgaggcacttgtgttctcatctctgcttaggtacgagaacatacttcttgcggctgacatcctgcctgatgttctaagtgctttagtgaacagaaattctgtgtcagcaattgtcaggcatcctggttcaacagcttttgcttacgtacgatactttttgaagaaatatagagatgtggctggtgtggccaagtgggaaaaaagctttcggaccacttgtgatcagcgcctgttagctgagcttgataacgggcggtccattgatggcgaattgatttcttcttcgggggtttcagcaggcgaggagattgatgagcaggtccgccaaaagttgaatggaaggagttcaagacttgtgcagaatatgaaagaaatagtgcaacggcaagctgatgaaattcagcgcagtttgaaggaaaagaaagttctagcaactcccaggaatccacccacttttgagaaagaagatagctatcaaattgcacatgacattgtttcgggcttagtagaatgcatcaggcaaaatgggggtgcaaatccagatggagacctttcaacagttgcttctgctgtttctgcaattgttgcgaatgctgggcatgtgatagcaaaacatttggattttgcaggaggtaactatcaaggtgttaattctgtgagtaattcactaaatttcgttaggcacactttgcgtgtccatataaattctctttgcttgctgaaagaaactcttggggaccgcttcagccgtgcatttgaaatagctctggctgttgaaacttctggagctgttacagcagcttttgcttctccaaagatgcaccgcaatcagtttcaaccatctcctgaggcccatgatgcatatggaaatcatacaagtgatctcagcaactcagggaaaggttttgttgggagaactgctaaagtatctgctgctgtttctgctcttgtcgtgggggctgttgttcatggagctgttagtcttgagcggatggttgctgctttaaaaataaaagatggtttggatattctgcagctcctgagaggtttgaaatcaagttcgaatggtgtatcccgtcctactggaacttttaggattgaacattccacagatgttttggtacattggtttagggttctattggggaactgcagaactgtctatgatgggcttattgcagatattcttggagattcgtacattcttgcactctcaaggttgcagcagatgcttcctcttagtgtaatctttcctccggcctactcaatttttgccatggttctttggagacgatatatttttaaccgcgaagatccacagctttatcagtctctgtcaaacgcaataagcgatattaccagacatcaaccttttcgggagatttgcttccgcaatacacatcggctgtataatcttctggcttcagatgttggtgattcagagtttgcagcaatgcttgaaactcatagtcctgacaggaattcaaaaatactgccatttatacctctccgtgcccggctttttctggacgctcttattgattgcaacacaccaactattcagggagatggagcttcggagccttgtgaccccaaagataatgaattaaagctttcagagaggcttatgcaacttcttgatactcttcaacctgcaaagttccattggcaatgggttgagatgaggcttcttttagatgaacaagctcttatggaaaaagttgcagcaggcaagacagcacttgaatcacttcggtcgttatcccctaaagctgaggggtttaccctttctgatagtgaaaaagggtttactgaagtcattctgtcaaggctacttgctagacctgatgctgctcctctctattcagaagctgtccgccttcttggcaagcttcaggagtcccttgttatggatgtgaaatggattttacaagggcaagatgctattcttggccgcaggtcaacaagacagcagcttgttcatattgcccaacgaaaagggctttcaacaaaggcacaggtttggaaaccatggggttggtccagcttgcttagcgatgttattcctaataaaactgcaaaaaggaagttggaagtcacatcaattgaggaaggtgaagttgtggatgatactgttgatgctaaaaggcctagcaagactccccctcatagtgttgatagaagctttgaagcgattagatccataaataaatatttaactgagaaagcccttgctgaattagtattgccatgcatcgacagaagttctgctgatatccgtggtatactttctgttgatctgatcaaacagatggggactatcagtgaacatatcaaagcaatagcacggaatggtgctaaacaagctggttcagtcccttcaggtaatgaagtgccatcaagcaaatcaagtggtcgtaaaggaattcgaggtggaagcccaaacattggcagaagagctccggttggtaatgacccaagccctccgtcggcttctgctctgagggcagcattgtggttacgcctccaattcatcattaggttgcttccagtaatcatggcagataggagcatgagacaaacacttgcttctgcaatcctaggcctgcttgcaacgcgcatgatttatgaagatgcagatctgccccttccacctaccaatgcaactgctttaaggcgggaggtggattccctgctggagcctcccctggacgtcctgcttgatcggcctggtgaaagtctttttgagaggcttttatgtgttctccatgcacttcttggcagctacaaaccaagttggctgaagtcaaggtcagcctctaggtcgacaattagaatccaacgagatttttccgcatttgataacgaagcagccgagggtttacagtctgcgttggatcacatggaattgcctgaaacaatcaggcggaggatccaagcagccatgcctcttcttccaccatcccggcacccttctttgcaatgtcaacctccgcagttgtcgttggctgcattaacaccactccagagcagtacatctggtgtaggtccgcaacagaaaagttgttctgcgagctgggtgcccactaacgtctcaggcagaagcaaggcggcgttgccttcgcatgatcctgaaatggaggtagatccatggaatctgctcgaagatggcacaagctgcccctcaacagcatctggaagccatggcgcgagtggagtgacgggtgaccatgctaatctgaaagcgtgcagctggcttaagggtgctgtgagggtgaggaggacagaactgacctacattggctctttagacgatgacacctgacgtgtgtatgattattttggtgaattgtggaggaaattagtctcacctgttggcactggagtgaatggtggaaaccaaccatggcccttggctttaggatggttgttgttggtgtagaatacatacacatcgctgcccccgttttgttttgttttgttttgttttagggccttgtgggggcggctgtatataatggaaaaacatttgatccattactgaggcatggcccgagaagacaccttcaaatgggcttctgtgtaagcttgcttatttgagaagtaggaagccatgcagtagattttgtatccaaaagccgtgtacttgtttttgtctgatatgtaatctagcgcatgtcacacatatgtattcccttcctttgattgaagggctaatggtatgatgtcttttttttttgataaaacatgaggggtgagagcccctactggaaattaaataaaaaaatatgtacaaggagttacacgtttcttaattactcctgttctaaaatatagttttttctaaccctctttttttatgtccacattcaaataaatgag

SEQ ID NO: 34460 - DNA, 1500 bp, Zea Mays
gctagcatctcttcgtccccagtcggtcactccattcagcgttgttaaaaccagtgccattagccatcctagccttcaccctcgcggagaagaagaaagaaaccacctcacctcaagaacagctagctgcaaggataaaaaaaaacaaagctgctgatctatatataataattaggctttgcagtgtcttgttttggagagcaaaggatcatcgtcaagtgatggccaagtcaggggcgctagaacttgctcggagcaccggagggtcgcttagcaaggaccaagtcaaatccgccgttgatcagtatgtcaaataccacgacctccatggaggcaaacaagaatcaaggaagtcaaattacaccgatttgatatccgggtgagacttcccgtgaagccattaagcggcaccagcattttttggcactacaattggggctcaagaagggtatgaaggttttggatgtgggatgtggaattgggggacctttaatagaaatcgccagattcagctcaacatcgataactggactgaacaacaatgactaccacatctcaaggggcaaggagctcattttttcagcaggtttgagtgagcaatgctgcttcttgaagggggacttcatggacatgccaatatctgataacacctttgatgcggcctatgcaatacaggctacatgtcatgcaccagatgcacaaggcgtctatagtgaggtctaccgtgtgctgaaacctgggcagtattttgcactggatgaatggtgcttgaccgaccgatttgatcccaacaacgccaagcatttggccatcaaggctgagattgagctcggtgatggcctacctgacatccgtaccactcgccaatgtgtccaagctatgaaagatgcaggatttgaggtcgtttttgcaaaggatcttgctcaagtttttccttgcccgtggtaccgggtgatggatcccacctacttttcatgggctcacttccaatgcacacgcccaggacggatcgtcacccgtgcaattgtcaatacactagagttcctccgtattgccccagcaggcagcatgggagcctacaacgtcctgatgagtgcctctgatggccttctaaaaggtggccgggaaggtatcttcacagcgaccttcttcgtcctgggccgcaagcctctcaaggaagttgatatagtaagcctctcaaggaagttgatatagtgaacggcggcgtcctttgagctgcaagattagtatggggctgtactcataagagctatgaatcatggccaacgtgttctgtgctgaggtgtgtttactggattgtcttatgggttatggcccttgcgctgtgtgctggcctgctgggtcatgttcccgcagtagcctgtatctgcttgtcagcttgtgtgctgtgtactatgcactatctgaataaaaatgcagttttacgcattgttattaatcgcaccatttcttggcaacacgactttgatcggaccaatg

SEQ ID NO: 34461 - DNA, 698 bp, Zea Mays
ccaaaaagaattggtttggtgatgcagctgtttgttggcacatatggtttggcatgctacaacaacgcctacttcgccagggtcggcggcatcagcctgtcggagatgaactacctggaggtggacttcctcttcgccgtcgggttcgacctcaacgtgtcgccggagacgttcggccactactgcacggtcctccgggccgagatgctgtacctggagctggagggtcctcctcctccagccgccagtacaagtctgcacaggtgctgcttgtcagaagacgacgacggtagcagcagcaccagcagcagctagctgcatagagacaggtacagcggttgcttccaagcaagcaaccatgtatgaatgtgtccgtgtacactgtacagtacagacatgcttgcttgaaagcaaacacggagtacgtgacgtaggcatctgcgtgtgatcggtttgctatctggcggctggcgcttagttgtttttagctttgttattaggtaatctgttgctcttgtagtcttgtatagctgcattgctgttgttcatgtggaaatcggaaaaccgtaaggaacggtataaattgcagtcttggggcagtgtaattgttttcttgtccagcagtttatccatagtttatctaaaatattgtttttgctctcttctgcgctgcagactgcactgttcgcagagtaaaa

SEQ ID NO: 34462 - DNA, 2473 bp, Zea Mays
tccatattatgctccacaggcagaggcaaattgttctatcccggttctttgtgtagccagaaacgttgcatgcaatgttaggggtggtttcttcaaagacttcgatgaaggactcttaccaaggattagtaatgttcattatgaagatgaagtaaatgatatctcatctgcgccagatgttggcaattatttgataacagaggatgagaatgtcgcattagtgaatggaaatagagattcattgccttttgatggtatgtcagatgcagagattgaacggagaatgaaggaagccaatgctcaagcattccatcaaacagcgactaactttgtcatgccagtagcccctgctcagaattttgtttcgtcttcagttgcaccattagcgccacctcttagcatgatgccgcctccattcagccagccagttgttcagccaggtttttcagatccactgcaaggttctccagctagagaagagggtgaagttcctgagtctgagttggatccagacacaaggagaaggcttctcatattgcagcatggtcaagacacaagagatcctacacctccacacccagcgataccaccagtgcaagttccagttcctccagtgcaacctcatgggaattggtttcccacagaggatgggataaacccaagtaacctgagtagaggttcagcaggtttcaccgttgaatccgattctatgccctatgagaaaaaacaaccacctcatccttcattctttcatggtggggatagtcctatgtcgtctgatagatttggctatcagaaccagaggtttccctctcagctaccgcacaccgaggatcaccacatgcttcagaaccatgcacctccaaaatacagatccttttctggtgaggagctagcaactcggcatgttccctcaagccaaagaaaccatatagaatcaggaagacacttttcacaatatgctgggacctctgctggcgtattagagggcattgctgtgaaatgcggatctaaggtggagtacaggtcaacattatgtgataccgcagaactacaattctctattgaggtttggattgttggagaaaagtttggtgaaggaattggtaggacaaggagagaagcacagcgccaagctgcagaaatgtctttaagaaacttggccaataaatacttgtcatctgatccaaataagttgactgatatgaaacaagatgctttcggtagcaacagaaacatctttggttactctggaaatactagggatgatatgttgccactttcaagtacttctgaggaatctcgctttatgaaaatggaggagaacaattccaggaaaacaggagattctgtcactgctctcaaggaacttgtacaaattggtaggcaaattctaggcaaaggagttgggttaacatgggaagaggccaagctccaggctgctgatgaggctcttggaactttaagatccatgctaggtcaacttggtcatagacgatctggctctccaaggtcattggcaccgaattttaacaagcggttcaagccagattttccaaggaccgtgcaaagagttccttatggaacatattctagaatcgaaggccatgctccttagatgcctgcatgaatgatgtgcctgggcactacattttgaaagtggacgaagctttgaactgtgaggtctccacaaattgaatacaagccctggattcttggcttcttgtgggcttccaaggctctcacaggccaccactggccatgagagtaccgacgaatatatttatggaagggccaagaaactgtgaagtatgaatggtggccatgacttcatacagaatttcactgccgttgaccagtcgccagtgttaccccatgctgtcaacttggcataattgttgacctggaagttttatggttgaaccagggattgatgcaggcttgcggctccatttcatttctgggtgtatgccaggaatccatggatcaaagggcagcgctgtagttggacacttttttttcccgtgctctggttcagttgaaagttggaccccagtaggttggagccttagcatgtagccagttttattagtgctaagtttttaggcaagttataagttatagcacagaattgagtacttgacagtgttaccgttacattgtttatgtagtcatcttcattagcagcctaggcaggcaacatgaatccagtagctgacagcattcatttactatatatataattatagtatgttgtagtcatcttgtaatagaatatgcccccgtttcttgggaatctgtgcctctaattctgttgtcccttttctggttgtgtcccactcgctctgaatgtgcatgcatttgtcgcatacgtagcttcagtgaaatagagtgctttacgtcatctggcattggtgagctgctcaagtttccagcgtcagtgagcatctaaccctaaactaatcggttgttt

SEQ ID NO: 34463 - DNA, 4206 bp, Zea Mays
tttctctctcccacccaaccctcttccttccaccccatccccgcttctctctcgcctccgcttcgctcgcgcgagagggggccgacgacggaactctaggattcgcgcccgcccgcgcggccaagccaccaggatcgcgctccgcggactcgagggcgctagccaagctccagggcgcgcggatcgtgcaccgggcggggccggttaccgccgccatgtcatcgctcacccgcgacatcgtcttcctcgtcctccagttcctagacgaggagaagtttaaggagaccatgcataagtttgagcaagagtcggggttcttcttcaatatgaagtactttgaagcgaagggccatgctggggactgggatgaggtggagaaatacttgtcaggtttcaccaagatagatgacaataattattcgatgaagatcttctttgagattaggaaacagaagtatttggaagcgcttgataggcatgatggagcaaaggctttagatattcttgttaaggatcttaaagtcttttcgacattcaatgaggagtcatataaggaaataacacagcttctcacttttgagaattttagggaaaatgaacagttgtctaattatggggatactaaatcagctcgaactgttatgctggttgaactaaaaaaactcattaaagccaaccctcttctccaggaaaaacttgtcttcccgactcttaaggcatcacgcctccgaactttaattaatcaaagcttgaattggcagcatcaacattgtaagaatcctcgtccaaatccagatatcaaaactttattcactgaccatacatgtactttacccaatggagctcctgcatcacgggtatctgtaccactggcagctgttccaaagccactccaacttcctccacctagtccatctttagctcgttggctgacgaatacagccgtcccttcatctgttcagtctgctgttgtagcagcctcgtcaatacctgttccacccaatcaagttgtctccatgttgaaacgcccaactataacagactatcaaagtgcagtgcctgagcaactaatgaagcgcttgaggcctggtggacatggcattggtgagaccacatatcctactcccattcctcaacgtgcatggtcaatggatgatcttccaaggacagttgcttgttcattgtcacatggatctaatgtaactagcatggattttcatccaactcgccatacactgcttctagtgggatctgctaatggtgaatttacactttatgagatcggtctgcgtcaaacattactttcaaagccctttaaaattctggatacaaatgcatgctcaccacaatttcagaatgctgttgttaaagacccccccatgtccattaatcgagttacctggagccctcatggagaattgattggagttgcattcacaaaatatttgatccgtgtatatgcatatcaaccaccaaatgagacacgacatgttctagagattgttgctcattctggaggtgtaaatgatatagcattctcacgaccaaacaagcaactttgtgtggtcacctgtggagatgataaactgataaaggtatggaatatgcatggacagaaattatttacatttgaagggcacaaggcgcctgtgtattctatatgtgcgcatcacaaacagagtattcagtttaaatttagggattatggctatggagtttctactgcgactatggcatacaatatagtgatatgcctattcaagtggaaaaaagggaggtccgcatgtggatgacttttaagtgaacaaatgttgattttagcagtatttatgttcatcttctcaacttcccttgatggaaaaattaaggcctggctttatgacaatgtgggatctagggtggactatgaagctcctggcaagtggtgtactactttgctatatagtgctgatgggactaggttgttctcatgtggaacaagcaaagagggagactcatatttggttcagtggaatgaaaatgatggatctatcaagaggacatattctggattccgtaagaggtcagctggtgttgctggtgtagtgcagtttgatatagctcagaatcacattttggctgctggtgaagataacaagattaaattttgggatgttgataataataatatgctgatctgcaccgacgctgaaggaggcctcccagctcttcctcgcttgaggttcaataaagaaggcaatcttcttgctgttactacagtggacaatggttttaagatacttgcaaatgctgatggactcagaaatctacgcgcattaggtagcaggcctcctttcgaagcatttaggctacaatacgaagatgcttctatgaaggtctcaggtgctcctgttgttgctaccatatctcctaacataggccgaatggatcacttggataggaattctcctgcaaagccatctcctatgctgactggtggcgatacagcatcaagaagcatagatataaaggcaagaatctcagaagaaaagtctgataaagcaaaagcttcggaactaatggaggttctaaatccccaacaatgccgtgtagcaacaatgccagaaactcccgatcaggctagaaaggttgtccgacttctgtacacaaattctggtgttgggttgctagcactagggtcaaacgccattcaaaggctatggaaatggagtcgaaacgagcaaaatcctagtggaaaagccacagccagtgttgtgccacaccattggcagccaaatagcggtcttgtcatgacaaatgatacatcggataccaatccagaggaggcaatcccatgcattgcactctccaagaatgattcctatgtgatgtctgcttgtggtgggaaggtttctttgtttaccatgatgacatttaaggtgctgacaacattcatgccgccaccaccagcatcaacatttttagcatttcaccctcaagataataacatcatagcaataggaatggaagattcaaccattcacatatacgatgtcagggtagataaggtaaaaactgaactcaaaggacatcaaaagaggataactgggttggcattctccaccaaccttggcgtacttgtttcttcaggcgccgatgcacagctctgtgtgtggaccaatgacacctgggaaaaaaagagaacagtctcgatacaaatgctagctgggaaggctccttcaggaaatacacgggtccagtttagttctgaccaaaatcacttgctagtagtacaagagactcaactagccatatatgatgcatcaaaaatggagaggatctatcagtggataccgcaggacacattgtcagcttccatatcccatgcatcatactcatgtaacagccagctagttttttctgccttcattgatggtaacataggtgtttttgacgcggagaacttgagattaagatgccgaattgcgcaatcggtgataaacagcaatccacatgttcaccctcttgttgtcgccgcacatccgcacgagccaaaccaatttgcggtggggctgtcagatgggttcgttaaagtgctggagccattggagtccgaaggaaaatggggaacacctgctccggtgaccaatggcacccccaacggcaagacaccagcttcgtcgactacgagtaaccctgctacggaccaaatccaaagatagattgtatttcctaagcattcttctgtaagggctagtttggcatccctatttttctaaaaaaaattattttattaaggaaattagttcatttttctttgggaaaataaaaattccttagaaaaatgctgttgccaaactagccctaaactttctaattacaccgacttatctgtatgtgcatgctgttaggatgtcattgccatttgttgaaaaaaaaagatagaataggttcaagttcaggtgtggttagttttcagatagagatctcttccagatactaccctagtttttttaaggaaaggctgtagggaaaatccctacaacatgattttgttaaataatgaaaggaaggggacaaattagatcaagaaaagaaaaatgattcaaccggctatcgagaatttagccacaaagacaccctaagcctctgaccgctattaaacctaagcatttgcaacttcagcatgtcattgaagctgtccttccaagagaggaaagaagtggc

SEQ ID NO: 34464 - DNA, 2198 bp, Zea Mays
gcggaggactctgggatggggtgcgggggccgaggggccacgcgggcgcgcagaggcggggggcacgcgggggcaagcggaaccgtggtgaagcagtgtggacacctacgctatagccttctagagcagtagagattgacaccacgggcacgcacgtcagcgcctccaccttcctccccagccgcaagcagagcaagaaccggagctggggatcgattccgcgccgcctgatctgcgatcgggactcgatcgtgcataatccgaggttcttcctctctgtcgtctccgatccagacgggtgtgcctggtctgcatcttcatcctctgcaagaaatcacacatctcgtggcgcaccttgcatcagccgcggccggcacctctactctcgcccgccccctatgtcgtaagcgcgcaatcagaactcccgatcacccgcacgctggtgcgccagtgtcgtcttcgccaccatgaactccatcgagcccttcaacaggctggtgaagctggcggcccgcgccttctacgatgacgtctcaatgaagggcgacaaccagcccaagacctcccgcggggacaaccgcggcatggccgtcgtcgtcctggacgcgctcaccagacgaccgtgggtccgagaggaagatttggctaaagcattgaagctccactcgaaacagctgcgtcgcattctccgtttctttgaagaggagaaactagtcacaagggatcatcggaaggagtcagcaaaaaatgccaaagcacataatgctgcagctgctaatgacggtcaaacagttgctaaggagggagaagagaaagtaaagatgcacacacattcatactgttgcttggattatgctcagatatgtgatgttgtcaggtatcggattcaccgcatgaaaaaaaaattgaaggatgaattggacagcagaaatacaattcaacactatatatgtcctagctgtaataaaagatactcagcctttgatgcactacaactgcttgcttctgaggaaatgggagatggcgatgacaatgttagaaagcgcaggcgtgagaaattaaaggacatgcagcaaagaattgaagagcaattgaagccattggttgcacaacttgatagagtgaagaatctgcctgcgcctgagtttggtagtcttcaaacatgggaaagagcacatattggtgcctttgcaattggtgaccctgctgcagctgattcttctaggaattcacaagggcagtatggtacaccaatgccataccttggacagacaaaggttgaagttgatatattgagtgatggtgaaaaagaaggtgctgaatcaggtaaagatggttctgaactcaaagtcatacctccatggatgatcaaagatggcatgaatcttacaaaggaacaaagaggagagaaaattgagtcacaaaaacttgaaaaatctgaagccaaagatgataagaaacaggacttgaaagatgatcaaagtgtacaggaagaatacataaaggcctattatgaggccttgaggaaaaagcaggaagaggaagaagcaaaaaacagaatgcagcaggaaggcaagatttctgtccctgattctcaaactgaacgccaagtgggcaagaaatacaagcgggacgacgatgatgatgaagacattgaatgggaagagcatcaacctacagctgcagggaatgcaaccgaaacatacaaattggcagatttgaatgcggaggcccaagaatctggcgatgatgaagatgataatgtgtgggaagagggctaatgctaaaaagataacagactattcctgtgcggctgcgcccttaggattttggtatcccaccagaggtcgagagtatttcactaatgagcttagttatgttgaacgcatgatcccgagaaacttgtcaagtgaaaagccagcccctatgcatttttagttgaagatgtacaaattatacttaaatactttatgagccggtcagcagtttcccctgttacttcgaagagctgttgtagtcttgtagactgttaatgtgtgggcaacttgcatgcctttgtttcgctgaaaggaattacacgtacatgcacgtttatgtcctgaaagtgaaaatgcaatcgttgtagttgccattcatcgatgcccacattcgacatgtatttgatagttatctagtaatccaagtttctgagttgtcgc

SEQ ID NO: 34465 - DNA, 1673 bp, Zea Mays
cctccgcccatctccacctcgccatcgtcccatgtctctctcctccgccggccaccaccccctcccggcccgaccaaccccgaaccccacttccaattagatgcatcaccaccaccaccaccccgcggccgtgctggagtctgcggccccggcggcagaccctccgcccccgccggtcctcgacccgtcctccttacgcatccacatcccgtcaagcccgcaccatgcgctgccctccaccccgcacaagcgccccgttgtcatgacctcgtcctcctcgtcgtccacccccactcgcccctcgccgtcgcccttcaccccgccgcggaggcgcaaggtccccgcgccagctgctcccgcggggggcgcagcggccagggcctaccgagtgccggaagctgctgcatgagtggggtctgggaaagggataaaccgaggcaagcctttcgcaagcaaatgtggagaggctacttcgaacctgtgacccggtgactcagtgatacaactctcaccattgcaccaggcctgcccttctcatattcaattaaaaggctgctaaaataattgtgttttcagttttgatatctgttgtgaagtagtatattaaattatacatgatgtttgtaagttttattgtacttattcccagttcaaggagcttctggttttagactcctgatagcctgccccaactttcttgggactatagggaatggtgacacctacgcgggagagtactttgctgataggatgcacggctttggaatctacagctttgccaatggtcatagatacgagggagcatggcatgagggtagaagacagggtttaggtatgtatagtttcaggaatggagagacacaagctgggcactggcaaaatggagttcttgatactttatgcacccagaactttatccctggatcacctattgctgtgaaccattccaaggtcctcaacgcagtgcaggaagcgagaagagctgcagagaaggcctatgacatcccaagagtagatgatagggtgaacagggccgttgcagcagctaataaagcagccaatgcagccagggttgctgccgtgaaggctgcacaaaagcgcaaccccaataatggtgatgatctaccactgtcagtagtgtgacaatgaaggaaatatatgttggcatgaagctgcttcgctatgccatcgcatcacccattgcccggcataaccttcagcttcccagtaggggaagccactgctcgtccatcaggccttggccagtggcgacacctgagtcattgccggcagcattcaagcttgcgggagaagaccaaattttcatacatatacatatttgtggtgtcttttgcgatgcagcagaactactgctctgaggactttccattgttcaaggtaactgggcgcgaggccagcagtaggtttctcctgcattttctgcagtgtaatactcacccaatgttagcgatacgacgaatgcacaccccaacatcaggagacaaaaacctactccctccgtttccgtttcaaactatgaatcattttaactttttttgagtcaaagcatcttaaatttaactaaaattatagagaaataaaaaaatgtgatatcaaacaggtatactatgaaaatatgattaatgaagaatatggaaatataattaatgaag

SEQ ID NO: 34466 - DNA, 2617 bp, Zea Mays
ccccgcgcgcgtcttcctccggcatgcgccagcccccccgagctcgcccgcgcaccaatctcgccgtcgggtatcccgcccgcgagcccgcgcaccaagctccttccccgcgacaagctccctcccccgcgacgcgtcttcctcctcgccctagatcgccgccccagctctctcctcaccccgcaatccccgccgcccatgctccgctctctactcgccccagatcgtcgcccctgttcgcgtggattgggtaccggtcccaactatctccatggattgcgcgtccgcgacaacccaatctcctcccggtctccatggaaggcgcgtcctccccccgtgattctcgattccccgcgtccgcgccccagatccactctcctctctcccacaatccccacggactctgccccgtatcaccaccccggctccttagaacgtgatccactctcctctctcctgcaatccccgctacctcaacccagatcgccgccctcgctctcgatcctcgcccacgctctccatggaaggcgaggccgcgatgctcgcgtggatctatgtagaggctgcgacgctctcccaggaagactactgccagtgctccgtgctccatgcgccgcgctggaacgccaccgtgcggtccatgtcctcgtagtatcgcccagactcgcccatgtagtcccacctgcatccaccgaccaccaagcacactctcactgcagaccagagaggattgccacgaataggtgtgtgcagttctactctacccctgcatcgagccggtgtgcgtccaccagaggccggagttgaaggagagcacgtcggcgtcgcgccatgactcggcgttctcgtagatgtcgtccagcatcagcacctgcttcccctggaccacgtcgatgtccaccaggaacttgtacgtgtacaaagggtccacggagacgagctgcgtcggcgactgcagcgcggcggcgtgcagcaggcagacgagcgactcccactggttgcgccccagcgagtcgcccacgaacatcaccgtcttccccttcatccgtgtcaggaagaccgtggcacaacgcctgatgtcacgttgtcccagcggcgccgcggccggcgtcacgccacgcggatggtcacccacgccacgtccctagaccggtgtggtacgccggcgcccacagcgtcgatgaggaggaggtcggagcagcagtagctgtcatgggcagtgccgcagatgtggagcagtcgaatgagaggctagacgggctggagcaccacagcaggctggtgtcgctgttggccggtagccgctcctcccccaccggcaccgagagggacttgtgacccaaggatctgttcccgggggatgtggtgtttgcgctcgtcgatgatctcaggctcaaccactccaaggacccataggccatggggttatgcaatccaaaggtctccatcgccaatttcattttgtagacaaataagttagctcttctgatggcataccatttatagattgccaacgatctgaaggcatatatgaaggcttgttatctcttctgtgtttaattgatcagtgactttgatttggacctggttatcagcttgttatttctatctgaattttctcgctttatttgtactacactcgtgctaattatgtgagaatgatttgtgtcactatggtgttcatctgttattttatactattatatgtattcatctgtcatgttgttgaactcctgttatcaattgcagaaggaaattcctgcttgagccaattacagaaggccctgatatttgtcaaattgatggttgtagtgttaaattggaatacaagaggaggcaagtcaaatatggtaccaaacggcgcagcagcagttgatgtgcaacccgagtgtactgccgctcgaggaggccagtaagtgccaacaacatgaatagccaaagcagggaaatagggctggcgggggcacatgggtaacttggtcctggagcattggagaaggagcataccacaaggaaaccaacacgagttccttgcttcctgaaggcctcatagctcagattactgggttaacgaacaactcatactttgatggagcacatgaggttcgacattatgtcaggaagcattcgaatcttggtcgtattgtgcttgaagttgctaaggactcgcaaatcccccgccaagcaaactgctagaaatcttttcagaggtggagatgatgaagatgatagtgctgatgccgacacaaatgatcctgttgtaccttggtcattaggtagagtaggagttgggcatatggtgtacatctccggtttgacttgtgccttgagttcaacaaatatgaaagtgctgagagaggtggcatctagaggacgtcatgtcgaacgtgtgaagaatttttttagaaatatgtatatttgtgcgaaactttttagaaacttgactccattttattttctatgttactctcggctttgtttcctatcctttccaatgacttgctatgcatttgcactgtatttggcatgtttaaaactgctacacaaaacttgctatatattttgtccaaaaatactatatccttgttatgattgattgatctttattttgtctgct

SEQ ID NO: 34467 - DNA, 1166 bp, Zea Mays
gttagtgtttttatagggctaaaaaatattgcgcgctgcacggaggcattcatccgtcctgcgattttcgtttcctccgtgtctccgttcttcatcctgcgttagagaacaagacgaggtcgaggacccagacgcagacgcacacgcagcgcgccttctccaccgcgaagtcatcgttccgcgctgccgccgccgccctagcaaggtgttggattctgtgttgcggcttcggagtgtcattgctacccttctcctgacaacatggtttctttcgagatgaatgacctcaagaagattgggctaggcctaacaggctttggaatattcttctccttcctgggaatcattttcttctttgacaagggtcttattgcaatgggcaatatcctctttctatctggtttgggtttgacaattggtttgaaatccactatgcagttcttcaccaagcctaagaactacaagtggattttggccaacccttgctgttttcctccaaaggattcctattattggatggatttttcaacaaccgtttgtcacatcgttccttgaccgctacagaggaaaacgagttccggtttagcttactcctgctatatttcaacatacttccctcacaaatatcatgcggttatggatatgttccgtccttgcctttttctttaacttgtttagttggtggtaggattttttgttgttgtgtaaattacccctcatccgtggttttccacagaccagaatgcattttccccgttaatacattgaagaaagttctcatgcaagcctctttgtggggggaaatgaagtcttagggatgttctgaaagtagtgactacccatcatgtctttttgtaacattacttaatgtaagcatatctgatataggtatgcaaaggctacaatagcttccgtttgctgtatgggaaagaaaggagacttggcagaatcgaagttacttgtgattcttgtaccgccatgtgattattttcttcagtaattccccttccaggcctagtatgggaactcagctttgagttgtaaagaaaaattgcattggtaatctggtatgagttctggtctgctggagtggcgtctacgcctcgccatgttggctttgtaaggttccgcagctaatcaaaagtgagccgtttatcaccttgcaa

SEQ ID NO: 34468 - DNA, 2642 bp, Zea Mays
gagaccagcatgactgccgtgcctctgcacacctacaataaccagaacgggatgtatgcggttaagatcagcacattgcatggagcatcatcagctaccgatgcacatcactcaaatgacataggaatgaccgagtacaaagctggaaagagactacccaaggactacctaggactccaccaaacagtaaccaatagtgcattagatttacagcaacggattggtttggccaacacgttgagttcaggttcaatgtctgaaccagcacaacctagtggaggggaaggtgatgtcaacacgctccgaatacttgtagcaaccgactgccatctaggctacatggagaaagatgagatacgtggattttatacttctcggtggtgatctattccatgagaacaagccgtcacgctcaaccctggtaaaaacgattgagattctacggcgctactgcctaaatgatcaacctgtgaagttccaggttgtcagtgatcagacagttaactttccaaacaggtttggtaaggtaaattatgaagacccaaactttaacgttggtctgcctgtgttcaccattcatggaaatcatgatgaccctgctggagtggataatctctctgctatcgatattctttcggcttgcaatcttgtaaattattttggaaagatggaccttggtggctctggcgttggtcagatagcagtttatcctgtacttgtaaaaaagggcatgacttcagttgcactgtatggtcttggaaacattagagatgaacgactaaatagaatgtttcagacgcctcattcagtacagtggatgcgacctggaactcaagatggggagtcagcgtctgactggttcaatatattggtacttcatcagaataggataaagacaaaccctaaaagtgccatcaatgagcatttcttaccacgtttcctggattttattgtatggggccatgagcatgaatgtcttattgatcctcaggaggtccctggaatgggtttccacatcacacaaccaggttcatcagtcgcgacgtccctgattgatggtgaagcaaaaccaaagcatgttcttttgttagaaatcaagggaaatcagtacaggccaaccaaaatacctctgagatctgtcagaccttttgaatatgctgaggttgtgttgaaagatgaagcagatgttaactcaaatgatcaggactctgtgcttgaacatttggataaaattgtaagaaatctgattgagaagagtagccaaccaactgccagcagatcagagcccaaacttccattagttagaatcaaggtagattactctgggttttcaacaataaacccacaacgttttggtcagaagtatgttggaaaggtcgcaaaccctcaagatattctcattttctcaaaatcagcaaagaagcgccagactacaggagatcacattgatgattctgagaaacttcgtcctgaggaactaaaccaacaaacaatcgaagctctggtcgcagagagtaacttgaaaatggagattcttccggttgatgatttggacattgcgttgcatgattttgtgaacaaggatgacaagatggcattttattcatgtttgcagagaaaccttgaagaaaccaggaataagttgagttctgaagcagataaatccaaatttgaggaagaagatataatagtcaaagttggcgagtgcatgcaggaacgcgttaaggaaaggtctctgcactctaaggacggcacacgtttgacaacaggctctcacaacttggtgtttaattatctgagccttaatatcttttctttttgtatttttcctggggctggatactggacagctagtaactcttacaacctttaactaggatactggaggtaaatcttttacagctcaaagcaaccagaactccttcagtgatgatgaagacaccagggagatgcttcttggtgcaagatcaactgatgttggacgaaaatcatctggatttactagaccctccaaagatactgctgatgttgctaaacgtggtacttccaaaagaggcaggggaagaggcaccagttcaatgaagcagaccactcttagtttcagccagtcaaggtcagctaccgttattcgtagtgaggatgtggcttcctctgaggaggaagcagatgcaaatgaagttgttgaaaattcagaagaggagagtgcgcaacaagttggacgtaaaagagcagctcctaggggtagaggtagaggtagaggcggaggttccactgcaaagagggggcgaaaaacagatattgcttccatgcaaaatatgatgagcaaagatgatgatgattcagaagatgaaccgccaaagaaaactcctcgggtcaccaggaactatggcgctgtcaggaggagatgaccctttaaggagttcttgctcatgagagttataggctaggtgttttgtcttgtaaagttggaagagccgacgtgtttttatcaaccttgacgtcgaccagtttgcgttgccgtgaactgactgtaccttgtacacgcccgaatgtaacggatttttgggatttatacatccttgtagctgcttaaattccagcgattgctgtcaaatgaacttcgagaagccacggtgttcgtc

SEQ ID NO: 34469 - DNA, 4168 bp, Zea Mays
cagagctctgcactgccgtgtccaccgtctccctcctcgcctgcgtcgcgagccgcgactgtgcaagctgctattgctggtgccgctgttccacgtctctgtctccgcttttaaggctgtcacctttccccatcccctgcgcgccctcctgcactctccccactcaacaatcaaccacggcgtcacaaccgcacccctccgaaccctagctagcaccgcgcgccggagccccggagtaggtgcctgcttgccctcctgcggtggccgtcgcgctgccgccgcctgatccgattcgtctagccgtgtcaagcgccaccaccggtgatcgatgcgaggcgccgcgggaggcggctcgggctcgggcaggctgtgaggagaggctgtccgctcgctgcgtcgtgcgcctgtctgcgcgcgcgtctgctccgccgtccgcgccaagccgtccctcgccgaggggggctgcctctcacggccgctcggcctcgccgcgcgtctgcttcccaccacccacgcagggatcctcgcgggctggaggtcgaagcgcgagcggagagctaagagcaacaaggcgacgagatttgtgtggctacgattttgcgttgccgacggaacatgggaacaatggttgcagcggtggcgttgcgagggggaagcagcgatagcggaggatttgataaggttcccgggatggactcgggaaaatacgtgcgctacaccccggagcaagttgaggtgctcgagcggctctacatagattgccccaagccaagctcctcacggcggcagcaactgctgcgcgagtgtcctatactctccaacattgagccaaagcagatcaaggtctggttccagaaccggaggtgccgcgataagcagcggaaggagtcttcgcggcttcaggctgtgaacagaaagttgacggcaatgaacaagcttctaatggaagagaatgagcggcttcagaagcaagtctctcagttggttcatgaaaacgcgcacatgcggcagcagctgcagaatacttcattggccaatgacacaagctgtgaatcaaatgtcactacccctccaaaccctataagggacgcaagtaacccttctggactccttgcgattgcagaggagaccttcacagagttcctctcaaaggctactgggacagctattgattgggtccagatgcctgggatgaagttggtatcgtggccatttcgcatggttgccgtggcgttgctgcccgcgcctgtggtttggtgaatctagaaccaacaaaaggcatagagatcttgaaagatcgtccctcttggttccgtgattgccgaagtcttgaagtgtttacaaggtttccagctggaaatgggggaacaattgaacttatttacatgcagatgtatgccccaacaactttagtccctgcacgtgatttttggacactacgatacacgacaacaatggaagatggcagccttgtggtctgtgagagatccttgagtggttctggtggtggtccaaatgcagcctctacacaacaatttgttagggctgagatgcttccaagtgggtatttagttcgcccatgcgaaggtggaggatcaattgtgcatatagtggaccatctagatctcgaagcatggagtgttcctgaagtgcttcgaccactgtatgagtcttctagagttgttgctcagaaaatgactactgtggcactgcgccaccttagacaaattgctcaagaaacaagtggagaagtagtgtacgccttgggaaggcaacctgcagtcctacggacctttagtcaaagactaagcagggggtttaatgatgccattagcggtttcaatgatgatggctggtctgtaatggggggagatggcattgaagacgttgttattgcttgcaactcaaccaagaaaattaggaataccagcaatgctgggattacatttggagccccaggaggcattatttgtgcgaaggcatccatgttactgcagagcgtcccaccggcagtactggtacgatttctgagggagcatagatctgaatgggctgattacaatattgatgcgtatttggcttcatcattgaagaccagtgcgtgctcacttcctgggttgcgacccatgagattttctgaggggcagatgatcatgccacttgctcacacagttgagaacgaggagattcttgaagttgtccgccttgaaggtcagcctcttactcatgatgaagctcttctttcaagggacatccaccttctccagctttgcactggaatagatgagaaatctgtgggttcctccttccagcttgtgtttgcaccaattgatgagcatttcccagatgatgctccattgatttcttctggctttcgtgtcataccacttgatgtgaaaacagatggtgtatcctctggtaggacgctagatttggcatctagtcttgatgtgggctctgctgcaccccaagcctcaggggaatctccagatgactgcagtttgagatctgtgctgacaatcgcctttcaattcccgtatgagatgcaccttcaggacagcgttgcagcaatggcccgtcaatatgttcgtagtgtcatttctgctgtgcaaagagtgtcgatggctatatctccctcccaatctggtctaaatgctgggcataggatgctttctggcttccctgaagctgccacacttgctagatgggtttgccagagttatcactaccatctaggtatggaattacttaatcaatcagatggagctggtgaagcattgttgaaaatgctctggcatcatccagatgctgttctgtgctgctcctttaaggagaaacctatgtttacgtttgcaaacaaggcagggctggacatgttagaaacatctcttgttgccctgcaagacctgacgctagacaagatcttcgacgagtcaggaaggaaagcactattctcagacatctcgaaactaatggaacagggctacgcgtacctgccgtcaggcgtgtgcatgtcaggaatgggccgccatgtttctttcgaccaagctgtagcgtggaaggtgctcggcgaggatagcaacatccactgcctggcgttctgcttcgtcaactggtccttcgtgtgactgacgcccaacccgtcgggtggttatggcgagctgaccctttttttgtatggaaaatcatcagctgtgacaaaaggcatatgttgcatgcactagttgaagaaactggtccaaatgctttttttgtttgtcattccattcagatgttgctaggtgtggagtggaaatggggcaatagtgtcacggttacacatgacccagcattaaccaaacaaccgcgtcgccagtttctttctattcgatcagggagatgcattttctggcaaaaatctcctatttttttgttgcaaatttggtctatgtatatggaactgctgctggacgccgagaaagcaagacatatgcggaaactcactatggctcgaggaaaatatatgcctacactgtcttcagaaaacataatgcagtaatgcttttcgaacccaaagcacacttgacacaaagctggagcacatgtaaagaggcacgccagatgagcaggtagggtctctcgcaaggctgatgccaacaattaaaccgacgacccttcacaacaaaatcacgattctttgttctcatcctgctccagttgaggctccttctctgcagcctcctcaaatgtctctccttggacaagctcagggacgtcgtcatcatcctgtgcagctgcttcagcaccaggaatggatgcttgcactgcagcaaaacggagaaagattgacaatgggaagtcaataatctgcgggaaccaacgtattcgcgtggcgagattttttcacctttagggttctgaaactggataacaacatcgtccttgaagatgttgacctcctcgataccaggaatggtgttccccccgatccttttcaaggtgctctgaagccgcttgtcatcggtggtcgtggtcttgtgaactgccttcttcttcctgccagcattttgtccctcataaattagttagcatgggactatgggtccagaagttgactctatgaacagatcacaaacccaacaggcttaggtgcttggatatctacaactcaacttgtcacaaaaaaaaa

SEQ ID NO: 34470 - DNA, 1235 bp, Zea Mays
cgtggtgctcttctacctcctgggcgacacctaaaggatcacacaattgattcggcgatttgcactccacctgatgttgctttgctcgcaacttttgcttgccacgacggaggctagatccagctcctaggtgtccgtcgtccttccatctcccaccctccctcgttggagcacgagcaccaaaggtccctataccccgtaccgcccttacctctgctctccttttcttctcttctcctgttcacccctcatgccataactgggcgtccgtcgctcccgccctatgccaggtgcccagatcttcgtcggccctgcccctgcttccttcaactccaccaccaggtaatgccctggacttaattgaatgggctctcttctcaccaggatcggtgtcctgccatggctccacgccatgattgttgatcccgtgctgtaggtcatcagaaggggagcagaacccaagcaactagccttctctgctgcccttggtatcacgattgggatctttccgaaatattaggagcacctaaaggatcaactacgataaatgttttcagtgagtgtaccaaggccgaatcgtttcttccatttggttctggaagtcgagcatgtgttgggcagaagtttgttgttcttgcaatatcgatgttgattgccagtctgctccgcagctatgaggttagatgcactggtagcttctcgttgtgacacccacacctcttaatttgttctacacattgcccttctacagattgacacacacctcatcatgagtgagtgtgccaaggccggatcatttcttctatagattgcccttttcagtatgatctgtgttttaactttttaaacttctgatgttatttggaactcgatctctcaggtatagcctcatccaagtttgtctaaagaaatggacacaacagttacagcagccaccttcatctcccaaaccctaagatcatcctcaccaaaagaaggatctgaagggagagtttggcaaacaaaaatctgagacacatacactgcttaaagatatgcgtctgagaacatcattgcatcatgccactgggcatacaagggtgttgaggaagactcaaccctagaaggtactactaatactagcaattacttttttaattaatgcctacattcctgttatgtagtatgcacatcggatttgtattgttgtcgtactattgatgcatgattttaacttgagggggcaagaatatgct

SEQ ID NO: 34471 - DNA, 2541 bp, Zea Mays
cttagtagctctggctatgccccttggtatggaagaggaacaagggtagtggcaggtgggactgtgaaagacaagtcagatatgcatgatctgcggggtttctgcagtagcgagtctatggggggattcaggtaaacatggaaacaagatacagctggatagcgagactcggcttttcttgtatcagatggtaggcacgtggggtcaacttctctttccaaaaccatggaaagaatttcgattatggtatgatgaccacaaagccaaaggactcaaacctattctccaaggcatgaaaactacagggtggtataagaagatgggtgagagaatatggactccttggttcgttaaattcgtccactcacgtggatacttcaatatatacacaaacttcctgaaggaaagggccctgagcgtctcccatagggatgcaggtgtgaactacgagaaaagtgttgggccagattctactttgttggatgggaagaatcttgatttcaatttatgggaactgcagcctttaaagaagctaaagtggtatgatttctgcttcaatgaagctcttccagggagaattgttagaaaaaatagtgaactcggttctatgctcaaatccctgcaattaaaaagtactgttgttctcgtaactctgtactcaatagaagagagatttgcaagaaacttgatttgccatcttgacaaggcaggcatgaagaatactattttccttggtgacaattcagagtttctggatgaccttgctcatagaggatatcctgtcattgatggcgtcaattttcttcagagtatcagattgagtagtttgcagggctctgacggttttgttcaggaaacattggttatatcttatgtgataaaagcttgcctggacctgggatataatctatggctactaaatggaaatatgatttcacttggcaataagttgatcgagccatcagatcagtctgttgacttctttactgcagatgaagggttgatgtttataaggagctcgctagacatgaaaaacaaatggaatgaacttgccatgtcgagagtgaaagcgatgtgtacatctagtgatctgtctgtttccatcaaacagaagagttttgtccatatgctaactgaagtgatggcgagcagtgctggtgttaggctgggaaagctggatgaggctatgagagttattgagttagggcctaacacctcaaacagatcaatattagaagacaaaagtaatgtgcttttctggtctcgcagtagggcttcagattcagttcaaaagcaacttgaaaatatggatttatggttggttgactcagattcgtcttgtagttctgttgtttgtcaccaaaagcagaagtagccaggttgttttggcacatcacttttgcttcactgagaacaaaaatggtgccatcataggggatccatggtaaccagctaagtggcactaatatattttccaaaaatcatataatgacatgtctttagatgcatgaggggaatcagccatattgtttgatatttgtagattatgcgatgaagctgttcgatcaaatgtctgtttctgaattatgattacagttagctatgccaccacagataaccatcttggagttctgctcttgccatgaatgaattttgtgctgaacacggctatagttttgaggttctgaatacttggatccttttttggtattgtgagggctaacgaagtcttcagttaggtaacctgctaattcaactcacaggagcagttttggatattatatcctgctacgtaccatattgatagcaatgccccaactacaatccaatccctgcagacactcaaatcatgggaggctgaaagcggcatgtttcctttttgttcaatgtacaaagtactcactggtctgtactctcattctgcaccaacgcaatgttgtctgtgttgaaagctgtttaatcatgaacatgtggcacgacaaaatctgccagatatgcgtatagctaactagaatgtgcggtgttcgtttccgtctgtgacttcagttttcctacgttactttattttccctcagaaaaatgtgaattttaacatcatgttcttcgtttggtggcaaccggatcgcggcagcacctcccggcgccccctgtcggacagatgtagaaagcgtgtatctgaagaaaatccggcaggcagatgcggttggtgcgtgcattttcactggcagaagcaacgtccgcaggaaacccagctggaaagtggttcggcgattttgacagatcgatcagagaacccggagatgattgtgcagcagcaactagaaagtagcaagtgtgtgctgccgaagttgccagaagcgatttcccaaccagagttggcgctcaatgttttcttagcagcgccgatttcctccccacctgaacaaggtgtgcttgcggcatcatctgtcgctgtatccaacttggaacacaagcaagcatgtactatattatatatactaagctgcgacagaatggtccgccggaaaatgacgtgcaggt

SEQ ID NO: 34472 - DNA, 3301 bp, Zea Mays
tccacgccgtcgtcccactcgccgcccaagtcacactcgcccgggggcgagggcggcggcagctccgggccgtccacgtcgctcgtcgtgggcgtggtcgtcggcggcatcgtgctgctgctgctcgccagcttcatctgcctctgctgcctccgtaagaagcgccgccgcgcgccgccgcggcctcagcactacggatacccgccgcctccgcccccgtacaaggaggatccctatggtggaacataccagagttggcagcaaaatgcgcctcctcctccaccccctgaacatgtggtcacgaccctgccagcatatgccaatcctcctcctcagccgccgccaccaccaacagcagcagcgatgctaaatagtagtggtggatctggttctaactactctggtggcgagatcctacctccaccatcccctggtgctgctctcggcttctcaaagagcacattcacctacgaagagttgatgagggcgactgatggattctctgatgctaatctccttggacaaggtggttttgggtatgttcacagaggattgctgcctaatggcaaagagattgctgtaaaacaattgaaacttggaagcggccaaggagagcgtgagttccaggctgaggttgagattatcagccgagtacatcacaaacatcttgtgtctttggttggctattgcatttctggaggcaagaggttgcttgtctatgagttcgtccccaacaacacattggaattccacttacatggtaacgatcgaccaacaatggagtggcccactagattaaagatcgctctgggtgctgccaagggtttagcttatcttcatgaagactgccatccaaagatcatccaccgcgacattaaggcatctaacattcttcttgacttcaaatttgaagctatggttgctgactttggacttgcaaagttcactactgataacaacacccatgtgtcaacaagagtaatgggcacctttgggtatttggcacccgagtatgcagcatctggcaagctcacagaaaaatccgatgtattttctttcggagtcatgcttcttgagcttattactgggcggcgaccaattgacacaacccaaacatatatggatgacagcttggttgactgggcaaggccattactgatgagagcgctcgaggatggtgaatatgatgctttggtggatcctcggctcggaaaggacttcaatcctaacgagatggcaagaatgatagcctgtgcggctgcgtgcgtacgccattccgcacgtcgtcggccacgaatgagtcaggtcgttcgggctctggaaggcgacgtgtctttggaggaccttaatgaaggtgttcgacctggccatagccgcttctttgggtcatatagcagctctgattacgattccgggcagtacaacgaggacatgcagaagttcaggaagacggcgttcaataacaacacctacaccagcagccaatacagcgcgccaaccagtgaatacggccaggtgccgtctggatcaagcagcgagggccgccagacgcaggagatggaggagtcgggtgcagtgaagaaaggtggctacagcggctacagctccggatacagcggagcctctttggattggactgttgaggagaatgggtcgaactagagtggaatgttccactcagatgcgggtgtccggccaaaacgaagcgtggatggcgccgccgccgcctctcagagcgattgcgaggaggcctgtcgcgcctcctgctcctgcactgcgtactcctataacagtagcaggtgctctgtgtggcatggggaactgttcagtgttcggcagggaacagaagaaggaaaccgagtgccggagttgtcgctgcagcaagcattgttggtggcggcggcggtggagtggtagcctttaggtacactgatctaagccacgcgactaaaaacttctcagagaagcttggagcaggcggtttcggctgcgtgttcaagggagtgctgaccggtggctcgacagctatagcagtgaagaggctcgacggcgccgcccgccagggggagaagcagttcagggctgaggtgagctcgctcggactgatccagcacataaacctagtcaaactgatcggtttctgctgcaaaggtcacaagatcaggctgctcgtgtacgaacacatgtcgaatgggtcccttgattctcacctgtttcagagcgatggtgctgctgctgctgccgcccttggctggaacaccaggtaccagatagccataggagtcgctagagggctgtcctacctgcatcagagctgccgggaatgcatcatacactgcgacattaagccggaaaacatacttctcgacgcgtcatttgctcctaaaatcgccgacttcgggatggcggcgttcgtcgggagggatttcagcagggtcttgactacgttcagaggaactgcagggtatcttgccccggagtggcttggtggtgtcgctattacgtcaaaggttgatgtctatagcttcggtttggtgctgctggagatcgtatcgggtaggagaaattcgcctgaggcgtatagcagcgacgacaactaccacatcgaatacttccctgtgcgagctatcggcaagcttcacgggggagacgtgaggagtttggtggatccgcagctacacggcgacttcgatctggaggaggttgagagggtttgcaaggttgcgtgctggtgcatccaggataacgagcttcatcgcccgacgatgggtgaagtggtccgtgttcttgagggccagcaggagatcgatatgccaccgatgccaaggctgcttgcagcaatcacacaaggcactggaactgtcacggaaggctctagtgcgtcttcgatgtaataattcataattaattaatacctgtagttgagggttgaggctagctactaataatatctgtttcaggaaattttagtgctcaaatttggagcagaagtaatacaggaaggcatgcctgtaatttctgaattgtatggacgccagtggtccccttttgtctcgttttgcatgatttaatcgtttaacgtgtgtttggttggacggataaagaggggtagaaggtggcggtcacattttttctctattactattaagaacctaagggttagactgtctccctggttctgcctcccatcaatctgtaccgtccgtaccatccaatggcccgcgttcgtcccctgccccggcaacccagcttaaccctagctcgctccctccgtagtcgcctcttcctgcttcgctcctct

SEQ ID NO: 34473 - DNA, 742 bp, Zea Mays
ctggttcgtgttccgttgaaacgaaaaggaaaatcgccaggccgacacgacgaggcccgttcatgcattattttcgtcgcttctttaaggatgaagaagcgatgacgcgtgtacatgggggacgaggtgcgcgtgcgtgcggtgaggtgcggtggttagctgaatcgagatccatcttttgacagcgtcggaacgacatgtggtacgtcagaattaagagcggggcgcgaggacacggccgcaacttggcccattttgcggcaccaccggtcgctgctgctcttctttctgaaatcctgtgccgaggatggcgtcatgctttcttcttcttcgtctcgtcgtcgtcgtcgtctcctctccttcagctggtatgtacagtgcttccccgtgactgactcgtagccctcgtcggccgggctcgttccaccgcgactgaggtcaaaccatgtgccagttttcctttcccctcatccgacgaaaagctagcagcagcactgctccatggcaatgatcaccgacaccgagcaaagcaaagctgccacccatcaacactcatcaacaccccacgccgccatgagctccggtgaaaaaaaaaaatctgttctgccgtaaacgaaaccctcgggaagaagaagaagagtcacggattcagtccatcccctccatgtgtcgtggtcacgagaaagctgcggaaacacggccggtgccgccggtcatgcaagtcggccattccaaaaagttt

SEQ ID NO: 34474 - DNA, 2319 bp, Zea Mays
ccaattcccagcggaaaacccccagccccctagcctcctagcaccttctcctgtccttctaaccctagccgcccaagcccaccagccgccgctagctgctgccgttctccactctccacggaccatggctccacggccagccgccaaccaccaggccacggccgagcagggcgccaagcacctaggccggccgagcggtgcgccgagcgcccgagcacccaggccaccgcccgccgcaccagagcggccaacggggcgccgagccgagcagagtttcaacagtgttcctgaccgtgtgttcttgatccaggtggctgccagcaagacgaagatctacatggtgcttgagctcgtcaacggcggcgagctgctggacaggattcaggcggccagtgagggaaagctcccggagcaggaggcggccaaacagctccccaggtgctaattccttatgccgaatgcctgcaggttctgcagaacagagggtacgacggctgaaatacacacaatttagttgaatttaagttatgcctagtgtgctatggccactagtttgaatttaagttagatttaaaggttacacacaatttactagttttattatctgaatggttgaattggtctcgtactactgtacataatgacagctgaaatacatcatgtctctaccactttagcctttcgttttttatacactaatactgatctacatggactgcaatagtattcacaccacagtgaatgttgagcgtttattcagtaacactaatataggcaagaggtatatgtatttcataggcaaaagtaacactgaagacataggcaagaagtataggcaacaataacactgatatacttagagggaaaagggtatatgtatttctagcccttttataacagtcatttctagcagttttagcaaatgactggttcagtgtgtatttatatagcagtttcagttttatagcagttttagttctagcacttttagcaaatgtatatatatatatatatatatttcatagcagtttcatagcccagccgccgcggcctccggctgggcacgaggcccagttgcccgacaggccgtccagggcgtgcctgagaatacagatttgtcttcgaaaatcatctcacctgttttcttttttgcagattgtactttacttggagctttatgtaagtgttctctgaatttctgaaacttactgtgaatggctactattatgcctttgtgattctatatatatatatatatatatttgcaggcaagctgtgtggagtacatcacgccgctaagagacagcatgtcatcagtgtttccctcagcacatttagcttttgccagcatcgacctgaatgcacacactgtctttgcgatcacaacggccttggcaattctccaaacagtctgtctcaggaacctcagtctcctctcgtatctttctggtatgctaaaatgtagtagaatccttacaacattgtttcttttttttcctgatctttcaaaggaatgtaggactattttagtcagccagaacaatctttctaagcaatgacactattagaattgactcgtaccactaatagttcagttagtttatataagcaataaagttaagtaatctttcagtgaaagaaggattttttttcttccccctgggtcctgatcctgaccatcttttgtactcagctgacggtgtgatggcgacaattgcagtcatcctctgcctgttctgggttgcctgttctgggttgtgagaaacactttcacctaaactcgtgcactgtactttcctttggccaacccaactgaacaagttgcttgatggtttacaggctctgatactcccatgtgcgtgctacctctccatcaagaagggcgcagtgccattgtgggagatcatcctgtgcatagtcatcataatgatcggcgtcgtatgtgcatgcgtgggatcatacacctcagtcagccagatgattagcagcaccaaatagcgcacgctagctgatatttatctagtgtctacggatccttccaaatgctttgacagagttggaactggcagcttttcgtagctaagtttatttgttccttctttatggcagaaatttggtaagagagagtttagttgtgggaggacaggcggcgaaggagtaatctgagtttagtgtggtgcttttgtgactgatcatctctggagcttttgtgaatgatctagctagctatctgtaaatgatctagttgtgaatgatattataattgtgatgcttttgtgaatatataattgtggtgcttttgtatttatgtgatggatc

SEQ ID NO: 34475 - DNA, 2151 bp, Zea Mays
agaaattagaatgtcaattgtgcaaagccagttatttagggtgtcaaaaatacaaatttctcctcccgaacaccctactcgttctcccccatcggcgccgctacgaccagcgtttgagccactcgccgccgcgcacgatcctccacgccttgctccagtcctcgtcggcacgcctccttcccaaccctaaccctagcactagcagtcagtcgagcggcggcaagtcaagggtctgtcgagcgggccggcggcgaagaagtgtctagcgaggcgagtcaggtgcagggggacccacccgcagcggtggcgtgaagcgcgtttgactggatcgaccaggttggcggctaaacagaggaggttgcttgtttgttttctccgtccggctgcggttttcctttgactggatcgatcagatttgccggcggcggcagcggtcccccggcaaaggcgtggggatccctgccgggatggaggtgccgtggctgctgctggtgcacgggtcagtgacggcgctggtggtggtgtcgttcctctgcgggcaatggcccatcttcgagggcaccttcatccagagcatcaaccacttcctcacctttggggcctaccactacctcctgcggtttgtgcagtctgtgtgcggcactggggctagggatctcgtcctcggtgtcgagggatactgctgcgaccgacccaacccgatattgcaggtattttatgttgccataattggagtgacatattttataatagtgcagacatctttccagtatattcctgggtattatgtgagtggattgcacagatatctgagtgttgtggctgtttctgttggtgctatactcttcgtgcttactagcttttctgatcctgggactgttactgctgaaaatgtttctcaatacgtatcttcctacccatatgacaacattatttttgtggagaaagaatgttcaacttgcaagattactaggccagccagggcaaagcactgtagaatatgtgacaagtgtgttgctcgattcgatcaccattgtggatggatgaataattgcattggggagaaaaatattcggtattttgtggcctttttagtttggcatttccttatatgtctgtacggggctttaatccttggcttcattcttgctggtgaaataaaagagcggaaaattatatacattctgacagatggttgaatgggtgctccattgctaagcttgcacctgaagtgctttcaaaggtggacaaaaaggttgcctctaccagaacaatggatcgagctatgaatgacatgttgtgggttatggttggacatcaaatcaatccttcctctgataggtatacaacaatatcttgttctttgggacactatgggagagattgtgctcactcaacaagaagatcatcacgtgtggaggcatgggacttcggtttattatggcatcgataattcattctcgggcttgtttccacatgttgcacagtggttgcttgctgtgcataacactcagatactcttgagtgtatttttggctatattagcactgctccttggtggcttttgtgcttaccatgcacatctttgtttgacaaatacaacaaccaacgagacattcaaatggcaagactacatcatgtggatgaaaaaggaaaatgaagcaaaggcggacgctgccacgctcagatccagcataggctcggccaatagtgatgcacagaaagctcctccaagcaaatggaggacgttcttcatgagatcccgcacaccaagcatggaaccagttgtgagaaacaacatatatgacagaggcatgattacaaacctgtgcgaggtggtcgtccctttatcagaacggaaggcattttcccgcatgaaatcagattgatgtcttttgttgcagttgctttgtcaccaaactgttgttgtatatcagtgtagaatttgcgacacattttttttggtcataccatagaggcataggggaaaatattcaggataatcgtgttcagtacctacgacctatttattataggtgaaaggttttgaagttgcatttgcctttgcaatacgccgatgtcactattctgtttttagaacatgattctgaaatggcactaaatatgaaactcatactatatgtcttcgag

SEQ ID NO: 34476 - DNA, 1578 bp, Zea Mays
atggcggcaggcagccaggaacagggagatgggcttattgacaaaatcagaggagacattgctatccttacattgctcgccgaagtattatgtcttttggacatgattgtaaattcttttgcgcatacaatatctacaaagcctgttgatcgctacacaagaccagagttcacagatgatggtccaatggcaatcaatgctggacgacaccctattcttgagaccttgcatactaattttgttcctaacaatatatttctctctgaagcatctaatatggttcttgtcatggggccaaatatgagcgggaaaagcacatatctccaacagatatgtttaattgtcattcttgcacaaattggctgttatgttccagctcagtttgcatccttaagagttcttgatcgtatatttacacggattggtaacggggacaatgttgagaacaactcgagtacgtttatgacagaaatgaaagaaactgctttcatcatgcaaaatgtttcttcaaggagtttggttgttgtggatgaacttggaagagcaacatcttcctcagatgggttggcaatcgcatggagttgctgtgaataccttctttctgtgaaagcatacactgtttttgccacgcacatggaacgcttgtcagaactttcaacaatgtatccaaatgtgaagatcctccattttgaggttgacttgagaaatgaccgcttggatttcaagttctgcctaaaggatggcatccgacgggtaccacactatgggcttctgctggccagagtagctggtatccctacttcggtgatcgacacttcaacaagtatcacttcacagatcacagagcaggaaatgacaaggatgaatgccaattgcgaggagtactggtcgcttcagatgacgtaccaggttgtgcagcggcttatctgcctgaagtactcgaaccatggcgacgactacatccgtgaagcactgcagaatctcaaggagagctattctgcgggccggctaacataagaggtctcatcagtgtatgccgctggaggatccataagccaatgtatatattcctccgtcaatgtgatactatcttaggtcctcaaacgcacatctatcgttatcgcacatgccatgtaacatcttatcccctattcatatagatgatcacgaagcaagacagcatgtgaatgtttagaacaagtgattattatgacctcagccacatagcttttacgaaaagatttactggaatatatggaacaccaaagtaggagattagagtggtcgatacatacaaactgtaggtttgaacagcaaatgttggcattgttttctgccaatacattaatcgatacagtagcatgagaggaggaggagcacagaaggcggcctagaccacacaagagagcgggaggtagtgtggagccgagcaggacaagaattcatgagggacaaaaaaaaaatgtatggcaaaatcattcattgtcataaaaaacttgtgttttatataatttcagtttcatgtcaatgtatcaataaaataagcaaatataccgttaagtttttgttgaccgagac

SEQ ID NO: 34477 - DNA, 1054 bp, Zea Mays
ttctattacaacaccgatgagaacccttgttctacctcccaaagtcgggttcccacccagcgtgcccgccgccgaccgcctgcacaagcctgcggcgagatccggcgtcgccggcgagcttcagcaccggcacgtgctccggaaggaaatagcttccggtgacgtacgctaccctctccgcggcgtcccggggagcggggacggggagcgctttttgctgtcacccgcacacgagcgacgagctccaccacctgcccagctaaccatcaggaggtctggaggatcacaagtgccttggagaaccacaagtatgaaattgctgactgggaccttggtgccggaatatacatagacttctacgttctgaagaactcaatgcaagaaagaaatgccatggatgattcggattcactcgaggagatgagtgaatcatgcagaagtttctttggtcgattaaacgaatcgttgttagtctggggaagcaaattacctgttgagtcaagggcatgctactcgaagatggcagaggagctatgcgcgcttctggtggacaccccaagcgagacgctgaacctacccatggggtgtcttctgacgatgctcaacgctccagttccagacgagagcaggtcgtcgtacctgcaggatgcactctccgtcttcaccgaaatcctttgcagcgatccgtaggtgaaggggagtgaagcctacaggcaacacgccgaagagtttgtacgtctcatgtttgatacttgtagaaaattaggaatgtataactatgacctgatgttgctccggtgaatttgtaacgccatctgaagacatgtgtcgggatcttcgttgtatgtgagtaccaggtcttatgaaacgttgacttgcgagctgtaccaatggggagtgatttcctgggcttcattttctctgtgtgtgtgtgtgtgtttattacagggaagggcagcgtcacggcgacccgtgcttcggtgtacattggagattactgaggccttcgtttcagccgtaaatcacatggatcgaagagtactttaacttggaa

SEQ ID NO: 34478 - DNA, 762 bp, Zea Mays
ctcaagtgccgtaggtttcgtgtttctgaatgcgtgtatcgaacaccccaagatggcaactttcgcctcaccactcctctgcaacttcatggccatagaacagaagaacgcgcctcagctgaccaacagcagaaagccgtccccgcgcctgagcttcccaacgacaaggagcatgccaacattgccgttgccgggcttcagagcgaggccagactggcgcgtcgccgccgtctacaaggtgaagctcattggccccgaaggacaggagagcgtgatccaagtgccagaggacagctacatcctggacgcggccgaggaggccggtatagacctgccctactcctgccgcgctggtgcgtgctccacgtgcgccggcaaggtactggagggctccgtcgaccaggcggaccagtcgttcctggacgacgcgcaggtcggtgccgggtatgcgctcacctgcgtcgcgtacccgacgtctgactgcgtcatccagacgcacagggaggccgacctgtactaggcagcccagtcccacgcgtaaccggatcaacgactgtgcacttccatagctcccattcggattcgatcttgagttcttgacactgattcgcacttgtgcttttgtccttgcaggtagctagaactagtagtacattctttaatcgttattgtttggttgctgtggtttgattcgtcccctgttttgctctctggatatctcggtacctgccaaccgctgtatcgaaatcaacggtagcttgg

SEQ ID NO: 34479 - DNA, 1125 bp, Zea Mays
cggatattctcagatgtctggggaggctggagttggaagctgtgctgtctattggtgctcatctaatcccacacccaagaaaggctgcaagtggcggagaagatgctttctttgccaatagcgatgctggcggagtatttgccattgcagatggtgtctcgggatgggcagaaaagaatgtcaatccagctctattctctcgagagctcatgagaaacagctctaatttcctcaatgatgaggcggtatctcttgctaaacctcaacactatttataggcatcattttctttactctatgtgcttgtaacaaattcatgtcacatggaagttgcaggtcagtcatgatcctcagattcttctcatgaaagctcatgctgcaacttcttctattggatctgcaacagtaatcatcgccatgcttgagaagaccgggactctaaaaattgcaagtgtgggagattgtgggttgaaagttattcgtaaagggcaagtaatgttctctatatcccctcaagaacattattttgactgcccataccagataagctcagaggcagagggtcaaacatataaggatgcattggtttgcagtgtaaatcttatggagggtgatataattgtgagtggttcagatggactttttgacaatatctttgaccaagagattgtttccataatttctgagtcgccaagtgtagatgaagctgcaaaagcattggcggagcttgcaagaaaacactcggtggatgtcagattcgattcaccctactcaatggaggcccggagtagggggttcgatgtcccctggtggaagaagctacttggaggcaaactaataggcggtaagatggatgacatcacagttgttgtcgcacaagtgaagacagtagtggtcccagaggacgaggttcagggtggcgacacagaagaacaaaaggggaatgagcagggcgctgcagctgtggttgcatacaaaatgaatgatgaagaagtagcttgagttctgggaccatcctcattttcattctcttcattttacttttctgtgatgactgtattatactgcacataaaggaattgaagcaaaataaatttgtgtgattgtgtctagctgtgcgtatat

SEQ ID NO: 34480 - DNA, 5270 bp, Zea Mays
cactcccagcctggcatcttccctctccacgccacacgcacggctccatccttctgtccacgctcgcgccgccagggcgctcgagctcgccgtcgtcatctcgtcgggccgccgcctcgcagcttcgcccgcggctctggtccgcgccccgccaaggcccagccccaagctgccagcggcctccggcgttgctcgccgctcactgcgcgccgtctcgcgctctcgcgccctcgcccagtcctgctctcccttcgtcgctccgcggctccgccggcgtctgggcatccggccttcgggctttggtggcgccccccaccggccaccggcccaccccagcgggcagcggccactgcaactctgcggctctgccaggaacaaggaggaacagtggcgattctgccagggacagggaggagcagtggcagacaacgtccttccttttgtttggcccggggcttcggaattatctggagccgctactgcccccagcgttcggactcccgggtcgcaggcagccacgtctcgtcctggctctgggctcgccgcgctatcgtctcggccattcgctccgacgtccgtattcaatagatttgccctactcgtgaccacgagaatccggcgaggagggagaccgctcgtgcggagtctataatggctgacgggcagcatattcaggcagcatcagaggaagtggattcaatccacttcagcttctatagtgatgatgaaattaagaggatcagcattaaaaagatcaccaagtcggagcgccttgatgccaaaaaccttcctgtgccaggtggattactggaccctgcaatgggacctatcaatgatattgatatctgcaagagttgtggtcagcattctgttcgttgccctggtcacttcggtcatattgagttggcaaaaccattgttcaatcctttgctgtttatgagtctgaaaaaccttctccatgtcacgtgtttccattgtcacaagttccgcctgaacaaggaacaggttgacagatatgtgaatgaacttgaacttttagtaaagggtgatattgtctgtgctaaaaatttggaagactcagtagaagaagcatatctttccaaggaagatgaaaacatgaacaagaccacttcaggtgataactcatcttctgtgaaagacaagaaaacctggacatctatccaattgaaagaggttttgtctattttttccaagataatgaaaaagagacagaagaagtgtgcaaaatgtgacatgaagagcccaacaatctcaagtcctatatttggttggctggtcaaggacacaaaggcttctgctgtaagaacaaatgcaattgctgattttaaactcaagggagatggtgatattcacaactcaggggaaacaggggtttctggtcttgaggaagagtcatcttcacctggaatggtgtctaaagactcaatcaatgaagttagaggtctttctgatgatacaattaaagaattggtagcatcatcaggaaaaaaacatctattgcctacagaggttgaatctattctcaaggacttgtggaaaaatgaagctaggttctgcatgttactttgtgatttccagaagaatatgtcaagtgaaccagaaaagagaaggggctatgaaatgttcttcttgagtagtctccttgtggcaccaaatagattccgcccatcaactagctctagtcttggaattatggaacatcctcaaagtgttctgctaagtaaagtgcaagaatccaatcttgcgctacaacataacaatgcatcttctaaccatatggatgttcttcaaagatggatggatctacaacggagtgtaaatgtgctatatgatagtagcaaaggccttgcaagaagcgagaagaatgctcatggtatacgccagctattggaaaagaaagaaggaattcttcgacaaaagatgatggggaagagggttaattatgcatgccgatctgttatatctccagatccgtacttggctgttaatgaaattggcattcctcctgtttttgcgacacgattgacatatcctgagaaagtaacaccctggaataccaaaaggctccaagaagctataaggaatggtgccgatatacatccaggtgcaacacattacagggacaacaatagcatgtataagttacaggcagtccctgccaaacgccgttccattgctaagatgctacctgcatctagaggatcaatttgtcagccagggagagatcctaattgtgagtttgaaagcaaggttgtatatcggcatcttcaagatggtgacattgtacttgtcaataggcagcctactcttcacaagcccagcatgatggctcattttgttcgggtgttacctggagaaaagacgttacgaatgcactacgccaattgcagcacctacaatgctgattttgacggagatgagatgaatgttcatgttccgcaagatgaaatatctcgtgctgaggccatgaatattgttgacgcaaacaagcaatacattggtcctaggagtggggatgctgtcagaggtctcatacaggaccacattgttggtgctgtactattgacaaaaccagacacattgctaagccgtgaagaatatagtcagcttgtctttgggtcttgtgtgccgtcctcaaattgtggctctcatcaccctgctaaggtgtctgctattgaggattacgatacacttgaacttgtccatcctgctatttggaagccaaggcccttatggacaggaaaacaggttataacaaccatcttgaatcatttaacaaaaggttgtcctccatttactgtggagcagaagggaaaaataccaaaagaatatctgaaagaagatccttccgctcaaaaggaaaaagaagatccttccgctcgaaaagaagctcattctgctaaaaaaggaaaacgagaagatccttccgctcaaaaagaaaaagattcttcagttaataaagaaaaacaagagaagatacaaaaacaaaaacaaaaagatcgttctgaactggtcttatatattcacaataatgagctcataaagggcataatagacaaggcccagtttgggaagtatgggatagttcatacagttcatgaactctatggtgcatatacagctgggatactgctctcgacattcagccgcttatttacactgttcttgcagttgcatgggtttacttgtggggtagatgacctgctactattgccagagaaggataaactgagaagtaaaattcttagtggaagcgaagtgcgtagtaatgaagtccactggaaatttactggagctgacgaagatcataaaggtgatctggtaaaattgcatatggaggttgagaaggctgtaagaagtaacggtgaatcggacacggctaccttggacaatgatatgaaaaatgctctaaatgggataacaaccgacgtcaataaaatattatttcctgatggtctacaaaagccctttcctggaaattgtctctctcttatgactacaactggagctaaaggtggtccggttaacatgaatcaaatatcatcattactaggccagcaagagctagaaggaaagcgtgttccacggatggtttctgggaagactttaccgtgctttccgccatgggatatttcttcaagagctggtggctttatcagtgatcgatttttaactggtctgcgtcctcaagagtattactttcactgtatggcaggcagagaggggttggttgacacagcagtcaaaacatcccgtagtggataccttcagcgttgtcttatcaaatgtctggaatcgttgaaagtctcctatgatcacacggttcgggatgctgatggatcaattgtacagttctgctatggagaagatggagttgatgtgctgaaaactagctttctgaacgagttcaaagaacttgctgataacagaaaagctgtccttgccaagctcggtggctgcagtaaggatcccacattatcaaaatgtaatggatacattactgaactgcctcctaaattgattgataaagcggaagagtttcttaagcattcaaaggaatgctgtcgttacaacattgaggcaaaggaattaaaggagttacttaaagtcaagttcctatccagtcttgtagatcctggtgaggctgttggtgtggttgctgctcagtcaataggagaaccttctacgcagatgacgctcaacacttttcatcttgctggaaggggtgacatgaatgtaactcttggtataccccggctgaaagaaatactgatgactgcatcagataatattaggacgcctgttatgaagtgtcctttgctcgaacatatttctgaggatgatgctaaaatggtggttgcaaagcttaggagggttcgtgtggctgatgtagtggagaaaattgaagtctgcacagttcctttttacaactctaatgggcgtgtttcaaccctgtacaagttacagatgaaactctatccacaagaccagcttgagtcaggtcttactatagatgagtgtcaggcaaccttgagaacagtttttgttgaggcaatggaacatgcaattgaaaagcatctagatctgctatacaaaataaatgaaatccgtgctgttaagatagaagatacagagggctcattattaaatggtgatgaagaatctcaaagtagacatgctgatggaggagacactggtactagtgatgatgacgatcaaaatgataatgatgttgacttgggaactgatgcagaaaagatgaaacggcaagagaaagatgagatggagtatgatgatgatactgaaaccgaggagggaatgggtagcgaatctgaggagagcgatgaggatccagctgagtcaggtgatgattcacaagaggctgacaaagaacacacgatctcgaagtctgagacgacttcagtggatgacctgccatattctgtaaaaaaggggaaaaaatcaaaagatgatcgtggaacagctaaactagaagagaaaaatcaaaatgagggaagattagatgaccagaaacagggtcaaataaagaagcgcaggaaaaagttaaaacatactatccatgttgaatccagtgatttggattttgagattcactatgcctttcatgatgaacctcatattttactagctcagcgtccatttcactatcgaaagctaagatactcgcgctggcatgggtgagtggtggtccagtgggggcgtggggctaaactctattatcatccttg

SEQ ID NO: 34481 - DNA, 1902 bp, Zea Mays
agctgctgcatcaccctgagctgcttctttgcgtggtccgtcctgttcatttgaagatgaactcatccctctgcttgatgtcctagcaaacaaagtgaacgctatcaggaggcttagggaactcttgacaaccaatcttcctacaggcacatttccagtcaaggaagtcatagctgctacaatgataagaagaaagtagaggaaaaggaacagatctcgactgtaattctgcagatgaagcataccaataaaaaggcatatgaccagactctgtaacaatatctgcacatcagtaccttggcagactctccaagcaggtttgtacgatcacatatgtaaaaataaagtagataccctccaaattcggatctgaaaatataattgcaacccagttagcagaatagtgcaactagaaagcttgaatgattggaggagagcaactgtagcttacattgccctcagtgttaaacgattctccagaagcaactggtccatgaatataagtctgttgaacccaacattttctttttgtcagagacacaatgccttcggatactgatattgagaaattgtaaatttataatttatagagaacctgagtatttgtgatgtgagggaagtataagctggctttgcagccattgcttggccaccctcctccaataacattgtctggtcttctgctttgactgaactgtcatccatcactgctagattgacatctgaatgtctactgacaaagatgactgttggttgattcctcactgtgtcttgttgttgtcgtagtttcgttcaatcattaatggcacccattagtcgccaaagatgttgtcctgttacaaatattctgatgttcctgagaattagtaatcgaattacccattggtcgccattgtttgaaatatattctcacaacttctcttactgcttcattgtatgaaatattaagaaacaaactaaatgatagatatttaaatgttccagtttctaattaatatatgtggaatatattctattgttgttagcatgggttaagaccagtgttgtggttgacaccggatttccctctgaacactgatgaactcatccctctgcttgatgtcctagcaaacaaagtgaaggctatctggaggcttagtgaactcttgacaaccaaacttcctacaggcacatttccagtcaaggtaaactatctggcaccttggttacattacccgtgcttccagcagattacatcttgccatttattccaatcacaatgcatggttcaatccaatcatgagaagtggcaatctgtgaggtttttgcaagggagatgagctcaccttggcaatggtagttaatcttattaatgcaaacaaggatgattaatttgatgtacttttctatgcctcgtggtgcccattctcacaagaatgcatttgaggaatctgcaattaggccaaggcgtcccacacaggtgtttcttccataagaagactaccgacatgggatacgtctcttcagtttgtttgtcaatattttgtaggaatcagaagaggtgttcaacatgtgggttaattttgttttcaagtgtgctcctctaatgacacccttttcttttttggagtaccttttgataataacaaatttgggttctatttttgtttctagactcaagtctagagttccatgaattaaaatattggtttatttgttgtggccacctatggtctcattatcttctctccacttagttatttgttcctgcaatttgggtttggccagtatcaaatttggtaaggaaggaggcaactagatgcttaccgaatttactctcaattttgctttccttatcgcagttttactttgacatgcactaccattccccctctaatctctaccaaccatatgcaaaattgg

SEQ ID NO: 34482 - DNA, 5808 bp, Zea Mays
aaaagaaaggactgcagcccgcgcccgccacgcctttctctcttccgtgcagctgcagactgccgtgccggtgcggtgcgccccgctcccgtccggccggaccccaaaaaaaaaccacccagaccgctgcgattttttacgggaaaggcttccccctgtttacggctttacgccaagcccgccagctcgcccgttgcattcccgtttcgagcttccgccctccctcctgtgtactatctctttccctctgcccaccgctcgcagtcgtacaccaaccacttcatttcggggccgtgagagagaggccgcgcggcggcgacgaggcccggagcgagggtggaggacgacttagggtttttggtcggctgatccatggacagggggacgggcccgggcgccgaggtgctctcccccggcgaggccgagtggcccccagagctccgcctcccgccgccgcctcctcccgtgccggagcccccagggccgcatccgcccgcccctgactccgcttcgatgcgaatgcccgcacctcatctacacctgcagcttcctcccgcggcggcggcgaggaaggacccgtctccgcctcgccacggggagggcttcgatgaccagctgttcctcggatcgctcatgggggctgcggccccgctccagcatcagcaccaccaccagcagcagcccgccgccgcggcaccggtgaagaggaagagagggaggccgccgaagaacagggacggtgcggcgccggtgcctgcgccggtcaagccggtgagcaagaaggatgaggaggtggtgtgcttcatctgcttcgatgggggcaacctcgtggtttgcgaccgaaggggttgcccgaaggtgtaccatcctgcgtgcatcaagcgagatgaatccttctttcggtgtcgggtcaagtgggattgtggttggcacatatgcagcagctgcgaaaaggcagtacaatacatgtgttatacttgtacgtactctgtctgcaaagggtgcgtcaaacaaggcaaattctttggcgttagagggagcaagggtttctgtgacacatgttatggtactatattattgatagaatccaaagacgatggtgcaaagctcttcttcacgagaccagaattttcaatcaggataagtaggtggccagagaggttgtgatggattttattcaaatttatcttcgtacacaacaggtctacgaggttggtgttgattttgatgataaaaatagctgggagtatcttttcaagttatattggttggatctgaaagggaagcatttactaacgattgaagagctaaaaagtgcaaagaactattggactgttcctactactgctggtaggagagagaaagaggagtcatctgatgaactatatgatgcaagcaatgaccaagatgctacgtttgacatttcctcaaagaaacaaagacagaataactcttcaggaaaaagaggacaaaaacgtaaaaaagatggtggcattacttcaaggaagcgtggaatctcaattaatagtgctggaagcttaccgaatggatcaacaggtgaagggatgtccttggcaggtgacacaaaatgggcatcatctgagttattggaattcattggtcacatgagaaatggtgatagttcttatatttcccagtttgatgtccaggttcttttgctcgaatatataaagcaaaataacctctctgatcctcgcagaaaaagtcagattatctgtgatgcaaggcttagcaatttgtttagaaaaccacgtgttggtcattttgagatgttaaagcttttggagatgcattatcttgtgaaacaggttccaacattgaatgcagatagtgaaagagcatttgattcatactcggcccaagtaaatcatggaggatataatgagttgtccgataaattaggttctgataagaggaggaaggctcatatgaagattgaaagagaatcgacaattaatccagaggattatgctgccattgacatgcacaatatcaatctgatttacttgcgccgcagtgttatggaggatcttattgatgaggttgctgttttctctgacaaaattgctggggcttttgtgaggataagaatttccggtcttggcaacaagcaagatatgtaccgactggtgaaagttctcggtacacataaagttgcagagcgatacactgttggtaagaagacaacagattatgctcttgagatatctaatttagaaaaaaaagagattatcacaatggacacgatctcaaatcaggatttcacagaggaggaatgcaagcggttacgccagagtatgaagtttggtctaactgcccggttaaaagtgagggatgtctatgataaagctaaaatcttccaatctctgcaatttaaagattggttggaaaatgagaaacagaggctgagccgtcttcgtgatcgtgctagtgaaaccggacgccgaaaagaattgagagagtgtgtagaaaagttgcagcttctgaacactcctgaagaaacagagcgcatgattaatgaagctcctgaagtacatgttgatccccagatggatccaagttatgaatccgctgaagaacccgattataagaaagctgttgattggaccatgcatcggaacggaccagatctattatttccaggaagaaaagggacaaaattgaattctgtggagaatcatacacaaaatagtctggatgcaagcggtcacattagcagtctacctacagaggatgtggaccatagattaggtgctggaagtaacattaatttaaacaatatggcaccagagcctgcatcacttggagttttatcaaatgacactgagccagaaaaagtttggcactacaaagaccctaatggaaatgttcagggaccgtttactcttttgcagttatccaattgggcaagttttttcccacgtgacctgagaatatggcttacatttgagagtgaggagaactcactactgttgactgaagtgctcccaaagcagcagaaagattttattcagccttcaacagttactaccagtgataaatcaatatgggcaggctctggtcaagatagaattaactcaaatgcaaataactcttcctcccctagcttgtctgctgagtgctatgatccaacaaaatatctaaagcctctaggtggaacgtcaccatcaagatctctgaaagattctcatgctttgcatgaggtccagaatcaggttaacgattcatccacaattctttcttcagctggttcatatgtaccaaccagttctcatgatgaaagggtctcaagagacagggttgatgagtggaacagtagtcaggacaatggtggcatttggaatccaaccatgaatcatagtcggaagagtaatgcacagcaacatcctgacggttttacagggaaggaccaaatgctaactgaatctaaatgtagttcacatatggtctcagttcttaccccacaacaatctgagagagaccctgccacttctcttagtactacaagtcgtccggagtgcaaaaccatgtgccggcaggaaggttcttcatggagttcagctacaaatgctggagttcatgaccttcagttaactattgctttaacaaagccagagacatgttctccaacaaatcctgttgaagacagagattcgagttctgcttctgcggtgtcttgtcagtcaggggctcctgcctgcattccccaacccgatccaacatctacatgtaattcaagtaagattgaggcaaccatggatctgcataaaacatgccagcctgacacatcaaatgaatcattcggccggcttcctgaacctcaaagtggctcactcttttccttgaaaactctaaatcttgagtccgagcaccctagttctacgccaaaactggaggggaaggaaacttccatgaaccagtcaggatcaacatcagtagcacatgagaatttagctacaaagacacgtgtccgcccacctaccagtaaaattgatagcttgcaaccacttaaggaaagatcatgtccaacagaaagggactcaatcactcaattagagcatctgtttgaagagaatgtggtaaagagaaataacgaagtggtcaatcctgtatctgatgctgaagggattgctgtatcagatgtgttggaatcgttaacagaacaagattgtgaaaaatacagtacacatggagcagattgtgaaaaatacagtacacatggagcagcgcctttacaaaatttggtgccagcttcagccgaggaagaacaaccacaatgctccagtcctattgcattgtccccttggggggaaccaagttactatcagggtgaagctgttgattctgctctatggggcgtccaggatggtaatgacatgtggtcaatgccttcaccaacacctggtctccagccttcatcagaggaggcgagagcggaccatggagatggtgcatttgtcgaaacattaccaagacaaggggacgaaaagacggaacatgcaaactcaagtgtctcaggttctggagtgccagaacaggtaaaaccaaaagcaagcactgcatcaggtccatctctagatgggagcacaaaagctttgggttggcaactgctgggctcatctctagaggggagtgcaaaagcttcaggctggaaaccgccagctttatcgattgaagggattgctaatgcctcaggttcgcaagcattgtatcctacgcaagggagcacaaaatcttcaggttgtcagcgatcaagttcatccccagatgggagtagaaaagcctcaggttggcaacagtcaagtacatcaccggtggggagtggaaaagctcatggctggcaacgatcaggttcttttacccagggtggtacaaaagctgcaggctggcaaccctctggttcttctacagatcggagtgcaaaagttgatggctggcaacgaacaagttcatctccggagggaaacagaaaagcttcaggctggcattcatcaggtcgtgagagctcaaagatcacatatggtgccagtgaaaaccgtaaatcattttctagccaccaagcgacgacaccaacagggagacactctttggcaaggaggcagggaagcagcgacaagggtgctgctggttgggaagagagtctaggaaacacttgggaagcatcaaagagacaacagagaaacagcgacaagaatgcaggctgcggagaggctctcggaagcaacaggacctggcacccatcgtctggtaaccccagtcggagcagccaggggaatcaccaacatgacaggcattctcacggcagtgattcgcggcggggtagctcaaactaccctcggaggtccgaccatcgtcatgaccatggcagtggtggttcgtcaagaccctcgtcaagagggcagccccagaggggggtttgtaaatactacgagaatggccactgctggaagggctcgaaatgccagtacctgcaccgatgactgccgtgaccgtgggaagcggaacgccctcacatttttgtatagcagcatatggtctcgtcgtagtcagtaaaaggaggaactgtgtcggcgggaccactagttcgtagtagtacatatccttcagagcaggagcatgactaaagattctccgctttggtgcaggaatgcgccccttttgttcagttaaacggaggtgtgggcatttgcaaacatggattttctccataagccagggtgttgtgcaatcgtacggaataactactgaagagctgcacgtccgattgagaatgacactacggaagag

SEQ ID NO: 34483 - DNA, 2987 bp, Zea Mays
tctccattattcttcccctcttctctcttctctatctctctctctctctcctcccccgcggccgcggccgccccacgctcttcctcctcctcctcgctcgtcgacggtgacccccgcggagccgcgtggatacctcgccggggagatctgcctgccgtctctacgggcagtcagatgttggagcttaggtagtagccaacgatggaagcaatggaggccgaagaaggtccttttctggctaatgatgccaagcatcaagacccagaagcaagcctggtatacaagcattgtgttcactacatgtagctcttgataaagccaaagggcttcttcaacattgtgcagactgcagcagactctacttggccatcacttcggaaactgtgcttttaaagtttgagaagtctagaagccagcttcaggagagtctaaggcgcactgaaagcatagtaactgaagatattggctgtaagattgtggagattgttggtgagctggaggaaattgtttttacattagatagatcagagaaggaagctggtgatgagctgatcaaattgctccagagaaataataaaacaaatggttccagtgacagtggggagcttgaggtattccatatgtctgctcttaaattgggaattacatcttctagggcagcactcaccgagagaagagcccttaagaagctaattgagaaggcccgttctgatgaagacaagcggaaggagcttgttgtgtcatacttgtacaatctcatgaggaagtactcaaagttcttcagaagtgagactggtgatgatacagattctcagggatcgtctccatgctcgccaacagtattaggcatggatgatatgtatgggccgtacaacaatggtcgggcatttagtagacagctttcgagcattcagtctttcaattcaaggtttggatctttcaattctaggcttggatcattcaattgcagacgtggtggtggtccaaggtctgagaatatgtcaatccctcctgaagaacttaggtgccctatttccttacaactcatgtatgatccagtcatcatttcatccgggcagacttatgagcgtatttgcattgagaaatggttcaacgatggtcacagcacatgtcctaaaactcagcagcaacttgcccacctgtcattgactccaaactactgtgttaaggccctcattgcgagctggtgtgagcagaacgattttccagttcctgatggtccaccagggacttttgatgtaaactggagacttgctttgtctgacactgaggccgcaggctgtgtgtcagttgaaagttttgattgtgctaatgcaaagagtgtcaaggttgtcccaatggagaacgttagaaaggaggagccagcaaacagtgaatcgggaactctggatgacggctcctgtaacgatttcgatttgaacgaaggctatgggaacttgctgctcctgctccatgaaagaagtaacatgaacaagcagtgcaggttggtggagcagataaggtatcttttgaaagacgacgaggaagcaaggatccagctgggctcaaatggctttgccgaggcactggttgagttcttgaggaatgctgtgaatgatggaaatgagaaggcacaagaagttggtgcaatggctcttttcaatcttgcagtcaacaacaacagaaacaaggggctcctgttatctgctggagtcaccgatctacttgagcagatgatatcgaatccacggctatctggtcctgccacagcactctacctgaatatttcctgccttcctgacgcgaaggccgtcatcggttcgagccaggccgtgccgttcctagtcgaccgtctgtacagccaagacggcagcgacacgagaggaagctcctgcaagcacgacgccctgtacacgctgtacaacctctcgagccaccaggccagcgtgccggcgcttctagccgcgggcatcgtggacgctctccactgcctcgtcacggagtctccagggtcggaggaggggcttggctggacagagaaggctctggcggtgctcatcagcctcgcggccacccaagctggccgaaaggagatcatgtccacccctggcttggtcagcacgctggcgatgctgctggacacgggcgagtcgacggagcaggagcaggcagtgtcgtgcctcctggtgatgtgcggcgccgacgacaagtgcatcgcgccggtgctccaggaaggggtggtcccgtccctcgtctccatctcggcggccgggactgggaggggcagggagaaggcccagaagctcctgaagctgttcagggagcagaggcagcgggacacgccgccgccacagcagcagcagcagcagctgctgcagagccagctggcggagggcgggaacggtggtggtggagctatcgtgtgccaccgggaatcgaagccgctgtgcaagtccaagtccaggaagctgggcaggacgctgagctcgctgtggaagaacaggggcttctcgctgtaccagtgctaggagatgcatgctagagtagtgttttgagttgatcagtgggtctgcgtctgtacatcatcttctgccttgtttttctcaactggtcctttcttccccccttcttctctgggggtgttgttttatttgaggtaaaaaaaacttgatgttcttccccccctcctcggttgggtgatgtagggcattttcttccatctcggccatgacaggtcatttgtacagttgctgctgcttcagtctatctgatactcagtctcccccttttcagatcaggcgcttcttcccattcaattcaaaacccaacacggcttgcagcttgcaaggaactgattgttcccattcttgtcctgccttgaagaagactcattgcgcattacattgtgaggtcaaggtgtagactgtagactcacggctcttttatcagcagcctgagcatgacgcaaaaacctaaccagagccgag

SEQ ID NO: 34484 - DNA, 2555 bp, Zea Mays
cagacgcggcgaagcaaaccgaaacaaacaaacccaagtgcgcgtccgagcctcgaggcggagaagaaaccggagcgagatatttgcatttcagtccctgcgaagagaaaaccgtcgcgtcctcgccgcgccgctcgcgtcgggatcccgccgccgccctactcggtcgaccatggggacggcgacgatggcgactgcggtgggcgcggccatgctgctctacttcgtgctgagccggcggctggcgggcgaggacgtctcagcccgcggcggtggagggggaggagtcgggtctggaaagcggcggagggggcgcgcgctgcggcggccggtgcagccgccggcgacgtggatcgaggcggtgggcacgctcgcggaaacgctgcgtttcacctactcggagacgctcggcaagtggcccatcggggacctcgccttcggaatcaagtacctcatgcgccgacagggcaatttacatgttgccagtgtatatgctggaagtgattgcattgaattgaaaggacctcaaatcatggaagagctgattgttctacggcggttgattgacctgtgctttcttttctctaagaagccatttccagtgtttcgggaattagctggattttcacaggaggatgttcttattgaggaaccaaaggcgggggtgaattttgaagcctgcccatacaattatacgtgatgagtgcaccaaatccttccttgttttgatccgagggactcatagcatgaaagatactctgactgctgctactggggctgtagtgccatttcacctctcacttttggatgaaggcgatgtgagcaaattagtgttaggttatgcacactgtgggatggttgcagcagcccgctggattgcaagaggtgtaacaccatgcctccgtgaagcagtcagacaatgcccagagtaccaaatcaagattgttggccattcattgggtggtggtactgctgcattgctaacctacatccttagagaacacaaagagttttcttcaacaacttgtgttgcatttgcacctgcttcttgcatgacatgggaattagcagaatcaggcaagcattttgtgacaacggttgtcaatggagctgatctggttcccactgtatcaactgcatctattgatgatctccgttctgaggtaacagcttcatcatggttaaatgatctgagggatcaaatacaacagacacgcttcctaaatgtcgtttaccggtcagccactgctttaggaactcgcctgcagtctttttctggtgcgagagagagggttgcaggtgctggagcatttctacgtcctgtttcaaacaaaacccaggttgtgatgaaacaagcacagaatgtcgcacaggctgttgctagaagtcggtctgcattttcctcatggtcatgcatgggtgcacgtcgtcgaggtgtaggtgtagttactgcatgttctaaagatgatatgagagtggaaacccatgtaacatcaacagttgagtcaaagtctgtccttgtagaacattgtggcgccaagaccatagaagaactgcagtatactgcagctagtgtttctgttcatgatgcagcagaggaagaagaggctcttttgagtgaacatgaaacctccagggagaatgccgaagaagaaacaacagagggtgagttgtggtatgagtttgagaaggacttggatcgacaagctgaaatggaggcacgaacaagggaggaagaggcagctgcagccaaagaaataatggaagaggaaagtgctgtgctaaaaggtgtagatgacaggcagtccttcacaccagatagcttggagaggcagcaattctacccccctggtagaatcatgcacatggttgcaatgcctcccacagacgctgacccagatgatccggttgctgctgacgagtgctgtgttggaatatatgagacccctagagatctttacagcaagattcgactctcaaataccatgatcaatgaccactacatgccaatgtataagaaaatgatggaaacattgattgagaagttcgcgagggatgaggactgctattgtacaggttctactgcagaataacatggaagcatgaatgacctatgtacatcgataactgtacaatactccgtgttagctgttattagcctatctgacattgcaatatacaagaggtgatgtcctcctgacccgtgaaaaaaggattttagttagggtcatgtgagtgtgtgatgtgtaaatgtaaaagaaaccagaatcagcaatttaataccttttccagtcatatttgcttgtactttacaagcatgtgatgcttggatcttgaaatctaaatgtttacaaggcattttaaagtcaggcgcttagcaagaagagcgttttgacattgttcatacagaccaatgggcaatgactacagggaactaaaacgataagagttgcaatggcgcactggtgcttgtttagctagccatactatttgatacttgacatggctgttaagaactgaaatgtaaagtgaaagtagagaacggaagaaattgt

SEQ ID NO: 34485 - DNA, 349 bp, Zea Mays
tcaggacctttcaaggtcaatggagtcccaatccgccgtgtgaattagacttacgtcattgcaacctccatgaaggttgatatctctggtgttaatgtagagaagtttgatgacaagtactttgtaagggagaagaaggcaacgaagactgagggtgaactttttatacataggaggtgcaaccaaggacctgccacaactcaagaaggacgaccagaaggcggtggacgctgagctgatcaaagctattgaggaaggagataatgcgtataatgtgtgggatgatatattgcttgagccctcatgctgtttatataagagtacatggcttggaggacccaacaggtac

SEQ ID NO: 34486 - DNA, 1159 bp, Zea Mays
cttatccggctcatttctgctttcccttatacaggtggcggaggacacacttacctctccgagcctctatggtgggcgggaatgaccacaatgctgcttggggaggtcgcaaacttcattgcttacatatttgcgccggctgtactcgtgactccacttggggcgttaagcataatcgtaagtgttggcgcactttgtgctcaaggagcggcttgagaagctcggggtccttggctgtgtgtcgtgcatagtaggttcagttgttgttgtcatgcatgctcctgaagagcatatgcctaactctgtcaaggaaatctggaacctagctactcaaccagggtttctagcatatgtggtgacagcattgttacttgtgggagcgctagtactcttctttgaacctcgatacggtcagactaacatcctgatatatctgggtatctgctcttcaatgggatcgctaacggtcgttagcatcaaagccattggtgttgccataaagcttacgttggatggggtgaatcaggctgcttatccatacacatggctttttcttatggttgcaattgtttgtggggtttctcaaataaattacctgaacaaggcattggatacctttaatctggctattgtctctcctatatattatgtaatgtttactacccttacaatagtggcaagtggaattatgtttaaggactgggctggtcaaagcttaagtagtattgcttctgaattatgcggcctgataaccatcctttctgggacaattttgttgcacacagcagaggagggagccaacaattctgcagctttgttgccttggcctttggataaagggtctatatcatggtgtatcaacttaagcagtgacaatcttctaaagaatgtcgaagaggactacttcacagctctgcaaagttcacctgccccagtataatgaagaaactgataaatatctaaaagggaacatgcaaatcaaggatagaacttctccattgtttgttcaaggcaagcagaattatcgcctgcatgttgtattttgtataaatgttcatcctttaactaaaactcagaagtgaagattgatatatctagctgctgtgttctacgttctcgaatggtttcggtgttaaacacagaaggaagataatgcact

SEQ ID NO: 34487 - DNA, 413 bp, Zea Mays
taagagacctgccaggctgccagcgtacgctagccaagtccctgagtaggcctcctgttttcccccacggcccacgctagccaagtccaggttctgaggttcacaaatcacaaccctagttggcggcgctcagatccggtggcatcctcctcccgcgtccctgtagcggcctccgacgacgaccttgtagcggcagcgtgtggcggcaatcgtccaccggtgttcctcaggcagccggccagcggcggacgcgtccaggcatcgagatcctgttccttcgacgtccaggcatcgggcgcgtccaagtgtggtggcgcagcggcgggcgacctccttctccaacgtcgagctcttgttgtagtctaagcggggaattcacggggatttttctccgttggggcccgtatacccga

SEQ ID NO: 34488 - DNA, 3242 bp, Zea Mays
ctttgccataccgatctaacagtccattggtttgagaggaaaaatgaggaggcgaaagggcagttatggtctgaagctgaacgtcgctgaaatggatgcatccagccttgatgctttcgccaccgccgcagtatttggcgaagtcgggaaccaaggcagcgcctcagtggcgacaaccacaaagcacccccgacatcgccctggctgcacatgcatcgtgtgcatccagccgcccagcggcaagggcccgaagcacagccccgcgtgcacctgcaacgtgtgcatgacggtcaggcgccggttcaagacgctgatgatgaggaagaagcagcggcagtcggagcgcgaggaggcggaggccggcaagaagatcgcatgggtgaacagagacgagcctgaggggagcagcctgtcgagatccccgcagacgcttgacagcacccgagacaacagtgatgtgacggcgaccatgttggacaaggtgtccgacgtgaacaagcaggggcacatcgacgtcgacctcaacctccaccctgctgcccctgccgtccaggctgcgcagcagcagccccggccggtgagcatgatgggtctcttggaagtggcgggccggccgcttgacaactacatgaagcagaatggcctgacgagcctggtgggggagcaaggtggtggcagctccagcacggccacggtccctcctccggctctggtggagagtgaggagcggacgtccaacgagggcctcgtcccatcagcatcggcagagcgggaaccgaacgccatggccgtcgacgaggctggcgagaaccagcaggacaaggctgccgacgacgacgacgacgccgtcgctgccgccgctacttgacgtgattttttttcatggagctgcttctcctggaggctgggagtaacttacgtgtacgtatgaggcttgtgttggttggtgttgtaatctgacgcttaaacattggcttcaataactcatacagagtgagaacctgaaagtatcagtctagagcaagttctttttactggtgctgaaagtatcagtcttgcgcaacccaaaaggaggaaacaaaaattttagaccctccaaaattgtactcccctttggtatgtacaatctgaagtggtaacaaaaatgcactacttttttctaatagaactccgatccaagacatgcttgttttttgtttaggaaaaaaggctaggttcacctgattgtttctgatcttcttccatgtaatattttaacacatttttctttcgaacaaaatataactcagctgtttcaaaaccgtcaaaaaaaaacaacttatgattagctgctcctttttttactgctccaaggctggcctgtgagcaacattgcacccccaccacaggtcaggttcatccagcccatttattattctaaaaaaaaactctactccaaaagatgtgtccagcccagtgaagcccgaaaggaaagaagccagccgctcccgtgggcgacgacatggtcctgtgtccgtgtgaggtacacatgactacgggggccccacctccttcgttcccaatcccagatcccgcactctctttcagaacccaacacgccactgcctagctagtagctagcagagcagctagccaagcaacccagccgagtagccgaccagagagagcgagagaggcagagaggagcggacctgcccgtcgcaatggcgatgccgccgaagcccggcgacccgccgcagcgctcgcctgcgcggagccccaacctcaacctgccctgcccgctgccgccggtcccgggcgggccgcctgcgccgtcggccgccgggttgcccccgccgcgcgcgagtcaccaccgccgcgccagatctgaggtggcctttcgcttctcggacgacctggccggcggcgtgggcggcggcttcgacgagatcggctccgaggacgacctcttctccaccttcatggacatggacaagatcgccggcgccgaccgcgaccgtgccgccgagacctcctcgccgccgcgcccagccaagcaccgccacagcgcctcctttgacggcttcgggatgggggctgccgccggtggcctggccgggcagcaggacggcggcggaggcatgtttggagaggtgatggaggccaagaaggccatgtcttccgagcagcttgccgagctcgctgccatcgaccccaagcgcgccaaaagaataattgcaaacagacaatctgcagcacggtcaaaggaaagaaaatctagatatataacagaactggagcggaaggttcaaactcttcagacagaggctactactctttcagcgcagctcacactattccagagagacacaactggactttcggcagaaaatgctgagctgaagataaggttgcaggccatggagcagcaggctcaactgcgggatgctctaaacgatgcgctgaagcaagaagtggagaggctcaagatagcgacgggcgagatgccgaagtccaacgaacaattcaacatggggatgcagcacgtctcgtacagcggcccttctttcttccatctcccggagcagcacgtagacattcagctgccgcaccatttccagcagcctccgcggaacgtccagatgctgtcccaccccaactccctctcggatatggcgcagcaagactcgcttgggcggctccgggggctggacattggaaaagggtccatggctatgaagccagaggcagaggtcgtggtgaagtcagagggcagctctgtatctgcaggtgaaagcaacaccaccttctagctatacaatacatctgccttccaagaagcctccgtttggtttagagttcttttgttcatagtctgacatcctccttccttgagctgcttcgtccttctcagtaggcctattttttttattccattggttatatctactagttaacattggtcggttgccaatcgttgttgtcgtggtggctgatttctatagggacattgatgtgttggtttcgagtttgttgttgttgttgtgtgtgtggttggttgtttcgagctaggggctgaaagggcaccgagtgtttttttctccacctgttttagttttgttatagatttgacaacaatcgttatgatttctccttctggaaaggtgtacattgtgttgctatgctaatttgtagtgatatttttgatgattccaactgtaccctgctgtgcctgtgcgcgaagctgttgtttcagctgtgta

SEQ ID NO: 34489 - DNA, 292 bp, Zea Mays
gagagtcgtaggaaatggcgttcttaatgaagctttgattttttttgctttgctaatgaagcttgatgcatactctttgtgtgagagagaccaaggacaggtgatgagaactcgctctggtcaagtggggttctgatgagttgctcttaatcgaagcaacgcaagtgtgtcgtacgtcgtcttctaatttcactagctaatagtactacaatggaatacgttgtttactagagagtggaagccaaaaaaatattttatactagtgaatctagtctacattttacaatggaat

SEQ ID NO: 34490 - DNA, 2660 bp, Zea Mays
ccccactgcaaaaaattcctctcctcagttcctcagcttctcacccaccccggcccggcagccaatctgtcatccatcacgtcgcgtgccgtgcgtcaccccctcccttcgcctcgcttcaaaaatccctccgttggcgcccaagtaccaaaccctagcctcgtccgggcccgccccctctggccggccgggcggaacatgcgaatgcggccatggcgaccggggccgatctgacctccccaaccggcgccgctgcggcagcggccgccgccaggaaggaccgccacatcgtcagttggagctccgaggaggatggcgtgcttcgtgctcaaatcgctcttcatggcactgataactggacaattatagcggcacaattcaaggacaagacggccagacagtgcaggagaagatggtacaattatttgaactcagagtgcaagaaaggtgggtggtccagggaagaggatatgcttttgtgtgaggctcaaaaagttcttggaaacaagtggactgaaattgcaaaagttgtttcaggaagaacagacaatgcagtgaagaaccggttttctactctatgcaaaaggagggctaaggatgacgagctataccaagaaaatggtgtgccatgttccaacacaaatgcaaagaaggttctcactgaaacaggacgcctcacaccaggcggagctggctctttggtacatattaagcagacgagttataatttgaaggagaaccttgtaccaaatatgaaattatttgaactagagaagagcacacaagatgccaggcaacctcttgctaccatttcttcgaacaaccaagataacgtgaatacagttaaatctcaaaatcttgtcccaaccacaaaacaattgttaggtccagaacaacattgtgtgaagcgggagggtaattttctgaagaaggatgacccaaaagttgctactttattacagcaatctgactttctttgctcccttgcaacaaaaatcaaaagtgacaatacaagtaaaagcatggatgaagcatggcagcaactgcaagatcatttagtgaaaaaagagcacaacaaagtgccagaaaacagtgggtctgaaatagcttcacttttagaggagcttgatgatttaattgtagacccctatgagaggaaagatgaagatgaacagaagctaagcgagcacaatggacggaccgatgtggacaatgatcactgtaacggttcttcacaaactagcatagtagtaacgacaaatatggtcccagaggaaatgatgggagattgtccagtcgataactgcaatgaggatagtagtctttgtagaaaagtgctttctggaagtacagaaccttgcccaggtgcaaaaatgacaggatgtgggaatttgagcgaagaccaggttgctgaaggtagtgtgcttcaacgtgtagaatctatatctcctgttataacagatattgatgatttactcgtagacccgtatgagagtgaagcggaagatgaagaaaagtcaggggagcagaatggacagattgatgtgcatgctgagcagtgttttggttcttctcaaactatcatagaagtgatatcagacatggcccctgatgaagtcatggaaacttgttcagcagataaccgcgaagaacatagtagcatttgccgaaatgtgctttctggaagtatggcaccttgcccaggtgcagaaataccaacatctgaaaaaatgagtgaacttgctgaagatagcagacttcaatgtatggagtttgcatctcccgttctggcaaattttgcgagcaaggaatgtggagaaacaccagaaccacaagttcttaatgagattgttgaagatagcaggcttcaatgtattgaattcaactccccggctcacacaattctcccagataaaacaggcgccgaaaactttgcatccccaagttttgatgtggttgcaaaagatagtaagcctccgtctttggaattcacatcccctgctcatacagttgcaacattccaaccgtatgcagacggcatccctaccccaaaattcactgctagtgagaggagttttctgctgtcagttttagagctgacctcaccagggtcaaggcctgaaacttctcagcagccatcttgcaaaagggctcttcttaatagcctttgaaatgggtttgcataaaatcccaacaccaagcctgctatgcccctcagcataatttggctactcctatatgcatgaagtgtgcctaccctcaaagggtttcatagtatgttttgtttgttgtatagaatgatgcattggtgtagttgtattagcatacaggaacgaaagggtgatggtgtaagtgtttacagcttgtgttcaaaatatagaaaaagtaatattctttgtgtaattaactcttgtaattcttcccatgggtgcgagttattagattgttgcgtagtgtgatgtaatggctttcctttgttgagcttttggtatggaagaaccgactgcaggctatggctgtatgctttattgatttgtatggttggaacttggaaacatgatattcggttgatagactgcgttctctgcagctgatccggcactaagtttggtgtccattttcagaataaaattcatgtatttcccaggcctccagaatcc

SEQ ID NO: 34491 - DNA, 1075 bp, Zea Mays
ctcacacaagcctccacggcccacacgcgaacgcggttcatacaaatcaacgctatgcacgccacacacacccgcgtccaggtatcggccatgagtccatgacacactcctgctcgcggtgggggtgctcatcccggcgctgttcctgctcgtgccctcgcgccaggaggggtacatctcagacgaccacgacgtgttcgctgctgaaatcaaagttggtttcactttggaaaagccagtgtcattccttacttctcacatagacaaactagggaatgccatatttgaagagattggtgtacctaatagcaaggtatcatcgtttcaatgcacccattagcttttaaatactccacacatgttgtttttggtgttcttccttatccaaaagatgcttcaataagtttgccagctctaagtgtgttgagatcatccttaatagagatgattctccagcaagtgaacctatccttgacaccactttttgggcatccatgttgtttcgagctgttgagatttcctggaggagttacagtcattcctgcagtgtctggttttacatgggcaaacacagaccccctattcgactttgtgttgaacaactccattttatcagattttgggtaatcttacagagctcaaggatcagctgaaacttggattgaacttaaggtcatatgagaaaatatatttgcaattcaggaattgtcatggaccttcggtccatggggatagttgtcttctccggcgaggttatacccctctgccgtaggcttggttctagggtagcagccctaggcgcttgagagggtcattgcaagagagagagattggtttgataatgatcttgcttgatttattctctgctgccatgcggcttataaatagccctatagctaaccaacttctacaaactctcaactaactcctactttcttggacttatctgctgctaactctccacaattctctcatctcaatcttattctctagccttatcccagctcatctcaatcttattctctagccttatcccagtctggttgttgcctctcgctctctatgatgcccatga

SEQ ID NO: 34492 - DNA, 1983 bp, Zea Mays
ctcacgatgacgtcactgttttatctagatttttcttttctctacaaattagaagaaagccgtccatccaatcccaactgaactcagtagaaatggagttcttcacagagtacggagaggcaagccagtaccagatccaagaagtcattggtaaagggagctacggagtagttgctgcagctgtggacacccgcaccggtgagcgggttgctatcaagaagatcaatgatgtgtttgagcacgtctcggatgccacacgcatactgcgggagatcaagctcctccggttgcttcgtcacccagacatagtcgagattaagcacatcatgctccctccttctcggagggagttccaagacatctatgttgtttttgagctcatggagtcggatctccatcaagtgatcagggcgaatgatgacctcacccctgaacatcaccagtttttcctgtaccaacttcttcgagctctcaagtacatacatgccgctaatgtattccatcgtgatctaaagcccaagaatatactggctaactcggactgcaaactgaaaatatgtgactttggacttgcccgtgcatcattcaatgatgccccttcagctatattttggacagactatgtggcaacaaggtggtaccgggcacctgaactatgtggttcctttttctccaaatacactcctgcaattgatatttggagcattgggtgcatatttgctgaacttctcactggaaggccactatttcctgggaagaatgttgtacaccaattagatattataacagatcttcttgggactccatcatctgagaccttatcccggattcgaaatgagaaggccaggagatatttgagctgcatgcggaaaaaatatcccgtgccctttactcataaatttcgacatgctgatcctttggctcttcgtcttctagagcgtttgcttgcatttgatcctaaagaccggcctagtgcagaagaggctctagctgatccatactttgcatcccttgctaatgtggaacgtgagccatcaagacacccgatttctaaacttgagtttgaatttgaaagaaagaagctggccaaagatgatgttagagaactgatctatcgagagattttggagtatcatccacagatgctggaggagtacatgaaaggcggagaacagattagcttcctctatccaagcggagtcgaccgcttcaaactgcagttcgctcatcttgaggagcattacagcaaaggagaaagaggttccccactgcaaagaaagcatgcttccttaccaagggaaagagtggttgtatccaaggatggcaatactgaacaacaaattaatgaccaggagagaagcgcagattctgttgcccgcactaccgtgagccctccaaggtcagaggatgctgacatggatgatgtgaaacccacaagcttaagctctcggagctacctgaagagtgcaagcataagcgcttccaagtgcgtcgttgtcagaaataaacacccagagccagaggatgatggaatacctgaggagatggaaggcaccgtcgatggattgtctgaaaaggtctccaggatgcactcctaaggcaggactgtccatggcgacagcaatctcgacacaagatttctgtctggtgcactgtaatgccgacgacacactgtttggatcttgtgtacacccacagctagttcaactaagatgtagcactagttcgtccatggaggaagcagaatggacgatgaagtgtggtcagcctgtcgaccatgaggtgttttcttccaatggagtctagggtatgtttgagttctacaacggcttgtgccgtacgaagtgtcagcagtgtacgaggaggaggatatcgttgtcagtacacattttgcctgtctagaaaattatgagtactttctccgatcacaagtacatgtacatccatgtttgtcttaagataaaaaaagaaaattcacaaata

SEQ ID NO: 34493 - DNA, 421 bp, Zea Mays
atcctttctatcctcgtcgtgcccagcttctcttccctcttttcccctcactgatgaaccctagccgccgtctccatgccggatcccgcacccgagcctgccctcgccggcgccggcgctgctggacacgagtcttcagggtctatgtcaatggtgttggatccaagcggagtagcttgaacggtccgtgcttgctaaccagtgttgtgatccatccatatgggctcatccttcagaatgaaccaacaatgaagaagagtaaatgagtgcttttcaatcgtagcatatcgagaagccgctaaagatgtttgcatattaaagaaaaatacatgagccattgcgacatgtatatgtgacaatgaaaagaatggcatttgcaattcaatgtacaacaaagtaccttgtcaacatcggaaacccc

SEQ ID NO: 34494 - DNA, 3178 bp, Zea Mays
actcgacttcccccacctccctcgtcagctgcagtgtcaatccctcctctccgccgcctacagctgcggggagctcgccagtcgccacttcgccagtcgccacttcgccagaatgttccatcagtaccaggcagcgggtcgcgcgctgccagtccccgctgatgagcaccccaagatctaccgcatggagcttgcgctaccaacgaggtactatctgaggaagctcaagtctcaagaaggtttaagagcaacggtcagattctcgccatagacgagatctttgagtgtaaccctacaacaatcaagagctgtggcatctggctgtgttaccagtgcaggacaggttaccacgacctgcacaaggagtaccgtaataccaccctgaatggtgccatggagcagatgtacaatgagacggcttcctgtcatcgtgtggtcaccctacatacagatcatcaagacggcaacaatcaactttaagctttgcaagagggacaacgccaagcagttccacaattcaaagttcaagtttcctttggtttactgcaacaagtcaggccaccaaataggaagctgaagaccaccttcaaggctttaaggcccaacttgttcgtgttatccaacttgccctgacaccctcccaaatctgtgaggctgtcagtctggtggtttgctagttcagggtaatgcaatctacatgcaacctattgtttctaagttctagttggaggtccatgaaagggttcttagtgtgatggcaaaggcttccgagtagcaccctagtgacccgggtctggtgggttgctagttcagggtaactcaatctacatgcaacctattgtttctaagttctagttggaggtccacaaaagggctcttagtgtgatggccaaggcttccgagtagcaccctagtgacctgggttatgactcccagtgggagtggatttatgtggactgggtaaaaatatccctttgtctaaccatacgtcaaagcacgatttaaggcctgtcccatgctcacataggcaatgtggtcgtcgtgtaagggtgtgggaaagtaggtttaagggttcccttaggcaatgcttgggggcctatcccatcctcatttctttttgttctttaccgtctggtgccttataaattataatagcatgtacaaatctcatgtgctttaaacttacccaaaaaagagcagacctgttactggagggatctggacggggtataaacggaggcaatggtgacttagtgagacagctctcaccactgcattatgcctgctttaaaattcactcaaatgtcaaaactggtgtttgcttatggctatgttgctgcggtcttccttgtgccaagtcagttgcaacatgatctggtcaaatttgctttttgttctgtacccctaattgctttttaatttgcaatgctctttaagattttctagtttggtgtgtttaaattgtgatgttttacatttatcaaaaactgtttcattacattgtagggcaactttgccaaggttaccaactataaatttggtttcctttttttccctgttgccaataccactgttgccactggatgtttgaactttccagtccatgagctcttttatttggtttcatggataatcatccttgccaacattctttactaaaagaacattctacttccaaagctgtacaaaacttctagtggttgtgatctatttgtttttttcattagtgacatggtgtaatctatttgtttttttcattagtgacatggttgtgagttttgccttgtattttgaatccatgtgtgtatttagtctctttgagcatgtagtgtgaatgtgagttaatttatagtattctaatttggtttctgattaccgttgtaatttttcaggcaactttgccaaggttaccaactacaattttggtttcctttttttccctgttgccaataccactgttgccacaggatgtttttacttttcagtccgggagctattttatttggtttcatggataagcatccttgccagcattgtttacaaaaagaacattctactaccaaagctgcacaaaattagtggtttgagttctcgtgtactcttgaattgggtactatgtttgcttttttcattagtgacatggttgtgagtttttgccttattttgaatctaagtgtgttgctatttagcccctttgagcatgtagtgtgaatgtaaattaatttgtagtattctaatttggtttctgattaccattataatcttttcaggcaactttgccaaggttaccaactataaatttggtatcctttttttccctgttgccaataccactgttgctactggatgtttgaactttccatgagctattttattggtttcatgtgtaagcatccttgccaacattgttcagtaaaggaacattgtacttccaaatctgcacaaacttgtaactgtaatggtttgaattctcatgtacttttccatgcagcaccaacatcagtttctttttgcgtggcattgtgtaatctatttgttttttcattagtgacattttgaattcaaacgtgttgctattttacccctttgagaatgcagtgtgaacgtaaattaattttagtattctaatttagtttctgattaccattcactttggttaactttgtcaagcttacctatttactttggttaactttttcccctgttctgttgcctatatcatccattgcttgattttcgtatttaatgcaccgtcttttattataggcattctggcaactattccactaactttttttgctcggatttgtagtagaggttttcatgttgtctagttaaagtaatttcccctgaaaattcgctacattagtatacattcggtattcagttgttttcactgatttttgctgggatctgtggtagatgttttcgtttttctttcttttccctgaaaattcacaaggtcacgatcgattcgttattgccgctttcttaggattgttgtctttgctattgtcaggaatgtatttttctttctaggaagtttaccgatcgttgttatggtgctctgtttttagattccatggccaaaaataataaatgtgataaagttaattgtcatgctggatttgaatctctctctttgatggtattggttgtgatggtatttgttgtggca

SEQ ID NO: 34495 - DNA, 3525 bp, Zea Mays
cattaattttggaacaggtacgaatgtacaacgatggaagctgcgcggtgctgcacctacacaagcgcaaacaagccccaaccagaatccaattcggtgacgatacgcctctattggctacctctgtcaggcaggaagcactgcaggatgtgatacccctgctgcatgctagtcttcgctttgactgtattattcggcgtccagccccctaccagcagctcccccatctccgctattgctcggtaataattctggctgcgatggcacccatattcctgtgaaacaggacattgatgaaccgcttcctactcctactgtcctacatagacactaggaaaagcccactgagcggcagtaaagtatggcaatgtacaacgtgcaataatagaacatgtggtgtttgttaggaaagacctaatttcacggcagttggcagtgtggaaggactatctcgtggtgatgccaacatgcaagtacccaatcaggcttccacaagagaagtatttgtgtgcttgctgttgcggctaagtttactgggtgtagaaaaaaataatattaggcggtgaaagcctggtggagaactgttttcagtcgtggccacatgtgcgcacgacattcatggtgaaaactatttactctagcaaagggctgctgagcaacagtggaatatcagatcgaagacgaacaggggagcagcagctctcaccgctggtaacaagaaatcatatgctctattattggtactttatatgtactgtggcatgctctttgggaataggtctgtattcgggacaagtacaggtgcgtcgtaccttatttcatctttttttcctttctttatttgctactggcgctgcagtatgatgttctctttgaagatagcaaattgcgttcatctcttcatgagtactctgtctctttgaacagcccaatcatttgtctctgccccacccattcattttcaggaattatgctaactcattaagcgatattggccttgtaccaaatgatttatgcactgcatcggagtgttttttttttgcttctccatatcctgcttagtctttgcttcagagaaaagggacaagcaccagcatcgcttgagcctttcttggccgaaatttgcttctccgggatcctggtgattcttacatcgtcatgctatagaacaggatatgaagtagtgagttatgacgataatatttgccaatccatcacttgtggttccccaggatcaaatttcgatggtttggggtggggacagtacgctctgttaagttttgagcaatcccctatcctggaggcttggccccaggaaaaggaatacaaccagctagccttttggttttcggatggctggatcttagtccctaagctgcttcggttattcccctggtgatttgaatgccacactttcttagctgttgtcctctttcttgttctgtggatctgattctacggtctctgaattctcacattttcgttttgtaggggtgtgtgtgcaagtcagcaattacctaactttgtttaggcattgtacgtttgcactcgcaaatatgagaagaagaaaaaagagagatattagagttcttattggtgaccaatcactatatccacttgaacttgcattcagtatctgtgcaattatgctgaattgtggaatccatttcaagtaaatccttgaagagatctttatagtccttcagcaactaaatacagtaagtaaattgcttactttctcaaactttaggctcatgagttgggttggtaaggaaatctggaggacagaacttcagtagaggcaatgttttagagggtttagacttagatgggtccggttcgttgtctaataattaaccttattctgggctggcccatacatgcactggatagcattagcatctgatccttgggttggtcgctagggtcttcagtttccagcagccactgcaatcgatcttcactcagaacactctttattctgacctctggatgtgatccagctggtgcatggttgttagtagtagtaccagtaccagcaattctattccaggactcggtttccgcttttgcccttggcgtttgtctattgcgttgcgccaggcttacttagccttttcactttgggcaatctttatgtaaggctgcaccggttagttgttccttgttgagtcttgcaaggaattgactgtgcccagctctcgatctactccaccctttaagtaaggcaacttcagttggcagacctggcaatgacaagctagaagattaccaggcattccccctcccccaaaatgattgcaacgacatcgcactgagtccaagtatcagagtaggatgatgtattcccctccgcgcaccgatcccgacagagaggaagagcagtgcttctcaatcggaagcatgcaagagggggttcagctctacagttctactggagatgctcaactaaatagaaatatgaacacaggcaagtgtttagaggatggcaaaaggaagggttctggagaggacagttcatcactacgttctctaggtgaaaccagtgcattgcagcgagaagtcagcatggagtgtgctgatgagaaggcgggtgatgctagagccaagagagaggactacgtgcatgtccgggcaaagcgcggccaagccaccaacagccacagccttgcagaaagatttcgaagggaaaagataaatgaaaggatgaagcttcttcaagaccttgtcccaggttgcaacaagattacaggcaaggccatgatgcttgatgagatcataaactatgtgcaatctctgcagcgacagattgagttcctttcgatgaagctctcagcgatcggccctgggctcaactgtgacctcgacctacaagatatcctctgcacacaagatgctagctctgcttttccaggatacaacctgcaaacgagcaatgtgcatattaatctgtacagagcatctgaagaaggtttctcacacaggaacaggatcatccctagtccagcaaatgttcacgtgacaagaaacgcccagctatctgcatttcctcagagaggagttatctggaacgaggagctttgcagcatcgcttcagatagaaatgctgattcaatgaaagtggagtgacattgtggcaactgacaagccggcagtttaatggtgatcaactctgaaagtcttgacaagttgggttgctactgaggtgccttttcaagttgcagtggtagcacgacttctcttgggatgagctagttaacttttggtatttgagaggaattctggtgtgtccacccatcctgtacagttattagaataactaatcaaaggagtactgtgaaattcttgcgatctggtggagaaaatagtggacaattttcgtctggaatttctgacacaactgagttagtgctttggtggggtgtggctccacctaattatttagttgtaatagctggcagagctctatgactataactgcttgagattcgtgacaacgaatttaaattggccaaataaaaaatc

SEQ ID NO: 34496 - DNA, 325 bp, Zea Mays
attcgatatggagatgcatggatcggagccgatcacgcacgcaaaggagaagggagcgagatcgacgagcgaatccgccgtgtgcgcacttcgaggcggcgtacgtacgttccttgctcgctgcgacctgcatgcgcgcgatgcgtgctcgatcttaattctccctcccgtttactaccagctacagctagcgtgcagcatgagcgctctccctggcgtccggccgagcgccggctcggcgtcggggcagtcgctgtcgtctcgtccgtcgtcctcccaggcgccccacgcgcgacaccgcgccgagctgccgcccaatccgggc

SEQ ID NO: 34497 - DNA, 2779 bp, Zea Mays
ctgaaatgaaaatgaactatatatgttagtgtcaatacaatgtttacagctcccatttctgagtcgtaattcaacatgcaggagtagtgaaagatttgaaacttaccagtataccgacaatatgatcaattttgaccaagagactaccaacattgtggtattaataattgtcactatactagatatgaacaaatttacaacaataatatgcaatatccatacaccataacaaaagaatatgacaaaactaaattgctgcaaatatttccaacttctctgagaaactgatgaaactatttgatgccaagatgccaacttgccttcagatcataggaagggcttctacagttcagatcataggaatggcttctactgacattgccgagagctcagttgacacttgacacagtgcgtcgggtgtacataaagacagccaatgaccacatggtgaagccggagcaccaggacgaggcggtgattcgactgtggctgccgagcaaggtggtggtaatggacacttgaccacagccctttctcctccacgccggagcgagctgatcctcaagtcattgtgatctgtaagcgatggtgtatcgtagtcccgttggaggttccacctgttctgttctttcagtggtgctatatgtaagccaatcaagttatcattcatctatcaatataaaaaaaaggaggaaaaaccatgaggtgagaaggctaaatatataccactctcagtcacacacaaggaaagaaaggaggaaaactagctggtccacacactatatcccgatcatctaccatattaggcaactctgcatgccagaaatgcaggctcctccagtcctgagaccctctatttacaataggaatcaccggaagccttgtcggtttgacataatttggattgtccacgaaaatgcagctcccctgcctcatgcccatcaaatcgttaaacttgttagatcggtaggcagagagaggccagactgatgggaatggcagcgaaggagcactttgtgcttgttcatggtgaagggcatggagcctggtgctggttcaagctccgctggctccttgagggtgctggctaccatgttacatgcattgacctagccggaggcggcgtcgatcctactgaccccaacacaatccggtcgttccagcagtacgacaagccactcatagacctcatttcaaccttgccggagggggagaaggtgattctaatcggacatggtgctggagggctgagtgtgattcatgcaatgcacgaatttgttgacagaatcagccaagcattttttgtggcagctacaatgctaccatttggatttcaagctgatgaagataagaaagatgtaatgttttgaagagtttgtttgtcctctttataaagcatagatctcctggcaaatgataaaaaaaatataagccatagactacacatcaaacaaacatatacatacagtgcaaacattaaggtttttattatagaaaaggaaatgtaataactcatatgagcatgggtccacctagttgcagtagctactaaaatgtgtttgatcaaaagtagggtaatacggtggataatgtcaactaggaacctagttacctaaaagactgactcactgttagcatagtcaaatgcatagtagacaagaaagagaaagttgacggaattttagaagaactctgaaacgactatatgaacttaccttaggtcgtggtgaattcactgcaactaatcttctgttacaatacaatgtatgattattacatacttcttatattaacatgtaacaggggttaccaactttgcctgagaacgagattgagttgacacttggtgcgggagcagatgatcctccaacaaccatttccttgaggccagaattccagcgtgatcgactatcacaacaaagccctgaagagctatcagtacagcaagcttcgaaggagatgatgaaagattgaaccgaatcaaacgaattttcataaagatgcagcgtgaccacatgctggatcctcaacagcaagattccatgatcaagaagtggccacccagcgaggttttggccatagatacagatcacagtcccttcttctctgcaccagaacagctgtttaatttaatagtcaaatctctatgatgcataaatgcagaaagctacagactggggttgcccggattcttgtaacactacccacaaacaataatcaccacaagatttacgacctcagatttgtcaaacatgcttctcagtgattcttcaagtcatatctgcaaatgtggtttaatgatgcaagactgcaagtaaaacatcgcttagcgcaaacacttaccttcagttttttgaacaattcactaaagtcagagccttataatttccattccaaaagttcttacatgtctggataaaaatatgtaaaatatagatgctactttggaagcacttttaactgcaccggtgatggataagaatatgtagttttggccactcgttgttaatctaactgatacgtttaaagagttattatttttctcttttgagtaattcaagagttcttgttttcatcaaatataaaggaagcaaacttctgacaccctaaaagttctcagataatgaacaatagaattttcacttcaaatagtttcataatatacaatcgcctcatgacgtgtaaaggatcatacaccgtttatacgtgacaaagaaattattacttcatttgtataaggatattgttggaatgcaattcggtaagggcatggcagagg

SEQ ID NO: 34498 - DNA, 479 bp, Zea Mays
aaagcataaaatgttatagaaagttgcataaatatctatatcattcatcataatttaatgaaaaaattatagtataagctcaaccaagagtcacatgcataaacaaaggattggaggaggtcgtcgacggaggacaccgtcgagaccactggatcgaagtagttggtcaccgaatgacacccaaaccgtcatacagatcaccgaccctcgcaacccgcgcctcgcgcgactgccggcgccagcggagcctcgcatggccaccgctaccgaagacggtggtgcctcgcgcgatcgtcggagggggccatcattgtcgtgcgcgcgtgcggagccaccgtcgcacgagcctctggccgctcgcacctccctgggccgtggctgtcgctcgctccaccgggccaccgtcgtcgctgcgcgcgccttcggagccgctatcgccgctcatgcgtcaaggaaccgccaccgtcgctcatgtgtca

SEQ ID NO: 34499 - DNA, 2394 bp, Zea Mays
aaattatgaacatgcattttgtcatcccacccccagcagccagcacctaccttgcacgacttcttctttccggtaccttctccccttcctctccctccctagtccctagtcggcagtcccccgaccccgacctcgctaagcaaactcccagagcgatcgccgcagaagatcccgcatgcatgccccggcgccgccctcctccgtcgatctgccgttgtcggcgccgccgccgccggtgaaggcgccgtccccgcggcctccgccgccggcctcgctgcagcccgagtccccgggcgtctttttctccgccaccgcacccctgggcacctcccaccgccgcatcgccatcgccgtcgacctatccgacgagtccgccttcgccgtgcgctgggccgtcgccaactacctacgctccggggacgccgtcatcctgctccacgtgcgccccacctccgtgctctacggcgccgactggggcgccgtcgacgtctctctccccatccctagcgcctactccgaggatggctttggcggcggcgacgccgattccgaggccgccgctgcgcgcaggatggaggacgactacgacgccttcacggcctccaaggccgacgacatcgccaggccgctcaaggaggcgggcatcccctacaagatccacatcgtcagggaccacgacatgaaagagcgcctctgcctcgaggtcgagcgcctctcgctcagcgccgtcatcatggggagcaagggcttcggctccacgcggaggaccagcaaggggaggctcggcagcgtcagcgactactgcgtgcatcactgtatctgccccgttgtggtagtgcgcttccctgatgagtgatgacggctctgccgagtgtggggaggcaggtggtttgcccgccgcggttggtgctgaggatgtgctgcaccccgtgccggaggaggaggaggccgagtatcatgattcatgacgccgctgaggagcacaaggatacctgacctcgttgatgtattgtgaagtcctcttggattcaggttagcatagaactaaaatgtcctatttgggctgtattgttgttgtatgatatgcatcagttatggaactatttctgtaactgttcggtctttggttaagactgctttcaacggctcccgccggcctcctcctccccttgccctgtagttgtttagggggggggggggggctcttggtccacaatggtaagtcctacacgctatgacgctacaccctcctctaccagccttcagcctgcaggacgggagcacacgccagagcacgctggatgtagcgcaacagcagctgcccccctgccctcgggttgtgtgcgtggctgtgttttttagttggaaaaatttgataatagatggtgaataggtatggaaaatgacattttatgattatagttgtgtataggggaagaatttagagagaaccgttgtagagggtggagatataggggaagagagatagctgacgtggcgggatagtggggtatagggggagaaatttagaggagacgattgaagacagtctaaggctatccgcagcggttccctctaaaattctccccctatatcacttttttacgtcatatcatcaacattttatcccctacttcttcttctcctgcagcggttccccctaaattattcccctatacctcactacaaccataaaatatcattttttatacatacttttcatctattattaattttttctactaataattggaagtgggcccacgtcaacaatgcttggagggcagccgcacgcacgccagaacgagggggaaagagaagcggacctccacgtaggagccctgctaggggcagcgctgcagcgaattttggctcctgtagccggcatacaggggaggggccgggcggcggtaagggttgcgtacaccctaaggcatcaaactgtctccagagaatgtaaaggttgtagcattcgacagttggctgggtgctaggtgggatttctacccgagtgcatgtgaagtttgctgaacttccattacccgtgcccatgtatctgtgatttcgctttgtttgtagcttctgttacctttgttcatgtagcttgtctgacttccactgcctggtgaatatctttgtctgaacatttgtacttactttgcgttgcactgtgtttctgatgaaagttataggttaaccacttctatagaaccaactaatcaagggtgcaaattcctcctagtttatttttttgaattattttagtttcaagtaactggtagatgaggaaagtttcgctgttttttttggtgcaagactatctctagcagatcccctatccaatcctctatctcatcctatattttaaacttcactttataaacagtgccaaac

SEQ ID NO: 34500 - DNA, 1460 bp, Zea Mays
gtggctaactctggcagtggaactgtcatgggcaatatcttcgaaacctacttatatgtttgctaaattgaaattaattaatagcaacaatttgatagctgggctgtcggcccaacctgacctaaattcctaagctaataagcccagtatgacaatcccagcccgtcccgcggcatcccaaaggtccaaatcattctccgaggagctgcggcgctgcggcgacggcggcagcgacggcgatgcggttgccatctgccgcctcggcgtcccgccttccctcttcccttttcttacaaccccgcgcaaggacaagatgcgtcccatcctcctccctcgcctgtcgggcatcttcttcatcagccgcgggcgctggtgacggcggctcgcggaagccgtggctcttcgtagggctgggtaaccccggaaaggtgtaccagggaactcgccacaacgttggattcgagatgatcgatgttatagcagaagctgagggtatatctctgagcagtatgcagttcaaggcaatggttggaaaaggccgcattggtgatgcatctattatgcttgccaagccacaaacctttatgaatgcaagcggtcgggcagctggtttcatatttcaagataccacttagtcaagtcgttgtgatgtatgatgatctggatttaccctttgcaaaactgcgtctgctgccaaagggtggccatggtgggcataatgggatgagaagcatcgtcaaccatttgaaacagagccgtgattttccacgcctaagaattggcattggacgaccgcccgggaagatggatcctgccaatttcgttctccggccttttaacaagaaagagcagcaagagcttgattttgcgttgcataggggcttggaggcggtgcggataatggtgccggaaggattcaacaagagcgcgacttacgtgaacactgcacaatcatctgaaatgctgaataggtgatgggccaataaactgccatatgcgatttaaatcccataccaaagggatttaatcgaggaagcagtcgcagcttcgcttgatgcatcgtttgttcggtggccatcccccctctcctggcaagaaagttctgacagctgaattacttgttagatcatactgtatgatctgagcaacttagggggtgtttggtttgagaaatcattccatctaagatgagatggtgcatcacgaatcaattcctcaaatttggtggaatgacctcattcctcatgttattactaactaattaactataaagaatgaggtggtgattgatcaactcattccattatacaaactaaacaaaaaagtgaggaataagtgatggtggactagtttattcctcaaaacaaacatcctattaaatactgacaccattctacgcaccccacaccttaaaaatccggcacgctgcttagtgccttagtttcagcttccacgtactt

SEQ ID NO: 34501 - DNA, 1129 bp, Zea Mays
gcgtctcctctcctctcctctccttccccggcaccgtgctctgttgtgctgtttggttccgtcgcgtcgcgtcccgtgctcagatcagatctctcctctcccccgaccccgagtggagtgcctccctccccccctcccgctccagactagcggagagagatctcggcaccgccgttcgtcgccatggcggcggccaacgctcccatcgccatgcgcgaggcgctcacgctcaccagcctgggcatcgcgccgcagttcgtcaccttcacccacgtcaccatggagtcggagaagtacatctgcgtccgcgagacctccccgcaaaacagtgtcgtcatcatcgacatggccatgcccatgcagccgctccgacggcccatcaccgccgactccgccctcatgaaccccaacaccaggatcctcgccctgaaagcccaaatacctggaacaacacaggatcaccttcaaatatttaacattgaggctaagactaagatcaagtctcaccagatgccggagcaggtcgtattctggaaatggatcactcccaaactgttgggtttggtgacacaaacatcagtttaccactggtcgattgaaggtgattctgagcccaccaagatgtttgataggacggctaatctggcaaacaatcagatcatcaactatcgatgtgacccagcggagaagtggcttgtacttattggaattgcacctggagccccagagaggccacaactggtgaagggaaatatgcaacttttctctgttgatcaacaacgtagccaggcacttgaagcccatgcagcgtcttttgcaacatttaagggaaacctggtttttctaagaaacaagccgacctcttcttccccccagatttccaggatgattttcctgtagctatgcaggtttcacaaaagtatgggcttatctatgtaattactaagcttggccttttgtttgtatatgacttggaaactgctgcggcagtttacagaaatagaatcagtccagaccctatattcttgacggcagaatcttcctctactggtggattttatgccatcaacagaagggggcaggttttacatgccacagttaatgatgcaactgttgtaccttttgtcag

SEQ ID NO: 34502 - DNA, 2943 bp, Zea Mays
tccagtccaaccgacccggcatcgtctcgcgagccgcgactcgtctcgtcatttccatcgaacgcccagatcccacattcccacctagctctgcgcgatccatcccggccgccacgccaaggaggccctcgcctgacctcggatcaaagcctcctccatccgccttcatcccggccggtggttcgggccgtcacgggaggggtccatcactggttactcggtggagagctcggggctcggctcccatctcacgattctcaccccacacgcgcaccgggtcacctcgattcggcagcctcgcggtgagttgagttcttcgcttgtcgggccagtccgcctctcgcttggcgcggttatggattcgcgggtggcgtggcgtcgtccgcgatcgctctagctcgcattgagcgattcgcgagttgcgactccttgttttgtttgctctctgtttttttttatgtcgatggtgatatgtggcggcgggattctgagctcggttgcttctaaccttccgcggagtggtttagctaatcggttttgaagctgttgatatggatgtgccgtgtgcgtgacgaatcgaatgggccgcagcaggattcctacgcagctcggcagcagggggaattggatcctgcgaccatgcgaatttggaaccctggagcagtggagtgctaggaggtctcggtgtcgtcatttttttctaggggcgtaggagtcgacttggttggaatctagttagtcataatttctctttctgatttcattggtctgtccatgcgtctgttttcgtcaaacaagaagtttgttattgccaagcatcccgctatggaggaagctgcctgccgtattgtgttacgcgaatccggtgagctgggctctgcgcgttcctcttgacgccctttgcgcgaacgacgagctttcttccagctcggttgcccctgaacaaccaacgccaaaagcagctccagaattttcctgatgtcgtctctatatttttgccttctaagtcatgcttaatggcagagtccttgttgcgtgggtcactgcctcactgggttctgaggcaaggaaaagaaggcttcagtagtcaggtctgggtcaagccatgatggagagatcgctgctggaggtgctggccacggcggcgcaaggagggaccgaggggacgtcagtgctgagcatgctcaagtacgccgtgctgcccatcgccaaggtgttcactgtctgcttcatggggttccttatggcctccaagtacgtcaacattctccagcccaacggccgcaagcttctcaatgggcttgtgttttcccttctgcttccatgccttatattttcccaattgggtagagcaatcactatcgagaagatgatacaatggtggtatattccagtaaatattgttgttggcgcagtatcgggctctttgattggatttgttgtggcatctatcatcagacctccatatccatacttcaagttcactgttatccatataggaataggaaatattggaaatatacctctggtcctcattgcagcgttatgtcgtgatccttctaacccatttggcgactctgataaatgcaatcaagatgggaatgcatatatctcatttggccaatggacctttgatggttctgaagaggatggaatcccaatcaaggcatctggagagaatacagtgccccaagtaggaaaatatcctatgaacactaacagtagtactgtaccagagaatgaacctttgttatctgctggggaagttcaaaaggagcgtgccacttctgtaggaacaaagataatgggctatgttaaatgtgtggttaagtttctgaaagacaagcagcttctccagccaccaattattgcatctgcttttgcaattgcaatcggtgttatcccattcttgaagaattttgtacttacggatgatgctcctctgttctttttcacagacagctgcctcattcttggagaagctatgatcccatgcattttacttgctgttgggggcaatcttgtcgatggccctggtgaaggaagtaagaggcttggcgtgcgtaccactgttgctataatttttgcacggttggtcttggtccctcttgctggggttggcattaccatgttagttgataaacttggtttcattcccgaaggtgatagaatgttcaagtttgtcctgctactgcagcattctatgcccacatcagtgttgtcaggtgctgttgcaaatctgagaggttgtggaaaagaatcagctgcaattttgttctgggttcacatttttgctgtgttctccatggcgggatggattatattctatctgagtttgctcttctaaatgccttactgcgcaggaatatctttgagatcaaatatggtccaaaatgttgaggaagaaaccagtatcatgaactgtacagatatatcgttgcagaggtacaagtgtatctgtacagatatatggatacggtccctcctataatcccatattaccgtggtctcctgctgctacaagccgtgagcgatgggaacactttccctttccctccacgtatcaacaggttcacacccaaccctagattgggatgctggccttcttagttctccataatattatttcatttgtacttcctgtatattgtaaaccttgagatggctgtgttcaaatagtttcttattgggcgagggctgaagtagtagtatagatgtattatactacctatttgagtgttcggttatgccgcaaatgatgctttattatgcagaacttgtgcccgctgctggcccgtcggtcgtactaactaaaattgccaatcgcggagacttgcatgttgcaagctcaggccggcgcccagcggtttgcagcaaatttttttttttgactcggctatctccaatagaatactcaactcaatatttatatttaaactctac

SEQ ID NO: 34503 - DNA, 3921 bp, Zea Mays
ttcccctaaaaatctccagccgtctgtcttgctgctcgttcctgcagctcagacgtcgcctcccttctaccccttgctcctcagccaggcttgttagccgagcccctccaactagcgtgctagacctttgacgccgtttccccgtcgtccaagctccaccatgcccacacgtccgtcctgctcctccatgcacacgcccatgcatccttatctccctggaaacttcactcgtgtacggctccctggtgataatattcagcgatgcttcgccagggcaccgttcccctgcgcgctcgctggacgccgtcgcacatgctccctgctcggcctccccggcgtgctgctccctcgccttggtgcccctgcgagctccttctctctggcccggtttccagctcgggcctcgctagatgccgatgccgcttttctgacctcgtctcgatactcaatcgctgcagcacgccatgccgtgtgtgctgcactgtcatcattcgctatcctcatttttgctaatttttctcgtcgtttctcgtctacaaccttgtcagctcctgcgtgtcgtgcgcgtcttgtgttcgggtcgagccccaggattttgaggaaaaggaagctccagtgcattggccggtgaaatgaataaaatggattttgaagaaaaggaagctccaatgcatcagccggtgaaatgaataaaatggtggtaattatggtccttgtgaaatctgagatcaacttagtcgcgtgacacaccaagataacacgtgttatgtgctctccatcaacaagtgaagctcaccgaagaaggatcattaactctaccggtgtctactgctcagaacagggtctcgctgccgcagaacgttgtcgcagaccgcttcaccgtcgaccctttgaactgcgtcatccccggttaatctcgcgcgcgtaccgacagcttcgaagaacacctagatgaggtggtacttgaagaagtctactccagtgcctgctcatcaagtggatggagctatctaactaaaggttaggtataaggatctagaatctcttctctgcaacaaaggcaagccccggtgcatttaccccttccttgtatttttaaaaagacttttatatactttaagtctagtgaaatgtgcattaagtttataggaattgattggaaactattggatgcattgactaccttgatatccattcctgttatatatacttctttcgaagtatcaaatattgtttacaaaaatgcttagccctgcttagatctggtggatagaggttgtcttttgcaataatgcctagctcaggggttatcctgaggacggatggcttctaccagcaagaatattttcattgggagcatggtgggatcttactacaaagttccctataatgctcttttcatcctaaggaacacaaaacaatcctaaggatggaagtacttaaatcgagacttgggctaggaacaggtgatgctcctcccaggttaattaaggattggatgcgtatgtaggcctgtatgatcaaggactatcttaactggccacatgccctggatatgggacagggtaagcttgaacccctctattccatacatgaaaagacaatcgcgcactgggagtggagagatggcgagagtgacacatacgctcctggcaaaggaccgcctaaaaggggtggtgtgctctcgggtggcgcgcacctgttcatgcagtggaggatccgtgggaattgtagacatatgcaagagttacgagaaacatatgtcgtgtggttagagatcctcagctgagtaaatcgattcggatcgtcgttatatccccggaaagtggagacttgatctctgtccttcaacctaagtcaggatgtaaacattatgaataaaaatgatgttgtattgatgagatgctgaaataagactagatgtaaccagagtctattaatatttaatctggcgttaaaatattgaaagtaaggactcactttagtaagctatttctgcaaacgtatctaagttgattcttgctaaagccttttccttgattcctatttaaccagcatatccttaagagtcatttttccttagtcgggtaagacttgcgaaagtgcacgccgtacttagggttttcgaacccatgttgttgtaggtgatgaggagtactctaagtgttcctgtggctggagggcgtttccagttctggaggaagactagttaggctagtgtataagctttggagggttcctaccgtcctgcttttgtaataagttatgcattttgagtatatcaggacttgtaataaatgtaactcttactatgtgtcaaacgatttttgtttgatttcaaactttaccagagtatgttcaaggtaatttggcaccactttcatatttgggttttgtagatttgagttttggaaaacagagaacacggctgaacttcataaaggggtaaaaattcagttctgaattttctgaatttcctttttgaaagtttagcttgaggggtctatttgagaattttgcaaagctcctctgatcaaactttcttactacattttgtagtttatttagtgtactttaactttttatttggttctcatcataattttgtgtttttcaaaatctttttacaagttttccctttttgcacttaaatggcctacttagggttatttagggtttgtgaattcttctcaccttgaggtgcatgatatgattaaggcacaatacttaagatgaaaaagacttagttaacctttgttcctaattttttatgtccttttctcaatttggttcacatgtgataatggtcttgagttacacatttgccttggcatgctcagatcagtttggaaagatttgttttatttgacaaaaatgtattacaaccaccaaagtcccaacaattatttgaggtgattattaataatatacttcagagatacaacaaaaatattattgaaacgatccaatgtttattatctcttgttgaaaggtcaaatgatacaagggtgcaaaacctccttttaggaagccttatatttgcgctttatgtaaaaaataaagtgaaattatgtataagtgcgtgtttgaaccttagttattggctacacattcacacccacctaatcaatgggaaacaaaatattattttgtgctttattaaaacaaaatttatctaatgtcatatataaaatttatagtaatgcacgagcatatgactagtatgtatttaatttgtagtttacagtataaaaaggtatttggagaaagagaaagaacaccatagatgtaaggtaagaggatatatccataatttaaagtatttttagaggtaactgctatggttttatggtgcttgtaaagcttttagaaagttgcagccgacgaggaagaccacggcacatgtgcgctcgtttgggagcggcaggcaataggcggtggcgcaacaccggcactagggggagggcatagacgggcaacgcgttgcgtatgagacgattgggtgatagtgcaccgcgctgaggtgcggtgcggcgggacgggacgccaccagacagaaacagcacggcagccgctagatggcgggcttggcggcgctagggtgagggcgagaacaggcggcgctgggaggaagaggaattgatgtgagtggtgtcagcaaatactccagccgcaggacacggcatctcagcccatgagccgaaacgcaccgatcgggctcgtagtccaagcatagaaacctcctacccagaatgggctagattcaccctagaagaccggctcatctccagcaggccgtttatagttatagggtcatgtaaagtactattttgtactatagattacattgtttctagaataaaatttaaaatagagagtaaaatagggagtctgttggagatagtctaaagctttacgagc

SEQ ID NO: 34504 - DNA, 1176 bp, Zea Mays
ggccggggtacagtacaggatgcgggggttgacacgcgctgcgaaacgcgcaggggagatggcgttcaacgccggtggtggcgccgtcaactggttcccgggccacatggccgcggcctcccgcgccatccgcgatcgtctcaagctcgccgacctcgtcatcgaggtccgcgacgcccgcattccattatcctcagcaaatgaagaccttcaaccagtgctctcagcaaagaggcgaattcttgctctaaacaagaaggatctagcaaaccccaacataatgaataggtggctgaatcattttgaatcatgcaagcaggattgtatctcaataaatgcacatagctccagttctgttaaccagcttcttggttttgctgagctgaaactaaaggaagcaatctcaaaggagccaacccttctgattatgcttgttggtgtccctaatgttggcaagtctgcactcataaattctattcatagaattgctacttctcgatttccagcgaaagataaaaataaacgggctacagtggggccactgccaggtgttacacaagatattgcagggtataagattgcaactcagcccagtatttatgtgcttgatacacctggtgttcttgtgccaagcataccagatatggagacagggttaaagcttgctttaacaggagctgttaaagactcggtagttggggaagaacgtatagcaaaatatttattatctctttttaacattaaaaagacacctctacactgggagcggttgttgcacagaaaagaagagtggtgtgaagagatatgcagcagtaataaaaaagacaattcattacggaggactcggttgaataactctgatgccgtatatgttcagggcagcaactaaacatgcccttgtgcctcaacgcattaggctggactacttatgtgggcagggtagccttttggttctgtaacttctgtcacattggacctcttggtatcatgtgctcgattggtgtgtgttaccaaaatattgggggtggaattatgattttaactttgtttggccatttggggtttgtctggtcacatgggccatggacaacatccaaccaggtacaggatgccatgtgtagttggcgagtccaacatgatacatcttgtgcttgtgctagttaaactttcatggct

SEQ ID NO: 34505 - DNA, 3073 bp, Zea Mays
cgatcctcttcgattcgatttctacacccccagagcttgccaaacccctcgtctcccaaccctagagagcagcagcagcagcagcagctaccgcatcccttgccatggcgccaagctccccgtcatccgctaggcccacgcgcgcctccggccggaagcgctccgccatggccgaggagatccaccagaaccaggaggaggaggaggaggttgtggctgcgtccaccgccaagcgcagacgcaaggcggcgtcttccgggaagaagcccaagccgacgcccaagcaggccaaaccggccgtggcggggatgaagaagaagggggagaccgagaagacggagcccgttgtggacgacgtgtgcgccgaggagcccgacgaggaggagttggccatgggcgaggaggaggcggaggccgaggagcaggccatgcaggaggtggtggccgcggtcgcggccgggtcgcccggtaagaagagggtggggagaaggagcgccgccgcctcgggcgaccacgtgcccgagttcatcggcagccccgttgctgcggccgaggcgcacagcaactggcccaagcgctacgagcgcagcactgccgcaaataaaccggaggaggacgatgagctcaaggccaggtgccactaccggagcgctaaggtggacaacattgtctactgcctcggggatgacgtttatgtcaaggctggagaaaatgaggctgattacattggtcgcattactgaattttttgagggcactgatcgatgccactattttacttgccgttggtttttccgtgcagaggacacggtcatcaattcgttggtgtcgattaatgttgatggccacaagcatgaccctagacgtgtttttctttccgaggaaaagaatgacaatgtgcttgattgcatcatctccaaggtcaagatagtccatgttgatccaaatatggatccaaaagctaaggcccaactgatagaacattgtgacctatactatgacatgtcttactctgttgcatattctacatttgctaatatctcatcagcgatgggctgttgatcttaacagttttgcgtgccaaagtttaaaatacaatcatccacagactgaggtgcgaaatgagaaagctgatgagtttcttgctctccttaaggaatgggcagtcttatgtgaaaaatatgttcatcaagacgtggattcgaatttagcaggttcagaggatcaagaggatgctgacactcttgacaaggatgaatttgttgtacagaagcttattggaatacgctatgatggcactggaaggaaaaaaggcgtatattttaaggtccaatgggaaggatatggtcctgaagaggatacatgggaacctattgataacctgagtgactgtccgctgaaaattagagaatttgtacaagaagggcgcaaaagaaaaattctcccgcttcctggtgatgttgatgtcatttgtggaggcccaccatgtcaaggtataagtgggtttaatcggttcaggaaccgtgatgagccacttaaagatgagaaaaacaagcaaatggtgactttcatggatattgtggcatacttgaagcccaagtatgttctcatggaaaatgtcgtggacatactgaaatttgctgatggctacctaggaaaatatgctttgagctgcctagttgctatgaagtaccaagcacgccttggaatgatggtggcaggctgctatggtctgccacagttcaggatgcgtgtgttcctctggggtgctctttcttccatggtgctccctaagtatcctctgcctacatatgacgttgtagtacgtggaggagcacctaatgccttttcgcaatgtatggttgcatatgatgagacacaaaggccatccctgaagaaagctttgcttcttggtgatgcattttcagatttaccaaaggtcgaaaaccatcaacctaacgatgtaatggagtatggtggttcccccaagacagagttccagcgctacattcgacttggtcgtaaagacatgttggattggtcgtttggtgaggaggctggtccagatgaaggcaagctcttggatcaccagcccttacggcttaacaatgatgattatgagcgggttaagcaaattcctgtcaagaagggagccaacttccgtgacctaaagggtgtcaaggttggagcaaataatgttgttgagtgggatccagaagtcgaacgtgtgtacctttcgtctgggaaaccactggttcctgactatgcgatgtcattcatcaagggcaaatcactcaagccattcgggcgcctgtggtgggacgagacggttcctacagttgtgaccagagcagagcctcataaccaggttatattgcatccgactcaagcaagagtcttgactatccgggagaacgcaaggttacagggcttccccgattactaccgattgtttggaccgatcaaggagaagtatattcaagtcgggaacgcagtggcagtccctgttgcacgggcactgggctactgtctgggtcaagcctacctgggtgaatctgacgggagtcagcctctgtaccagctgcctgcaagttttacctctgtggggcgaaccgcggttcaggcgaatgccgtttctgttggcactcctgcgggggaggtagtcgagcagtaaaaggatagcggagcaaccctggttggtattttgattcgagcccatccagtagcatgtttaccaataaataatcattggtcgtgctgattcttatggttggagatgaatgtatgtagggtgtactcgagctcgagtgcttgttgtactgtaggttgaggtttctcatccattggcctgcctatttgtggatgacgtttcatttcagattagcaatgtgcttatttaaggtttcgtcatgtacctgtattctacaatccactattgtttccaaagacagcatttgatccttgttcaacgcgagcagattttcgtccaccaaagctgtgtagggatcgaaatgtcaacaatgaattgagtcattcaatcatttgtctaatgttaatgtgtcctttgcatttat

SEQ ID NO: 34506 - DNA, 3233 bp, Zea Mays
gtgtacgtcggcgtcgcggcgtccacgaagtctccatttctgattctgaaacgcccacggcttcctcgctttgtcgctctcctctgtctgtccgcctgtccgagacctcggagccgacggccggttttaaaagagcctgcgcggtgtaaggattctcgggtcgggctcgggacgggagcaaccgcagtgggagacatgcccccttgcacaggagttggggctggggctggggctgtgcagcgccgagtagtaggagccgggaggcggtgacggacggaacagaaggcgcgggtcctgttgggcggccgcctggttcccgggtcctgttgggcgggcgcgcggctgagcggggccatccatcattgcctcctccgcgtgggtcttggctgcctctgtcgtcgtcctcgcggcgcgggtcgcgcggccgaggtgaagcgaagaccgtcaacttgtactcttccggcgctcgctggcggtggaggggacgaaagtagatagcgtacggaagcatcggcattgggtcgcgcgcgtaggggatggaccgtcggagctggctgtggcggcgcaagtcgacggacaagagccccggggagaccgagacctcggcgtccgagaagattactgatgaacaggattctgccaagagctctccaaactcgactcggtcgccggagatcacgtcgaaggaactggaggacgataacgacgtgaaggtgaaggtattgagtgagaggctatcatccgtagttctggatgtccgtgcgaaggatgatctcgtgaagcagcattccaaagttgcagaggaggctgttctaggatgggagaaggccgagaaggagatctcatcgctgaaggcgcagctgagcgctgcaacggccaagaactccgcgctggaggaccggctcgtccacctggacggcgccctcaaggaatgcgtccggcagctccggcgcgccaaggacgagcaggaccagacggtgcaggacgcgctggcacggcaagcgcggcagtgggagtcccacaaggccgacctcgagctgcgcatcgttgagctcacggcgaggctggaggccaagtccgagcgctcggtggtgggcgccaccgacggcgacacccgttccagcaggctagccgccctggagaaggagaactcggcgctgaagttgcagctgctcgccaagacggaggaactggagctcaggacgatagagaaggagctcaaccggcgggcggcggagacggcgagcaagcagcagctggagggcatcaggaaggtggccaagctccaagctgagtgcaggaggctgcaggccgcggcacaacggagggcgtcctccgtgaacgtcgagctccggcgttctccgagctcggcctgcgtcgagtcgctcacggattgccagtcggactgctccgactcatgggcctcggccctcgtcacggagctcgaccagttcaagaaggacaagagcggcgcgagcaccaggacagcgagcctcgtggccgcggacatcgacgtgatggacgacttcctcgagatggagaagctcgcctccgcgaacggctcgtcgaaaggcgacgccgtcgaggacgcgagcgggcaggtggagaaggcgctgcacgaggctcagcgcgagctgaggacttgccgccgccgggtaatggtggcagaggagagatcagctgagctacagcggcagctgaaccatgccaatggcgacaaacacgccatggaggcggaggcggaagctgctgaggcgaagggaagggagcttgagggcaagctcgagctcgcccgtgccgatatcgcgggcttgctggacaaggggcgcatcctggaggaacggctcgagtctgagaaggcgctgacacttgagctcgcagccaagtaccaggacatggagacgctggaggcagagaagagggagctgaacgctcagctggagacgtcacggtccgaagccaagaagctcagcgacaagatcgccctgatggagaggaagctggaggtggagaaggccctgtcgatccgactggcgacgaaatgccatggcgttgatgctctggaagcaaagaagaagggcgtcgagctcgagctggagtcggcacgcgaggaaatcgcttccctgcgaaacaaggctagtagcttggaactgcaagtcatggaagagaaagcgtcgtccgctggactcgcaatgcggtgccaagaactggaggagcttagatcccagcttgtgtcttcaaactcacggatcgttgagctgaacgagaaggttaaaacgctcgaggatgtgatcgagaaacagaggccagtgacggcggaattggagtctcagctccagtcgagacacgacgaaatcagcagcttgaaggaggacataagcctgttgcagaagaagctggagtcccagaagaacctgtcgtcagcttacatatctgcgctgggcgcttctgaaaccgagaagaaagaactggctacccggtttgaactcggagagaaagaggccgaggaattgcgcgggaagacgagtttgctggaggaacagatccacgaagagagggcacggtcatctgagtttgcggtaaaatgtcggaagatggaggaacagttctcccgcagatctcttcttggccaccaaccagtgaaatcttcggcgatcaaagatattcagataagaaaggagacagagctggccaaggctgccgggaaactggccgactgccagaagacgatagcttcactgagcagccagctgaaatcgttggccgatttcgacgagttcctccctgaaaccgagactagtggcgccgactcagccgacgcctgggacggcgacctgaagctgctccaccctgcaagctatcccacgcagattggctgtttggcagtcacatgagtcacgatcctcgttggcaggtgggcggagaaactgtttttgttcgggttccaccgcatgattgctgtggtgagattgccatgatcttccaccacatgccatatagagttaagtttataatagtctataggtgagaaaatgttcatatgaaagctgtttatagagttggttggtgaagcttcaaaggaactcataaactttgatctcccattcttcctgtcccttggaaacggcttttaaccaccagcatgtgttccatcttgattgtcttccggctattttatattctgcaggagttcattgtgcaatgaaatgaatggaatattcagttagatctga

SEQ ID NO: 34507 - DNA, 1090 bp, Zea Mays
gtgtaactaatccgctgccggcgtcatcgttgtatccaaagcgccgtgctagattccactccacacctaggcaaggccgcacacgccaaccaccctcgtgtcgtgtgcgtgtgcgtgtgcgcgggcagacgccagcggccagccgcagcgccatggacgtagaagcgcgcaaggacgcagcgcccgcgcgcggcaaggcggtgcgccgctttctggtagcactaaactgcgggatgctggcgctgggggccatcggcgggccgctcctgagccgcctctacttcagcaagggcgggcaccggcagtggctctccgcgtggctcgagaccggcggctggccgctgctgctggttcccgtggcggcgtcgttcggcgcccggcgcgcgcgcgaccggggcgccccggtgctgctcaccccgccgcggatcctgctggccgccgcgggcctcggcgtcgccacgggcgtggacgacttcgtctacgcctacgggctggcgtacctccccgtgtccacctccgcgatcctgatctcgacgcagctggcgttcacggtgttcttcgcgttcctggtggtgcggcagcgcctgacggccgcgtccgtgaacgccgtggcgctgctgacggtgggcgccgtggtgctgggcctgcacgtctcgtcggaccggcccccgggcgtcaccaggggccggtactggctgggcttctcgctgacgctctgcgccgcagcgctttacggcctcgtcctgccgctggtggagctcgcgtacaggcgcgccgcgggcggtggccgcgccgtgacgtacgcgctggtggtggagatgcagctggtgatggggttcttcgccaccgccttctgcacggtaggcatggtcgtgaacaaagacttccagacaagccgctttcttcgtgactccaatcgaccacagtggatgagtggaaagaggctgtggctgtgtgttcggtttctttgcgcggatctctatcaatgttagtggtaaaattcttcacatactctacgtagagagggacagagagaaaagggcgcaaagatgtcgacttcgttgcaaaggaatcaaaattattgatggtg

SEQ ID NO: 34508 - DNA, 3168 bp, Zea Mays
aaaaaaaacagaaacccgttacccgactcgactcgtctcttcccctccagtctccaccgagccaagccagcctgctccagcggcagacccgctaccgatctcctctgccgcggcccgcggcggcggcgatttcccctccgcgaatgccccttcaccgctgcagttgatacgccacccaagtggttcgttccacccttccttccctcgccggtctctccatcgccgcagcccgcagggcgccaccttgtcggaaggcgcgatccatggaccgctcgatcaacttccgcggcatcgccgggagcgccggaaacatcatgcagggaatggggaaattcgttttcggcaacgaggggatcgagtcaaaggaagatagctacgtcgagagatatctttatcggataagcaatggcacgatacctgatgaccggaggtctgcaatgactgagctgcagtctctagtggcagaaagccgctcggcacagatgtcgtttggagcgatgggttttcctatcctcctcaatattttgaaagaagaccgtgaggatgtagagcttgtgagaggtgccctggagacctttgtgagtgcattgactcctattgagacgtcacaagggccaaatactgaggttcaaccagcgtcagtgaactctgatctgctatctcaagaaaccgagaatatttctcttcttttgagcttattgtcagaggaagacttttatgtgagatactacacaatccaacttctaacagctctacttacaaactcgctgaaaaggttacaagaagcaattctattgattcctcgtggtataacagttctcatggacatgcttatggaccgtgaggtcataaggaatgaagcactgttacttcttacttatttgactcgggatgcagaggaaattcaaaaaattgttgtatttgagggtgtgtttgagaagatatttagcattattagagaggagggctattccgatggaggtgtagttgttcaggattgccttgaactgttaaataatttaattcgacacaatgcgtcaaatcagatgcttttgaaagagacaatgggctttgacccattgatatcaatactaaagattaggagaggcagtgcatttaattttacccaacagaaggtaaagacgctaacaagaatgcaaatcaaactgcattggctcagaaaaacattctggaccatcttcttttgttgggcgttgagagtcaatgggcccctgtcgttctccgctgtatggcactgcgatgtattggcaatttggtattaagaaatcctcagaatcttgattctcttgcaagaaaacaagttggagaagagcctcatgttcaacctgcactgaatgccatcttctctataatcttgcggacctctgtagcgcaggaatttgttgctgctgattatgtattcaagtgtttctgcgagagaaatcctaatggccaggcattattagcatcaactattgttccacatccgaaccaaggaaatatgcatgaacctgctatcgacatgccttttggaagtgtacttctgcaagcactggtttcaagtgatgtcaatggagatatggaggcatgttgcagagcatctagcgttctttctcacattgtcaaggacaacatgcaaagcaaggatcgtgtattgcaaattcagcttgagacacttacaccgtccttggggcgcactgagccagtattgcatcgtattgtcacatgtttgtccatcgcagcctcaacagagggagaaaacaaccaaaacaaccaaccagaagaaccgtacattcaacctgttattcttcggctactcatcatatggcttgttgattgttcaaatgctgttaactgcctgttggaatcagcagtgcatctgaactacataatagagcttgcttcaagcaaacgttacactgcttgtgttcgtggactggctgctgttgttctaggtgcttgcatcctgtacaatgctagccatgagaagggccgtgatgcttttgctgttgcagatgctataagtcaaaagattggcctcacaacgtacttcttgaggtttgacgaattgaggagaagcttggcacatcctttgccagagcagcatcatcgcaaggagctttcccgatcaagtgcgaatagcatgtcagatttccaagaaattgaagaggatgaaacaaataaagatgatcaacaccctgtcctctcagaaatatttgattcacagtttgttaattttcttagtaagctcgaggctgatattagagaaaacataatggatatatttagtcggacaaaaactgcaactgcactccttcctactgaattggagcagaagaacggggaggttgatggagagtatatcaaacgactaaagtcgtttgtagagaaacagtgcaatgagatgcaggacttgctggctcgaaacgcaatgttagcagaagagttagtgagaactggtggtggtaccaccacagatacttcacagagaccgaacaacgggcgagaaagggtccagatcgaagccctgagacaagaactggagggagcgagacgacagatagaggcactcgaaactgacaagtcccagatcgaagccgaagctaacaaccaacgaaaccttgcagtaaaactggagtccgatctcaagagcttgtcagaagcttacaacagcatagagcaggccaactaccgcctggatgccgaggtaaaaaccttgcggcagggaggcagtgtgccgtatcctgacgtggaggcaataaaggcgcaagccaaggaagaggctgagaaggacagtgaggcggagctgaacgatctgcttgtctgcctcggtcaggaacaaactaaggttgagaagctgagcacaaggctggcagagctcggcgaagatgtggatgcccttctgcaaggtattggtgacgacactgccattccggacgatgatgacgacgacgatgaagatagtgaagagtgatatgtttatgtaaccctgtaggtctgttggtgcacacaacctcacgttgggtcatgatattgtaatggcaattggcattgtacagtggataatgtgtagacaaaggcaccgttccaatttaagttatttgtggagaaactagttgaaaactaagtggcggaccgtccggtcccggacggtccacacctcgcgat

SEQ ID NO: 34509 - DNA, 1887 bp, Zea Mays
gtccctttctgctgcgaacttgcgcgacctgcactgcgtccctctctccactctcccgtctctcgggtctcggctctcgccgtcgccactcgccgcgagcgagatgcagggcctagccgtatcatgccagcttcctcctgctgcggccgcagctcggtggcggccgcgcgcttcttcctctaatagggaagcagttttacaatgttggaagtatgaattaagtcaagaccactatttgggaggccccctaaggataggtcagtctcaaggaagtttgcacagacatcgctctacaaattttctcagaccagctgctgcagctatttcagttgaacaagatgaagtcaatacttatcttccaaaaggtgatatgtggtctgtgcacaagttcggtggaacctgtatgggaactcccaaaagaatccagtgtgttgcaaatatagttcttggtgattcttctgagaggaagctgatcattgtttccgcaatgtccaaagtaactgacatgatgtacaaccttgtacaaaaggctcagtcacgggatgattcatatgcaatagcactggcagaagtttttgagaagcatatgactgcagcaaaggatcttcttgacggagaagatcttgcaagattcttgtctcagttgcattcagacgtcagcaacttgcgagccatgctccgtgctatttatatagctgggcatgcgacagaatctttctctgactttgttgttgggcatggagagttgtggtctgcgcagatgctgtcgtatgcaataaagaagtctggggcaccctgcagttggatggatacaagagaagttctagttgtaacacccagtggttgtaatcaagtagaccctgattacttggaatgtgagaagcgacttcagaaatggttttctcgacaaccagctgagataatagttgctacaggatttattgcaagtacagctggaaacattccaacaactctaaaaagggatggaagtgatttctcagcagccatagttggttctcttgtcagggcacgccaggtcactatttggactgatgttgacggggtatttagcgcagatcctagaaaagttagtgaggctgtgatcttaagcactctgtcttaccaggaggcctgggaaatgtcatattttggggcaaatgttttgcatccgcgcaccattatacctgtgatgaaagacaacattcccattgttattaggaacatgttcaacctctctgcccctggaaccatgatttgcaagcagcctgccaatgaaaatggtgatttagacgcatgtgtcaaatcatttgctactgtcgataatttagcacttgttaatgttgaaggaactggaatggctggcgttccaggtacagcaagtgctatatttagtgctgttaaggatgttggagctaatgttatcatgatatctcaggctagcagcgaacattcagtatgctttgctgttccagaaaaggaagttgctgtagtttctgctgagttacatgataggtttcgtgaggcattagctgcagggaggctgtctaaggttgaagttattaatggttgcagcattcttgctgctgttggtctgaggatggccagcactccaggagtcagtgcaatactttttgatgcattagcaaaggcaaacattaatgttcgagcaatagctcaaggttgcagtgaatacaatattactgttgtattgaagcaacaagattgtgtaagggctctgagagctgctcactcaaggttcttcctctccaaaaccacacttgctgttgggatcattggacctggtttaattggtggagcactccttaaccagttgaagaatcaggtacttgaacaacaggccgccgtgggtggcgaagaagggggcaa

SEQ ID NO: 34510 - DNA, 1484 bp, Zea Mays
caattgtttgcgcaggctgggtgtggactacatcgacctctaccagatacactggccggatcggtatgttccaatgtttggggagacagagtatgatccgaactgccagtacacgtctgttccaatggaagagcaactggaggctctcggaagagcaatagatgctggcaaggtaatgttgtcgaggtgctgtttttaactttccaattttaatgaaaaagttcaggctgcatatttatgaatcgttggtgttagattaggtacattggccttagcaatgagacaccatatggtttgatgaaatttcttcagttgagtaaggattctcagttgcttccaaagctactgacactgcaggtaagtagcgcagtttgatctaatctgtagtactgtaatcgctctccatatttcttcacctgtgtttttgcagaactcgtataatttgttgtgccgaaattttgattctggattggcagaatgctgccatcatgagaggtatgcttgacacggtcagaagccctaactgttgtcttcagtgtctctaatcttctcatgtatggtcctggcatgagttggtagtgcatattggttttttccctctctatgactatgatacaacgatacatagctctcctgcatgttcgaaaaaatattgacatctgtttagtttaaagaagaatggcattgtcatatcgtatttgctcttggttaaggtattttccaaattgtattctgttttgactcaatttatacaattgtttttcttctgaacttccattgttgaactatggcatttgcagaattagcttgctggcttatagcccaatggcaatgggtatactttcaggaaagtatcacttatctgataattgtggtccgccagacgcaagaatgaatcttttcaaagtttggttccactacgttagcgctcctcctttatagggagatactctgaaggtgaatcccggtacaaactgcagagccccaaagtgaaagcagctgtgaagatttctgcaaagtatggcatttctccagtgaccttagcgattgcatttgtcttgagacatccacttgtggcatcggctgttttcggtgcgactaaattgtggcagcttgatgaagttcttcaggcaactacagtccatctttgtgaggaaattgttgctgagatcaatgatgtacatgcaagataccctaacccttgcccataaaattttgcaaaaaaaaaactttatttagcatcacatggatccttatttatcatcgagagatatttttttccaatatagcactgggtatgttttttcccaatatagcaccgccattagatgtgacacttagggcctgtttgtttaccccatggattatataatctggattatttttggaggattatatagggcctgtttgtttaccccccaaattatataatctggattaaataatcctaagaggcaaacaaacagtccagcttatttgcctag

SEQ ID NO: 34511 - DNA, 2874 bp, Zea Mays
gttaaatggggctgaatagaatgcttcattagatgaagaagggagtacaatgtatagccagaagggtgcaacactagggaaggtgtggcatcctggctattagatcctgaataccgtaggtagcagcccctgataactatactaaagtagctgatcctagatgctatataggactgcactacctgctatgcttgacagaatttcgatacatatcctcttgtaggaggatggaaagaagcctacagatagtaattacaaattatagtaataatttgacaaggaccaagaagaatacatatacctgttgatcaataatcacaagatccaaatgtttgattggatcatcatcatttttgccatgaaattcccaaactcttgatatccgaacacaaatgatatagtggtagacccctggtcgaacttgtgatagtggtgtaatgtccatctgcaaatacaatttgttaaaaatagtatcaatttatgttgccatggctctcaatagattgtagtacttctttatacacaatattttctgttattgttccacatgaaccgtcgtcattttctatcaatattttgagccctttcttttctgtaactcgtgacacagctaaatatagttgaccgtgtgtaaacacctttttctttaaatataaccctacatttgatagtgtttgtccttgacttttatttatagtcatagagtagcaaaccttgattggaaattggcgttgacataatgtaaaaggccatttattgcccttagttgtcagattaatgcggggtatatgtattttttcgccaacgtgtgtacctgttattattgttccttctataattgtgtctcctagttgagttataataattctggttccattgcatagtcctaaactttgatttaaatttcgtagaagcattacaggagtgccaattttaagttttagtctatgagaagggaaattgtttgcgtttaaagtgtttagatactcaatagggtataaaatattggcatcatttggagcatctgtgcatttagatatgctatctgcactatagtattctctctctactgttggcaaaagagagataatataatcatttatttcatctacaacatcattagttgttgctaatatagctctttttttgatataatctggatcattatattttgtttgtaggtcaggataagtaaattgaactaatgcttgaattttatcctctgttgtttcaattaaaaattcttttggtatttcaatgagtgttgagtccgaggaaaaattatcgttgttgttatataccccatttccaatggcaaggatccaattattgaatgataacaagtcttcatactcttcatttgatatattactttgtcgtagtcgcatgttttcagaaaggaatataatgttgacatggttccaaaggtatgaagcaatgatacaagcatttattatttgttcttttgttccattttctataacaggtaatatttgttttggatcgccacctagcacaaccactttaccaccaaaaggaatgtcaagagctttttcatatgtttctcctactatatctctaagggatctatcaaatgcttcaaagcattgtttatttgtcattagagcttcatcccatataataagatctgtgtcaataagaagttttgcaagatttgttcctctttttatatcacacattgacaattgatccaaatctataggtatacgaaatcttgagtgagctgtacgtccatttggaagtagcaaagaagcaactcctgatgatgcaactcagttcgaatatattggttcctgattattgtgtctcgtcatggatttattgcgttcattgaaccagaaaattgcatcgcagtgtctacatttgtattctagtttaccaaggtatgatctgtcagtgtatgattctttcagttgctggatatactcggatgggaaatcaaccattccattatgggagttcaaaaatctttgtatgcagatctttttgttggagggttcacagtttttagacatcttcctctttctaatcctttcaccgcgtcttattttactctcttctccaaaaaagttactgctctaagagaggtgttttgaaatagaagagagggtacatatttgagcatatgtagagcccaggtacctcgctctacaacatcaaggattatcttgtcattcataagagttaaaggccctttcttcagtctttcactattaagacacaatttcatgttgcaaagatcttcaatggatgatattgatgacgatatataagggatatcactcttgagccacataagcttgatgaagagattgttgaatctaatcttgagcttgaagcagactttgtacaatttaaatatgatgatcgatcacaaaaggtacttcattctgttgccacaaacatgtttagcgacaaggagatgtgctgctaagtctgtttttacatggaagatgggaaatggacataaacagtgaacatgaagaagggtgtgctagatggaaaggaaaccggtcaagctgattgaataagaagaagtctcttaactactataaatccatccatgaaatggagaagattaatgctaagccacttcaagaaaaaaggttgggtctagtcgttgttgtctctatactggcaaagggaatgcggagatacatttcgagaagaaaaaggcaatgatatggaggtgttttgtctttcattgataaaaaattagaaatgagcaggtgatgaatgtcacatgaatatatttagctatttcaaatggaaaccaactttgttattgtactggcttttgttcataataaaaacacagaaggcaatggaaaatctacatgcaaatgttttgct

SEQ ID NO: 34512 - DNA, 3137 bp, Zea Mays
atttaactgcactgccagatcggtcatgggaacttaaacattaccaaataggcaactacaagtggttaagaactgaacagaaaaggactgaaaaaactgaatacatcctttttgttgttgtgaacattaccaactgaaaaagctgaatgtaacctattaacttctgtcttgctgaacatatttgaagcagattttttggttgaacattacaaaaagtgtgcaagaacatggattcaatgtttatttaaacttcataactgatacaacaaaatagagaggcacataatcaatccatgctgatgaattacaggtgggctataagagtatgctgtaaaaaaccaaatcatgtgataatagacaaaatcattttcacccattcacttccttggcctcaaattaacataggacaacaatcacacacatggattttattgaatggaaggaaattgaatcaacatcagaaatctagtgagcggaatatgaggagcctagtaccagaggtccaagtaacatcgatagccataacaatccaggtttaacaaaaaccaacgactttctatttaccttcgacctaggaagctatgaatgaataaattaatttgaaaccacacaataatcaaagggccaaaaggcaaatgctttcctctgaaaggcggaatggaggaagtggataggggcataccaggaggaagccagaagagtagcgttcaaaaagcctcgatgtgtaactatccctcaaatttggctgtattttttcataatagaaatcgtggatttcaagtactacataatgaaccaattgcaatggttcttactgttgctcctaaatggcttccgttgagaacatatgaggccatgatgactgatatatgactgaattctaagaatcagatttatagtactatgatgcaagacataaacaaatcacttatgccatcaaaatggtgcacatcaatgactgactgagggcctgtttggacgctgacgtccagcaccacaccccgcctaaggtgtcgcggccgattcggccgccacaactgcggcgcgcgaagtgtggcgtggcatggtgaatttcagagctgtttttcgttctcttctatatgtcctatttacaataatgattgtgcagctcacttttcaaagtaaaactatgtaccacttttttttgaaagaacataccagctggtgttagtagtaacaagaaacggtatgtctgcattttcttgtttcacaaccaggacataatttcagagagaaacccaaagggataaagaaagtcatcatggcagtaaggcatattgcgtatggtttcataaaataattaccagagtcctaaatctctggtaagggagagagtgacatttggatatatcctagtcacatcacttttcattttcagaacacaataagctctcaagtatgatgactgaagagtcatataagcaaagaaaagtacaagaggtcttcgagaaatcggatgatatggacgatcagttacactaatcgagtccaacaccctaatcgagcacagagaaacaatcagcccgactaatcgcgattagtcagccgatctgaaaacaatgagcccctgtatccaaacaagcccggtatacagtctatgtaataactttgtcaaattacagaaagcttatacctttatcttttgtactactatcaaagaaacatgccctgtcgttcattgatcatacaaaagtcttaagtatcgagtatcgacttaaaattatgtgcactcaccactattcaacttgacagtgaatttcttagtgcattgtctatagattatagtgaagtatgtggtctagtgagccatactttttgcttggttgtagccatttttgtttatggtctatagacctttatctttttgtttgttccttttctgaatggctggtagttaatgtaatttttgaccttctctattaacatatagcaagttagcagcagtacgtcaaggaagcactttttgcgtgtaatcactttaatttcagatagccatgcatgtttctccgccaagatttaacagctaaccttttgcttcagcgatgcacatacttttggtctcatcaaagtccatgaaccctatccttttggggtggacccaagctggcgtggaagtcggtctgagctaccctttctaaattcattaaagatgaagatgtctatactaatgggtgttgcccagatgaacctggggattgtattgagttattttgatgcacgatatcatggaaatgctcttgacataaggtatcaattcataccacagatgattttcctcaatagcctttttggttacttagcactcctgattcttatcaagtggtgcacgggctctcaagctgatctttatcatgtgatgatatatatgttccttgatcctgctggagatcttggagaaaatcaactgttctggggccaaaaggaacttcagatattgttgttacttctggctttgatcgctgttccatggatgctcttcccaaaaccttttatcttgaagaaacttcataaggaggtaatgatttggaaaatgttcttgaaaaatatatcaggctctggtatgactgaagagtcatataagcaaagaaaagtacaagaggtcttcgagaaatatataccaggctcataataaaggtaaacagagcagttcaatgggctgcttcattgggccaaacataaatataatgcatttgtgagaccttattatctgccaaactacatgaaaattcctctgaactcatgtatctcattggatttaagcttatattttgaagttgcatagtgatcaatttctactctggatcaaaacctgatacatagtgctcattatgttttatagtgcctttaatgttttacattgtctagttgattcatgtctatagcataaattatatgacacaagagatctttaaactttcaagtaacataaacaaaaatcagcagtgtcaaacatgtgaattagcatagagcgcaaaatgaaaacttgggagaagaatcatgtcttgcttataatggatctcagcttcttggagctgttgtttaagagttgttacttgtagttccagctcacgctgctgcgacgatcccctaaatacttcctgaaagtgctccattgt

SEQ ID NO: 34513 - DNA, 1853 bp, Zea Mays
atggaggcagccgcggcggtgcagaagctggccgagtccgccgtaccgcttcacctcaccacggagctcgtccagcgtggtcccgtcgacatcgaggccaacagctattctgttctggacgacgcggcaccatctctggctccttctattctacagttggcggtgcacgcagaggaggagcaggttctcgtcaccacgccaaccaagtgttcgacaatggacctcaaccgcggcgcctactccgtccccaacctccccgtgaagcctcagttctttgatgtgggcaaggactgtaactgggcgaggggcatccggagaaccgagatccagctcgctgatggcaagaactgtgagctacataggtgctggacagatatcttggatgctataagcaaggctcaacatttgatttacatcactggctggttgactatattggtgagggatgatatcaattctgtcgacctgcttacgaaggagggcttgctgactacccatgatgtggagattgcaaaaggagagcaggaaatcatgaatgaagtacttccagcagagagccggtcatctcggtttggtgtggctatggatcttgcagacatatggccttgctatgaatccaaaccatctgatgcgcaaggctatgctatcaaagggataccaaatctcagaaacacatgctatcggagtgcagtattgcagtgcctgttgatgctcggtaagctgctagaaaggatactaccatcgacatggttagccatccaagggtgctcacgaactggtatagagacaacaggcatgtgagcatgggtgctgagaaatggcttgacattgagatatggaactcacctgcagaatgtttcagtgcattaaaaaaacgcggttatcgcattgcgaccacttatttgggaactgattcggtttgtgtgtatgatatggattggtctcaaccaacagctattgttgtgggcaatgagcttaggggtataagtgatgatgctctagaattgtcagatttgcactgcagcattccaatgaaaggcatggtggattcgtttaatgtatctgttgcagctggaatcctcatgcaccatgctgtttgtgatagagtttcccgcctgggccatcacggtgatctcttgcctgaagaaaataggatattgcttgctgagttctatctgcgacacagagaaagcacggctactatagttcatgaatatgccaaaatgaaggcaggaaaagttatgaccagactttgaaaacatcctgagaagctgagtgacgtgtctgccaatcaagtcttggattatctggtgcatttttctaacagaaaacgaggctattttttcctggagtttaccgctgatccctaccagattgctgggaagacgaggatccaagcccaatcattgagcagagctgttaacgattacgcatatggttttcagtgacgtggacttttgctcccaaaacagtcgcccgttaactatttttgtatgtttttgttaggatgaaagcttaatatgtttccacttgtttttcacaaacgttggcggtggttgggtttgggcggcaacgctccatgttctacagacggttacgaccggaagcttggtgtaaccgtaccagtataacctgtccttggagggttgagagcttgagatgtaaacgaactgcacttgtctacggcaggatgatgcgtctgtaacgcaaagctgtgcaactggtgaatctcgccaccgaattctgctagggaaagctacggacgtgttgaaaactggaacataaaagtcgtgccattgattctggcctcaacgatgctcggtaaaacaacgaaacctaagaagaaaataaaa

SEQ ID NO: 34514 - DNA, 3652 bp, Zea Mays
gtacacccccggtggtctctgtgtcaagtctcaactctcaagtggacagggcgaccgccgaccccgacgcctacactacaccctacccttctacaggccggcgaactcaagtctcaagtgcggcagggcgaccgccgacgcgggcactctacgcaagccttcttctctagggcgtcgtttgccggcgacgagcaccacgaggtactttgtgctaggatagcagtgctatgtcaaaagctccagatgatcatttacaagcaactgagcaggaaggaagtgtccatccaagtcaacaagcagggcaacaacatgtgaatgcagcataccagttctcgaaaacagaactaactgaaggttcaaaaaatgaacagcctgtccaagtagagcaactgagttcccacctacaacaagcatatccagaaattcaactacagcaggctgaaacagatagcttccagttagctgaaaaagaaacagggtattttggtcaacagagttttgcaggcgccaaggtggatgtagcccagccttcagtagttcagcagaatgtaaagcaaactgttggtcaacaagcatcatctggtacccaggatacaaggaaaggaccatcgataccatttaatatgttaattccaatcctacaggcacatcttgacagagacaaagatatgcagcttcaaactgtttgggcaaaacttaggcgtaatgaagtcaacaaagatgatttcttaagagttaccgtgaatattgttggggatcaaatgctcaagcaggcagctcataaagtttttgtacagatgcaagcacagatgcaaagaaatagccaggcaaattcaagtcagcagtctttattctctcaactttctgcacagcagatggcttccagtggttcagcacagttacatgatcagaaaattcggccacctggaccacccaaccaaggccagaaaaaccaggtgtcatcttcacctcaggcttttgcaccaccatcagggaactcctaactctacaccgaatgctagtggaggtacaaagagtagcaagaaatcgggcgggcagaagaaatcattggaagcagcaggctctatgcaaccttcaagcaaaaagcagaagaaatctggagccccccaggaacaaagtatcgatgaactaaatgatgtcacagccgctagtggtgttaatattagggataacaaagagatagatatttgccgggaaatgctggataaaatgggttatccgaagcttgaacttggtctatctgcaatgccgaaggaccaacttgcagacaaccttgcttataacagcttgaagggtcttatccttagcaaggctttgatggctcagaaagatgccgaagatgaaagcactcggatagccttcgaaaacctacgctcggaagttatatcacttcggaatgaggcccttgagaaggacaaaatcttgctttctttagttgagaggttaaagtctagcgacgctagattggctagtctttctgaagtggaacaaaaaatggagaaatttgaaaagaagaaagaagcagatgcgaagcgtattgctgatttagaatatgctctatctattcaagcgagattgcaaagattcgaagtagaaggactggagaagaagcttgatgaaatcactgaaaacttcaatgtcgaacagacagaacgtgagatatctgataccaaacgattgagagttcaaaagaatgtttaaaagcttcgtcaggcgaaggaggaatgctacaaggttgccatgcaatgttgcaacaaactgaagagtacttttgctaaggttggcgcattctctactaaacgagactttatccgtggttatcctgacggagttatcagattgattgaaggcgaggccgaagcttttgatgaaatccttagtgataggggggatttttgtgcctgcatcgacgcccgaggagctatctctctgctcgaaaaagctggctatgagcatgtgaaggctgtaattcagccagaattctcagtttcagcgagtgatgtcaaggatccttcagccgaaggcatcgcctttagtggaaaattttattctgaagtatgggtgaatggtggccgaaaaatggcagatgaggctattagacaaaatgaagaagaatctcgtactgctttataagaagtaaggaaagctgaagaagccgcagaacgtgaaagacttatagccgagctttctccttctccggagccgtacgaccctgaggccgatccagccctgaagggcgctcttgatgtgattaggataacaaatgaggctgttgacgaagctgtgaatagactcttgaacgaagctgctgaaaaaattctgaaggaggatgaacatactttatatatgaaaacacttgtagaatttttgtgtactgctctgttatgtacttgtaataaatttctttgtggagcgtgaaatcttcgtacgtaccgtttttgtgccacatgcgaaaaaatactttcccttttttcacgcttcataaagaaaaatatcccttttcagccgaagtgacattagtagactcgaaggccttgccgtagatcttgcataagaaatacctgttcccgaaaccgtagatctttgcctaagaatatcgttgccgaaggcatggatcttgcatttttgaaacatcctttcataattctttgtcaaaaataaacttaacctcaagagttagccaacatgtttgaaggggcaatttccttttttccaatgttgcggatgatgcgagatgatgaatgatgcgatgctatgcaacatgatgcaatgatatgatgcaacaaatgttaacgcataaatgctttcgtaaaagtaagactctgcatccccttaggaacgactttagagtctcttcaccttttatttaggtgatattttagctctgcatccccgtaggaacaattttgaagttaagctctgcatccctttaggaacgtctttgtagcttcttcatcttttacttaggtggcattttagttccgcatcctcgtagaaacgactttggagctaagctctgcatccccttaagaacgactttgaagattattcaccttttactcaggtggttttttagctctgcatccccgtaggaacgactttggagctaagctctgtattcccttagtaacgactttaaaacttcttcacattttacttatgtggcattttagctttgcatccccgtaagaacgactttggagcttcttcactttttttgttacactcgatggtgtaactcaatatttattacaacaggctgaaggttgtaccttctcaaattgtcttttaggtagagaaataaaaccaagagaaataaaaattacattgaatgtgtatgaaagttttttgattgagcccctctgtcgcttcagtaaatatgtcttgattctggtatagtgttgttgactgtccgagcttcagactcttcacgtgcgtcgcattgttgctggatttgacggtgcccttctggttgttgattgcgagacgaagttggagccatgattggtggtggtggtggtggtagggcccatgcagctgggtagtggcttgctgaagctactgatactgtgggttgttgattgcccacatactcagaaatgtacggggaatagcacgaagtagtatgcag

SEQ ID NO: 34515 - DNA, 1905 bp, Zea Mays
ctgttgtatttgcccttgattctatagtagggcagacttagtgccggaagctcccacatgggtggggtctggggaagggataaaccaaggcaagtttccccccacaaatgcggagaggctgctttaaaccagtgacctggtgactgagtcctctaatggacaatttggaagctcaaacttatgagacatttgagaaggatgttgtgaagtacactcagtatcgaagagcagttgctaaggccttggttgatagggttgctgatgatgcagtctccacaactaggacggtgctgatggttgtgggagcaggacggggacctctagtacgagcttcattgcaggccgctgaagaaactggtcgcaaattaaaagtatatgctgttgaaaaaaatcctaacgctgttattactcttcatagtttgatcaaattggagggttgggaaagcctggttactgtaatttctagtgacatgcggtgttgggacgcccctgaaaaggcagatgttttggtcagtgaattgcttgggtcctttggtgacaatgaactatctcctgagtgtcttgatggtgctcagagattcttgaagcctgatgggatttccattccttcatcatacaccagcttcatccaaccaataacagcatcaaaattgcacaacgatatcaaagcacacaaagacattgcacattttgaaaccgcatatgttgtcaaactacaccgcatagcgacacttgcacctccacaacaggtttttactttcacccatccaaatttctcaccaaatgctagcaaccaaaggtacaccaagttgcaatttgaaatgctgccagatatgggttcatgccttgtgcatggatttgctggttattttgactctgtactttataaagatgttcatcttggaatcgagccaaacacagctacaccaaacatgtttagctggttccccatcttcttcccattgagaaaacccatctatgtgccggaagggtctcctatagaagtgcacttctggcggtgctgtgcccccacaaaggtgtggtacgagtgggctgtgactacaccgaccctgtcgccgatccacaacagcaatggccggtcctattgggttggtctatagtaactagtaaggcaatcaagatggtcgctttgtgttgtaacagagaagaaaaaaaaacagagagatgatagggtccaccggtccagttctatttgagccgggtgctactggtttctgcctggaggagcagatcaaaggatctgtaacgcgttgctatctgaaaggcatttcaggtcattgtccgcaacaagaagagagtaggatataactatgaactaagcttgagatttagcggtgaatggttaatcaaagaagaaaacaagaagatcaaagggcatctagacattcccgagttttcattcggcgagatcgatgacttggaggtacaagtaaggctcggcgatgacaagggcctcgcctctgatgatagaacacggatctgcaaggatctcaagtcctttttggcgccgatccaggagaaaatgcgcatgtttgaagaagagctcaaaggtagatagcgagtattagcaagagttcgcagtgctaggcaagtgacttggcagttggcaccgccgtgctagctgtgatgtgtgtgtcgcaacgctctcaaagctgagactgtatgtgtactggtgtaatacacttgtcaagatgagcacgtacgaactgttctcttggtatccctcattttcagcatgtgatagtaaaaggaattcaagatgtttttgcatgaatggtatggatataggctctgtttggcacagcttattttcagcttcttcataaatttaagcaaaagttctgtcagcttctgcagcagcttatcagttcagctgcttctcag

SEQ ID NO: 34516 - DNA, 3242 bp, Zea Mays
cctcagctgagtgttctccatgtttgacaagagctgtgtaacagtcttaatttgagaggcactgcacattttttttaatatacaaaagaagaggtgaaattgaagaaaataaacttcaacttagttccatgaaaatctggacatgcgtgcgtcttacagaactacaagctgggatttcagtttacttatgatgaatgtatcctagaccaatatgttctagtgggaaagggtcattcgaatgtaagctagaagctcgctagttgatcttcttgtttagaaataaattgacgagtctgtctcgcaatatttttttaaaaaaagaaaaaattgtatattaagacataacgatcatatgacacaacactgacataagtgatccttttctggaaggcaaagaggaagaaaataaacttcagcctagttggttggaatctggacagaattgcagctaaaaagctccatgactaagttttagagaacagctagcagtactgtgaacataataaataaatatgcatataggggaagctaacctttgcaaactcctgtccatataagcatccaaggatgatattacttgaggtagctggtgcagcacctagaacaggacacagatattaactgctaccttacaactagttttggcatccaatgctacacttatttcttacatgctctgtgttctttgcaaaggatgctttttccagcaggttcttcggtagttttgccaaatgaacctgtgaccacaagtacatctatgttgattatcttggttaactaatagcgtgtttggtttgagaaatgaggtagtccatcatcttctcactcctcacttgtggaatggaatgagttcatctatcaccattccattcctcataagctaatagttagtaataatatgaggaatgagctcattccactaaatttgtgaaatggactcgtgatgcaatggattgattcttcaaaccaaacaccccctagctgaccgcttgtacttgtaacaacaatgtaagatcataacatcacagcatgtatgttgtggacacagtttcataaagttattaatcgaaagaaagtatggcacagttcattgaactgtctgaacctttattgaattatatgaggaaaaaatcagaaagaatcagaaaggggttgagagatagaggtgggtagagctgaaaatacaaaactaaactataaaacgactcataaacttagtagcactccttaaataagtgaattggcatgttggtaattgtagcctgaagtagaggatccatctaaagccgtaacaccatgctgcacaatggacacttcagcgcagcattgtggaagttgctagatgacaatcaaagcgcactgcttaatcaatgacagtcgaatgcctacagattctcggttacttctatcgagcactcaggagagcggttacttctatcgagcactcaagagagctgctaaattttatattaagaaaaaaagggggcaataacccttacatttgggcgctctttgagtctttgtatacagcaaaacaatgacctcgaccaaaaaaaactacctactgctcgctcgcaggctcaagggcaagaagaacccgccaaactccaaaagaataacttctaggttatgtagtataggatgaagataataacattcatgaattggacaatcatttcaccttcaagacaaaagtaaatccatccaaaatcctaaccatactgtctctaatctaaagagtaaagggagacatcacgaactaccgcataaattaagtcaatttcgcacaaatttggaaaagcgttgattcttgtgatcagcaaacggctgtaaaatcatgcttacaatcggaacactctagacccaaacaagacgagatgggggcagaaggcgggagacctgagcgggggaggactgctccatcagctggaggaggttggaggtggaccgcactgcttgtgctatctgctcggtcactgccgccttagcccctccaccaccgccaccgccggccgtcgcagccatccccgccacgtcgacctgggagctcgccctacggcctacggcctacgcccagtacagagttgaaaatgtgtgtaaacaaataaccaaaggcccaaccaaccgcagggccgaatttccaatcgtcaagtgggacccgttcgaatttccgttatgcaaaatttcccgacccctctagaacgaccgcccctgccgaggagccgaccgacgggcgaagcgggagggaggcgatggcggcggcttgggggcagaaggccctgggggctctgccgcagctggtgaagtcgctgcggagtgatcccgtctccggcagcgcacgacacaggcgccttccgtctctcaggaggaccttctcgttgtacgatcagatcaacctcatcgacagcgtcccggaagacgagctccgattccagtcgtatgatgacactggattcaaaattaacaatgtaaaatatgaaggcagtgtattgattgtagagaacaagataatgacatgggcacccaaaacgttctcagagataactcctgaaagagatctttattcttggttgcggaagacacgtccagctggtcagtcctgagctgcggatgttcattcggtcaactggaatgaaactagaagcagttgattcgaggaatgcagcttcaacatataatatcctgaacgaggagggcaggccggtggcagctgcagttcttccctatggagtcacttgttaatgttttatcttctataccagttgggcaggcgttctctctttataatcgataaccaactgagctttgtttcgttcgtgctgtttcttggaagttctatatctgtcatgcatgtccaaagtagagttgtctatcttcctgcttttctacttcctctagcaagcccagatgcacagactgttggtatgttttggttgccgagggtacaatcatacatacaggcgaaacacttgccactctgctacgaactgggacgtgcgcccgcctggcgactggcgaggaccacggagtcacggacccggctgttttgccttctgttgatcgtcctaatttcagggctcaggcaggcagacgcgatgggatcctacgtggtaggagtactcgccagttcagatctcgcgggttaatatttactgtcacgtcatgttgtatcactatcgaccatatactataaattatgtaattgatttttgtcagtgtttatctgtgtttatctactgtaa

SEQ ID NO: 34517 - DNA, 346 bp, Zea Mays
atgtatgtgaccgtatatacttaatcctgctccgataccagctgtggcagaacctcccaagttattgggtccacatgcacctgtccttatctcaaagacctcagacagctatgcatgtgcaccagataacttaacaggatccgtccgattgccgaaggacatcggataaaccacttacaaccagaaccgcgggattaagtaacacaaatcacacacaccaatattgttgcagcggaaatcttactaccaaattttacaggttacaaaaattttacattagtttatcggagtgattacaaaagtataagtttgaaatatatgctacctcaagtgaccatcctcatta

SEQ ID NO: 34518 - DNA, 1157 bp, Zea Mays
ccggcgaccacgagcgctctctgccatcgctgtcaccgccacgagttgtgttctcctcctccctcgccccatccgccgcgcccttccccgccgttgacccggtgggcccgggccaaggcctcggccgtgatctgcccaccgccccgacgccccgtccgtctacgcagcgggcggagactggcgcgctgcgtcgtggatggagcctcccgcgagctacatggccccgccgccacgccaccgagttataaagttgtggagaaggaagaaagcactcacacaagaggtgaagacccttctcaatgttatccaggtgttgaggggaatatgatgaatatggcttctgaatccagctctagcactcgggcaatatttctgaaactaatgcacaacctatcagtagtgcttctattgacatgcaagggtggttctttgttgcacgaagatgaagaggaccttctgcaatcagtgattcaaaatcttacagctgccagttccaaaagaagcaaggttgaacaaaaaaactggtgatgggttgagcaactccagtcaaatgaaattaaaaaatattaactgtgcgaggaacaacttttggcggtcaatgcatgaagactcagtacgggagaatgctgattcagaatttaaggccactgtttcacagtatatcactgcgggtagccttactaatcaccaggaggataagatgcttgacaacactaaagtttctcaagcgtcaatctatagaaacttgtggattgaagcagaagcttcagcttgtaaactcaaatatgagcttcaacatgctcacctgggcttgagacagcaaaaggcctcaatgtcacagtagaagttgaccagtatggcggttcacctacaaaatgggagcatgttctgaaggagaatttcttccatccaggcaaataggtgaaatctgaaccataaaccagaaagctatggtttcagctcatgttgcttcaaaatgttgatgcttcttgtaaatatgatatatacatcctctcctccccaacctttatcagtatgttcaataatctgcatatcggtgatcatgtaacccctcatggtgctatacggaagtaatctggtttttctgcttgggtctatgccaaagtttgtctataaacgacactatggtctggact

SEQ ID NO: 34519 - DNA, 962 bp, Zea Mays
ctcttatttgtttcagtcactcaacaagaggcgaacacgtctcacctcactgtagactctagttcggttatttctgtcccaagtcaattggataggattgaaaaatattatgatgttcatttttttccaaatccatgtggattgagaggaaataaatccacaactagtcaaaatttaccttacgccttgatcggttagctctcaatccatgtggattgagtgagattagatgagtttgaatcctaaacaagtcaaacttcttctcaatttttttcaatctcatccaatccatatgtattggaaataaccgaacaaggccttaatacaccccaatacccctcaatccacatggtttaagtacaaaacgaacaagtccaaaagatccacatggtttaagtacaaaacgaacaagtccaaaagattttgacttgtttgaaatttaaacccactcaattccaaccaattcacatggattgagaggaaagcgaacaagcccttaatccttgttcgattaggagtagattgaaggagattggagcggattaaatctcttgctattcaaaattaaatagaaaagaattcaatctcttaaatccccctctaatcaagccctcagttgggaatatttccctgtttcttgtgtattcacgactctctgccccgtggaatatgacatgctgaaaagctcccgcgcatgctacttgcagctttcagtaaagaaactgggtataaaggttgtgccaacattcaagatcattgaggattgaatgatgtcaaggaggtcactggtcccaagatcgatgaattagagctcgtgccatcgagagagtgaggctaggatgagaaatgacctgaaaaaaaaatgtgcacaaattagtatgctatttatgaatgaggaactcccttctatacaagtggatactcagcatgcagaatagagctattctagttgtaaataacca

SEQ ID NO: 34520 - DNA, 3375 bp, Zea Mays
ctttcctattaataatcctgaatgacctgagaaacaaaacatgcgccgccgcatcctggggtcttgacgggggagtcaagccgcggcacgctcccagaccctccggagacgaccaagatttcctctttctgggacgggagcacgagcaccatcgccaaccgatacggttcacacactcattgaaaatttgctaacttctgcataagtttgtagcagcctctgaaacatttcaaccaaaatgaagatagcttttctcatgtcgttggttctgtccctgtttctcctccctaatgggatctgcaaaagcttagttgcaaggccttcggtcgtgaatattgggtctatacttcggttgaactccaccattggaggtgtttcagatgttgccatccgtgcagcagtggaggatatcaactcagatccaacagttctaaatggaacaacgttacatgttgaaacgagagatacaaactgtaatgacggttttcttggcatggttcaagctttgcagttcatggagactgatgttattgcaatcattgggccacaatgctctgctattgcacatatcatttcatatgtcgcaaatgagctccaagttcctttgatgtcctttgcatcagatgcaactctatcatcaattcagttcccattcttcgtgcggactatgcccagcgatctctaccaaatggcagctgtggctgcagttgttgattactatcaatggaagatagtgactgccatatacgttgatgatgattatggtcgaaacggcattgctgctttggatgatgaacttactgcaaggcgctgcaaaatttcgtacaagactgggttccgttccaatgctaaaaaaagtgagcttctaagtctattggttactgttagtaatatggagtctcgtgttattattcttcatactggttcggaacctggactcaagcttctgtcacttgctaatggactaaacatgatgggcaatggctatgtatggattgcgactgattggctttctgcttatctcgatgctaattcatcggtctctgctgaaactgtaaatggcatgcaaggtgttctgactgtacgtccacacacccctaagtcaaatatgaagagaaatctggtgtccaagtggagcagcttaagcaagaaatacaaccacagtgatcttcgcaccagtgcttatggtttttatgtttatgatagtgtgtggactgtagctcgggccctggatgccttctttgatgatggtgggaggatttcctttacaaatgactcaaggttgcgtgacgtaaccgggggaactcttcaccttgaagccatgagtgtttttgacatgggaaacaaattattggataagatcagaaatgtgaacttcgctggggtgtctggccaagtgcaatttaatgctcagtttgaactcattcatcctgcctatgatatcataagcataattgggaatggcatgcggaccattggtttttggtcaaactatacaagattgctatcaaccacccctccagaagacctatattcgaagcctcctaatacttctcttgccaatcaacagctctatgatgtcatttggcctgttacatacaggtttataccttttggcaatggtactgaaaaccctcactttgaccaacttgcacagatggttgcggacaacgattttgatgcagcgataggggatatcgaaattacaatgagccgaactaaaattgttgatttcacccagcccttcattgagtcaggcctggttatcttggctccaatcaaaaagcacataacaaattcttgggcattcttgcagccatttacattggggatgtggtgtgttacagggttgtcttttcttgttgtgggtgtggttatttggattcttgagcatcgaataaatgatgattttcgtggctcgccgtggcaacaattaataactattgtttggttcagtttttcgactctattttttgcacatagagaaaagactatgagtaccttaggacgtggcgttttgatcatatggctatttgttgtattgataattcaatcaagctacactgcaagtcttacttccatcctaaccgtgcaacaacttgatacttctattagaggacttgatgacctgaaacatagtgattatcctattggtttccaagttggttcttttgtcaaagaatacatgatcaaggaactgaacatctcacagtcaaggctaaaagctcttggttctcctgaagaatatgctgaaaacctcaagctaggccccaagaaaggaggtgttatggccattgttgatgagcgcccctatgttgagctgtttttgtcaacttactgcaagattgctgttgctggtcaagatttcaccagtggcggatggggctttgcatttccaagggattcccctctgcaagtagacctgtccaccgcgatcctaacactgtcggaggatggggaactgcagcggatccatgacaagtggctcaagacaggcgattgttcatctgacaacactgagtttgtggactcgaaccagctccgccttgagagcttcatgggcctgttcctcatttgtggcgcagcatgtgtcctcgccctgctcatttactttggcatcacgctgcgccagtacctgagacatgagcagccgggatcagcaatctccgcggactcaggatcatcgacatcgaagcgcagtctcagaaaattcatttcgttcgtcgatgaaaggcaacgatcaccaaagaaaaacggaccatgagcctctcaaggagttcaatgccaacaacgccgatgagtaaccgtcctggtactggtattgatatagaaagctagtgcttgacctggaatacatcatctatgggccaatgatccttagtagccaggttcccggattgatggggttgaggaatgggaacgtggtacagtacttgaaaaagattgtaacactacggggacgagattgttcctgcgttttcggaacggaacaaatgtttccggaatgaggaacgtggacacgttcccggtttgtaagggccaatctatgcgtccttatatataggaaattagagccaaaagtctgtgtagtggattgtaatagtcgttttttgcgccccgaccgcccaaggaatccgagtttggcaaaactgtcaaattgtaaagtcaacccttgtccacgaataatgatggtcttatgaatggaatatatgtttgtttcaattgatttgttctttcagatttctctcgtcatgcttgcgatgtatcttctggccaccatgaactatttcacatgttaatttttttctcaaacacattggtttcacaaggtaagtttaacttactatatattattgccaaggtgatgcggcaaat

SEQ ID NO: 34521 - DNA, 1378 bp, Zea Mays
cgacctccaggaaggaccgcactccttagtccttacacccaccaccaccagacccctgtcgcactcgtgtgccggccggcgacggcgatgatggcgactggccgatcgctcgccggggtatactccgccagagccacccgccccatgcctctacgcgccggcgcacgggcgccctgcgccggtgccgccgcggccgagcctgcggccgagcacgtgcggaggctcgtggcggagttcgacccggcggtcccgctggactccgcggtcacgccgccgagcgggtggtacaccgacccggattttctccagctcgagatcgacagcgtcttcttccgcgggtggcaggctgtcggtcacatatggcaagtgaagaacccaaatgatttcttcacaggaaggctgggaaatgtggaatttgtcgtatgtcgggatgcaaatgggaaacttcatgctttccacaatgtgtgccgacatcatgcttcactccttgcatgtggaagtggtcataagacttgcttccagtgcccttaccatggatggacatatggattggatggcacccttctgaaggctacaagaatatcaggaattaaaaacttcaataagaatgattttggtctcataccaatcaaggtggctacttggggaccttttgtgttgatcagatttgatgatgagtccactgaagataatgtttatgacacagttggaaatgaatggttgggtagtgcttcagatctgttgggtacaaatggcattgacacttcactgccgcatatttgcaggcgagaatatattatcaactgtaactggaaggtcttctgtgacaattacctagacggtggatatcatgttccatacgcacatggggatcttgcatcgggtctgcagcttcaatcctatgaaacacttacatatgaaagagttagtgttcaaagatgtgaaagtgcaccagcagaaccagatgacttcgatcgcttagggacaaaagctctatatgcctttgtttatccaaactttatgatcaacagatatggtccatggatggacactaatctagctgtcccattagattcaaccagatgcaaggtggtatttgattattttcttgacaagtctctgctggatgaccagtgctttatcaagaaaagcctcgaagacagtgagcaagtacagatagaagacattgcactgtgtgagggggttcagcgtggcctggaatcgccggcctacagtgttggaagatacgctccgtctgtggagatggccatgcaccacttccaccgcctcatgcatgctaaccttaggagtactacagcgttgtgtcaaagaaagttggccaacaactgtagcaacggcagcgcattcagggagtatg

SEQ ID NO: 34522 - DNA, 2663 bp, Zea Mays
ggcgaccaagtgccggagtttcgcagtatttctgaaaccagccgtcgtacgtccatcccaccgggagcaccggcgacgatgccgccgcgaacggtgtccgatgggggagacgacaacggcaccgacgttgctagccgaacgtcgtcgcaccgccgcacggagcacgggcatgggtacaaagtcggcgtcccaccggagaagaacctcctcgccgagatctctgacgcggtgaaggagacgttcttcgccgacgacccgctgcggcagtacaaggaccagcccaggtccaagaagatctggctcggcctgcagcacatcttcccggtgctcgactggagcaggcattactccctcggcaagttcaagggtgacttcatcgctgggctcaccattgccagcctctgcataccccaggacatcgggtattctaagcttgctaacttgccagcagaggtgggactatacagtagcttcgtgccgcctctgatatacgcagtgatgggcagctccagggacatagccatcggcccagtggccgtggtgtcgctgctgctcggtactctccttcagaatgagatcgaccccaagacacacccgctcgagtacaggcgcctagccttcacagcaacctttttcgcaggggtcactcaggcagcgctcggattcttcaggctagggtttatcatagagttcttgtctcatgctgccattgtcggattcatggccggcgctgccatcaccattgcgcttcagcagctgaaaggattccttggaattgcaaacttcaccaagaaatccgatattgtatctgttatgaaatcagtttggggaaatgttcaccatgggtggaattggcagacaatactgataggagcgaccttcctggcattccttctggttgccaagtacattgggaaaaggaataaaaagctcttctgggtgtccgcaatcgcacctctcacttcggtgatcatatccacattttttgtgtacatcactcgtgcagataagcatggcgttgcaattgtcaagaacataaggaaaggcatcaacccaccttcagctagtctaatatacttcaccggcccatacttggcgacaggattcaaaattgggatagtagctggaatgataggcctaacggaagcgattgcaattggaagaacatttgcagccctcaaggattaccagatagatgggaacaaagaaatgatggctctagggaccatgaacattgttggttcactgacttcttgctacgtagccacaggttctttctcgcggtcagcagttaattacatggctggctgcaaaacagcagtgtcaaacgttgttatgtcaattgtcgtaatgcttactttgctactgatcaccccattgttcaagtacactccaaatgccatcctttcctcgatcatcatatcagcagtgcttggtttaattgactatgaatcggcttaccttatctggaaagttgacaaactggactttctagcatgcatgggagcattttttggagtcatattttcatcggtggagtatggcttgctcattgcggttgcaatatctcttgctaaaattcttctccaagtaacacggccaagaacagttttacttggaaaccttccacgaacaactatatacaggaatgtagaacagtatcctgatgctaccaaggttccaggggtgctgattgttagagtggactcagctatatacttcacaaactctaactatgttaaagagagaatcctgaggtggctaagagatgaggaggagcaacaacaggaccagaagttaacaaaaactgagtttctaattgttgacctgtctcctgtaattgatatcgacacaagtggaatccatgctttggaggagttggcgaaagctcttgaaaaacgcaaaattcagctggttcttaccaatcccgggccggcggtgatccagaagctccgctcagcgaaattcacggacatgattggtgaagacaagatattcctcacggtcggcgacgctgtgaagaaatttgctcctaagatggtcgataatgtctgatggagtttctgggtcatgtacagtacgagcaagaagtctatctattatgtggcaaagttcagtggcaattatggatttatagagcagaaacagaacagaacgggagtaaataacatggttcgcggaatggtaaataaagaagatgctccggagttggagtgcatcacgtttgcgaggtgtggttggatagaaaacagttggtggcctagttgggcgtctatgtcagtccttgtggttgtggagtctgttccgcgttggcaagcactcagtgatggagatcaaatgcttcatggatcagcagatatgggtgcctgatgattaacatatcatcattgatcgtgaaagaagagttacctcgttggggtttcaggctttgtgtatatcttacagtacttagctcctttccttgtagtttaagttgttatgatgagcttttacatttggcttatatatgtatattctgtaacgttgatgcattgttaagtgttcctgaccccaaaaaaagggggtgcaaaaacgtgattgtgaagtgtgaggaatttgcttttatcgttcctactggcatgcatgtgcaagatgtattgggcactcatatctgctgatccatc

SEQ ID NO: 34523 - DNA, 1846 bp, Zea Mays
aaacacgactagagtgggtgggagactgggaaagacgagacagcgagacaccactgagacgagagtcagccggcaggtgagacatcgcaggggaaccagctctcaagacggccgacggccggcttgcctacctgctcccatccttcccgagggaccgagaaagataagaaaggcggtggtcaacttgtgtcctgaggtgcccgtagaagcccaaggacaagaaacaaggagaagagtagatctacatctactccaccgatgagcgcgtctcggttcatcaagtgcgtcaccgtgggggacggtgccgtcggaaagacctgcatgctcatctcctacacatccaacactttccccactgactatgttccaactgtgttcgacaacttcagtgccaatgttgtggttgacgggagcactgtcaacttgggtctgtgggatacagcaggacaagaagattacaatagactgcgtccgttgagctatcgtggtgctgatgtttttctgctcgccttttctcttatcagcaaagcaagctatgagaatgtctctaagaagtgggttcctgaattaaggcactatgctcctggcgtgcccataatccttgttgggacaaaacttgatctgcgtgatgataagcagttttttgttgatcaccctggtgctgttccaatttccactgcccagggcgaagagctgaggaagctaattggtgctgccgcctacatcgaatgcagttcaaaaacccagcagaacataaaagcagtgtttgacgcagcaattaaggtggttctccagccaccaaagcaaaagaagaggaagaagaaggtgcagaagggatgcaccattttgtaactacaaacggtagagggcaacagtctggctgcggcgctgctgccaatgataaccatcgcctccttgctgtataatatatcgcctgatcatgccaccagcatgcacaagggagatggtggttttaggatccttgtcctactgtgttgtgtagaccaccgggtgtagttgactgtatctggttgtttgtatgtatgtacaagacaaaactagcactgcagatggtatggtaaggcgtaagcaaatacaatatgacactggtccagttccaggaatgaatggaatatgacattggtccgagatttgcaatacaatacaatatcatcatccaggaagctcatagctgctgctagtaggatactccggtcggagtagctaggtggagacaaggcaacggaagagcagcacagccgccgctgcggtaatggtgcacatgagctggccggggcgcggcggcgtggcgttgcacgaggggcgatccggagcgctgaagcagccatgggtctggtcgatgcccttgccgccggcctccaggagaaaggtggagttggggctgccgctgctgaagaggaggcaccagaagaagggcccgcggcggtcgaagccggcgcccacctgggtgtgctccttgccgcggatcaccgagagcgcggtggctgatgccagcgcgtcctccgggccgtcgcggtcccggtggcagccgaagaggcggccggagatgacgtccaccgtggggagctccacgccgcagttggcggcgtagacctccgtgatgtgggcctcgggggtctggcacgccatcgtgttgccgctgctgcaggcggcgccgcccgtggtggccgccatgcactcggagatgtactgcagcgccatgcacccgaggcctctgctgttgcgcagcgcaggcagcctgctcgcctccctcttgccgttgatgagggccacgagaggatacgcccgccggcagcgtcctggtgcagagcagcagaagaatcac

SEQ ID NO: 34524 - DNA, 1581 bp, Zea Mays
aagattgcctgtcgtgtggtggagccacagccacatgccgatgactgcctaatcagggagaagccgtcgtgggcaagcggggaaaggcgataatcatggtaccctcactggtggtgcgtgtctgctgtctaggcctgaagctggctagttcggcgcggctctccccagtccccaccactgtcattgtcagttggttctgctcatcgccacctacgagtttctccctgcgcctttggagactcgctgactggggaagatggttgtccaggagttcacagttgatctcaacaagccccttgttttccaggtatgcctcgctcttagttgctcctttgcgatggttgctgtgaatcttagcctttttgaagtagcttatgggattctctctcgcactttacaagttattatgtacttttgagcttgtttaatgcagctttgggtcttttcgcaaccaggccttagtgttagactgtgctttctcctcagcaataattgtggcagattctatcatgaaagcggaatctcatgtagtagttgtaaacttccgagtttctgagtcgatgtccagctgcttcacgtggttcgcattcacataaccatcttctggttgtttcttgattttgtggatgcaggttggccatcttgaggaacggtaccaggaatgggttcaccaaccgatcgtcagcaaggagggtccacgctttttcggaaatgatgtcctggagttcttgactcgcacgaagtggtgggctgtgccaactatatggctgcctgttgtctgctgcctgctcgtgaaatctattctgatgggtcataccgttcaggacgtagctatgatggctctatttgggatatttatttggacgctgatcgaatacactttgcaccgcttcctgttccacattgagaccaagacctactggtggaacaccgcgcattaccttcttcacgggtgccaccataagcaccccatggactcactcaggcttgtgtttcctcctactgcaacagcaattttgtgtttcccgttctggaacctggtcgcgttcttcgcaactccctctaccacacccgcactgttcggaggcggtctgttgggatatgtgatgtatgattgcactcactactacctgcaccatgggcaaccatccaaagacccagcaaaacatctcaagaggtatcacctcaaccatcacttcagaatccaggacaagggcttcggcatcacctcatcgctttgggacgctgtctttgggacattgcctccatccatgacgtctgggaagaagaactgacgcacgtaactcaattcttggcatgagagattctaggggacctgtaatatatattcaagctagggataatcctggatctgtcttcgtgcgatgggttgacatgttcattcagttctcaaagttcttgtagtgtactgattgtctgttgatctattctgaatgtgatgatagtacttcgctgcctcagccttctgtgcattgccagctgtaccgaaaacggcatgttttacttaactcttttcgtctagttcttaaaatcagagcatcagactcttgcaaatgcaag

SEQ ID NO: 34525 - DNA, 2352 bp, Zea Mays
gaatgctatacagagagaggctgcgttgcctcgtatccaatctaacggcggataacaccgagtggcgaccgcctgacgcgcccgtgtcggcaagccgccgacgacttgacgtggggcgggggaaacaaaacaacgcgggcagcgctacggcaagcgcgtccctgccacggcgcggacacagagagtggaaaccggaaggggggaagagagatggattcctccacctcggcggcggcggcaggggaggcggccgtgccgccggaggacgacgtctgctccgtctgccacgaccgcttccggatcccgtgtcaggcgaactgctcccattggttctgtggagagtgcatcatccgcgtttggaattatggacctcctgtacaggcttgcaagtgtcccatttgtcgccgccttataaatctactggtgcctgctgcattatcagggcaggaggatggtccacaagctcaacgtattctaggagagattcagcactataactgtatatttggtggagcaccacgcagcctaactcagaggttgcaagacctacccttcttcatccgaagactgttcagagaactaatggacccccagcggaccctcccactcgtgttcagggcgcggatgctgatgatggtcgcactgagtgcaatttatgtgctgagccctgtcgacattcttcccgaaagcatgctgggcctctttggattcgtcgatgacctgctcatcctgctgatcgtgttcctccacctcgccgcggtgtaccggtcgttgctcctgtaccgccacgggggccagtagaagtcgctgtgcataaaccgtttgtttagctggtttccatgtggagttctctgagatcgcagcagcggatttggaagatcgccgactcgccgagtagatggcaacgtcacggacggcttagcctgtccctgctctgtaccattctactacgcctgtttttctgagactctgacacggtgaactgaactttggttggttgatgcaagtgaatttcccttcgttttactcgtcaggaaaagaaagggaaagagtttgcgttcgtttgtctttgtttctgctctttggaagttggaattgaaactgcactgatgtttgcgtttcaggaactgcattgacgtggatcctgctcagttctcttagcatttacttatgggccaagtttgtagaagtttagtgggctgtagacccattggtgtcatgttgggccaccgcgacgagtaaagaagaggtaggggatcgccctggccgggtagttggctcttgcgggagggatgagatgggaatgggatggcgacgggcgggcgtgtgcggctgcaagcggctcggaaggggcacggtggagacgcagcggaccctcgcctcttctcctgctcctgctgctgacctgacgagctgagcccacggacgagaggggagacgaggaggggcacaccacgcaggagaccggaggagagcgcgcgcgcggatccacctcgtatacacttcctcttcttctccgtgtccttggctcagatttagttgctgcgccgcttcttaggattgattgctgcttcacccggtgatcgcgtcgtcatcttcgcgtttgcttaatcgcctggttgctgcatcggttttttttttttgtgtgtgtgttgtgtggttgggggtgcgggcacagggtttcctcctgcttagcctggattggtgtaggatttcgatgtgatcgatggcggccgaagacaaaattttaggtttcgttcggttcactgcgcgtcttgctgtcctctctgctaggaatcacaaattttagtctcccctgctctgattgataccagctttctggtgctgtgcaggatgttggcaagaccatcagcaccgcctttggtgactgctcaaactcctgaagtcggcatcttcattacagctcgcaacgtctcgggtgcactggtcgccaagcttcctggtaacaaaaacaagtgtggaggaagatcgaatgtccggcagcggaacatccaacctgggaaaaggggctgtcgtcgggagtggcgggcgctctcagcagctgaccaagcgcaggcttctaccttggacgtagatgaggagtgcaaacgggtgctcactccattgggtttctccagcgaagacgccgagaagatgctgaagaaagcgtttggctggacccactcgccgtactggagcgaggagagggagaaggaggttccgaccgccgaggcggtagctggagtgctggactacatcaggagcctggggctgtcggacgaagaccttggcaggctgctgaagaagttccccgaggttcttgggtgcgacctcgacggcgagttctgcaag

SEQ ID NO: 34526 - DNA, 2453 bp, Zea Mays
cggcccagtagcacgagcagagaataaggaacatccccacctgttttctgtttctcttcttcactacacctggcgtgcgcgtgcgcgatcattagggcggccgccgccgcccaggtcttcgtcgggccctttgcccgccacaagaacccagcacaccagcccgattaggttgttctttacggttacggagcaagatccatttagccatggtgctgccgcagttcgcttttcagaagttttgggtcttcaattgaacccttgagtttaagtccgagcagccacacaaccatggctgtggctgccggcgtgtcggaaccaccaattgtggagcaagtgatcactgaattctttgccaagagcctccacatcatcctggagtcgcgctcaccctacgactcatcgcggaacttcatacgaccctccccaccgtcgtcaccactggctggcagccagccgcgtgaccggtggttcaatcttgctctccgggactgccctgccgcacttgagaattttgacctatggagacagagcaaccttgagcctctggtcattgacattgtcctccttcaacgtgacaataccaaaaccaccagtgtcggggccagcaggatcattgagaggtggataataaagtatgaaactagcagatctggaaatattatcaagaacagtggcaagaaagctagaagcggctcttctcaggatcatagcttgtacaggagggcatacagtgggtcaacagtgttattccggtcattatatctggttgtcaggctcttgccagcataccatctttttcaggagctcaattcatctggaaggatctgtcccttgaacctctcacacaagatttcatcatttgttgagccattcacccgcgcagaggacgcagagatgaaacactatgcatttgctccgattgaaactctgtttggttccttaagcttgtcagtttcgtatgtgccagtgctggacttggctgcagtaccagagcaatcctcaccgatgccaccagagcttataaaggattatgttggaagccccacaacagattttcttaggaagcttgattccctaccttcagatggcattgcacctggatgttttccaatgaccaggaggcacagttggagcactgagcatggagttagacagtcggcatcaccatttcctatgagttcagaaccccatggatgcctacagccacgtatgcctactgataattctccaacagcatactcacatccacataacacaccatcatctgggaaggagagaaatacagtaaatgaagagtattatccatcaccacctctatcaccatcaccatcccattcgccttctagctacccaagaaatcctttcttccgatatgagagtcctccttcaagtattcccacagtgatggccggtggaggttgtagcagactgcctccttctccacgtaggaatgataagcaacaatgctcatctcaaaatgagaatttgtcacattctcccaacaataaatcaatagtatcaaaggatctggtcaagcttagtgggtttcggaatgagaagtctttgcaaaaggttttatcttttagtaatgatgatttggtgtattttcgtggactaaagttgacccgtacctccagcaaacttttcatcatggatgagctggatgagcgggagttggtttttgcatgggaagataaagacaccatcattgatcagcttaacagggttgatctttctgacagggaggaccatgagtcgagtcaggatcttggaggctcgttaacgaggtctccagatgcagcaatcgaaccttcttcactccagagggtaatgaccgaggaacatggcagcggcgcatcaagctctgcaggggtgccttcttctcttctgaggtcaaggacagcggcggacacgctggaggagctgaacaagtacaaggagattagagaatcaatactgaaccgcgacaaagggcattcctgcagcaccaagctgctggaggagaaacccgcggatggagatcggtagcaatatacgaaagcctgctgtacataagtagtagaagctagctgaccgtccttaagttgctggtgtctgctgagatgattttggaaactaggtagctgttaggagtgaccaataactcttatatatttacatgatactatatatataaggtatggaagacatatatcgccaatgcatccatccatccaggtgccctgagatgatgacccacttgctgggttgtgtaaagtcgagatgtttaactgaagttcatgcagtgaaaatgtgacacgcaatcaaatcagctcagaaatgcttgtcagctggttaagcttggttctgttctgtcgaccatgtggtaccggagccatggaatgttttgaagctgttctctattaaaaaaggtttcttctttgtttttcatcctgtggtagaaagaaacacgg

SEQ ID NO: 34527 - DNA, 2524 bp, Zea Mays
atggcgtccgggcagaagcagcagcagcacctccctaacgtgccgagatggacgccgagcccgccgcggcgccaggcccgcggagacgcgcacgacgaagaggacgcggagtcggcgctgggagcgtcgtcgtccatgcgcagcaccgacgaagcatcgttccccttcggcagcggccgcgcgcgctcgttcccgttcccgctgactcagccctcgctggagatcagcgtggtggcggcggcgaacgggacagccggtagcggcggcggcggcgccgatggccccgtggcccgcgagaagtcgctgcgccgggccgacgaaggcgtggtggtatcctgggaggacctgtgggtgtcggcggccggcggtaataagggcggccgcgtgcccatcctctgcggcctcaacgggtacgcgcgccccggcgaggtgctcgccatcatgggcccgtccggctgcggcaagtccacgcttctagatgctttggcagggaggctgggttctaacgtgagccagaagggagacattctgatcaacggcctgaggcagaagctagcctacgggacatctgcgtacgttacgcaggaggacgtgctgatgacgacgctgacggtgcgcgaggcggtgcactactcggcgcagctgcagctgccgagcgcgatggcggcgcccgccaagcgcgagcgcgcggaggagacgctgcgggagatggggctggaggccgcggcggacacgcgcatcggcgggtggatgcacaagggcatcagcggcgggcagcgccgccgcgtgagcatctgcatggagatcctcacccgccccgcgctgctgttcctggacgagcccaccagcggcctcgacagcgccgcgtcctaccacgtggtcagccgcatcgcgcgcctggcgaggcgcgagggcatgaccgtggtcgccgccgtgcaccagcccagcaccgaggtgtacggcctcttccacggcctctgcctcctcgcctacggcaggaccgtcttcttcggcgccgccgccgagaccaaccagttctttgctctgagtggattcccctgtccatcactgatgaacccttcggaccacttcctgaggaccatcaacaaggacttcgacaaggatatcgaagaaggcctgaacggagagaccaaaatgaccactgccgaagcaatcgacacgctggtgaactcgtacaaagcctcggcctacatggagaaagtgacgaggcagatagccgacacgcgggaagctggaggggcggtggtgaagaaggaatggcaggcaagtttcctgacgcagtccttggtgctcaccaagaggtccttcgtgaacatgtacagggacctgggctactactggctgcgcttcgccatttacatcatgctgtgcctctgcgtcggcaccgttttctacgacgtcggccacagctacggatccatcctggcccgtggctccctgctcaatttcgtcgccgctttcctcaccttcatggccatcggcggcttcccgtcgttcgtcgaggacatgaagatcttcgggcgggagaggctgaacgggcactacggcgcggcgccgttcacgatcgccaacacggtgtccgcggcgccgtacctggcgctcatctccgtggtgccgggcgccatagcctactacctggtcggcctccagagcagcttcggccacttcgcctacttcgcgctggtgctcttcacgaccatgatggtcgtcgaggggctcatgatgatcgtggccagcgccgtgcccgacttcctcatgggcatcatcaccggcggcggcatccagggcgtcatgatgctcaacggcggcttcttccgcctccccgacgacctgcccaagcccgtctggcgctaccccatgtactacatcgcgttccacaagtacgccaaccagggcctgtacaagaacgagttcctgggcctcaccttccccagcaaccaggcgggcggcagtgccactgccgccaccctctccggcggccagatcttgacggacttctggcaggtggagatggggtacagcaagtgggtcgacctcgccatcctgtgcgggatggtcgtgctctacaggatgctcttcttggctatagtcaagctcactgagaaggtgaagcccatgatcaagggattcaggttcaggaacaccgcgcagtccgtgcacgtagtcgacagaggctccggcagtccatgaatgatgaatccacgacacagccgatcgacgacaaagcccatgaagaggcaacgcgcggtacttgtcaaccgtagatgtgcgatatgtatagccagcgaagagccagcagtgcaataatggatatgcaagcgaagtacgtgcaatattgtcactgtcggaatatggttctttgtcaggtgcaatgaatatgtttgtgacactcggcaaaatagtctgttccgatattatgtcattatgttctcattgacaacgaggacatatatttaagcttgcgtaaggctactttaaggtcttgttcgtttgtgtcggattg

SEQ ID NO: 34528 - DNA, 1017 bp, Zea Mays
aatttatatatacgataaatgtacaagtgactcaaataatcatgtaacctttgatttggaaccaaaaagccagccggagtacctcacgcctttgatttggacgatcgacgtctgacggacggtgtgcctcatgcctaaacaggcacagctaaccctagttgatattgctcttttaactaattgggctaatggaccaaaacgccagcccacaaggcgcaagaacagagagctgtagagcacagcacatcagcaccggccaaacacccagactgctagatgagccaaccgggtacctgactatccggtacccatatccgacccgaggtttgtgggtagttaccaggtaccagtgactccatatcctacccgtatccggatgtgcattatccgagtagtacccgtatccatcccgacaacaaaaatatttgaatccgtatccgaaaattcggattattttgataaccgtatccggtacccgtcccgttttcacccctaggacctactaaggtctaatagctgtgctattttttttattaccttcaaattagcgatatataaataatatttggtctaattttaaataattatattatatatataattaagttgtcgcctcgccttatgccttttcgcttaaaaggtaaaaaggagggcgctcaccttaccacattaataactatggtgtggtttatagttaaagcaaagtcagctcagtttttccaagcatgtttgacaatggcattaaacattgtgataaataaccatcaagatggagaaatatcagaaaatatgaaataagacaagacacgaaatagtgctatatgtataagctaacccaacagtttccacactttgcccttttataatatataaaaaacataaagcatcatacttcaaggagccaaggccagtgaacacctgaaacaaggtaatcaacataccttaacagggaggttatcattgtatggatttcggagatgatgggttttctgaaatgacaactcacaaagctgcagc

SEQ ID NO: 34529 - DNA, 1573 bp, Zea Mays
ttcacaaaacaactgtttgttattttcttctcccgttcacttctctttggcccgaaaccgagagctagtgcttgattcggtcgtttttgggcaccgaacacgttcttgggaccgccgccgccgccctacttccagtcccagctgctcaggtctccatcggcctcgagccctttgccggcgacgagcactcacaacaccaggctgagcagcagcagcagtggtgtgttctggcttgtgtgggacctagaggaagcttacacaacagggaagagtattgtgttagggtgtaacaatgtcttcttcaatggaatcgtcataccttcctgctacaactgagtcattagcccaagctcaagaggctaaggatgcttcagagtccatttcaatcctttaccgtgtcattcaggacccatcttcttctgctgatgcactgagaacaaaagaagttgcaattacaaatcttacaaactacctcactaaagaaaacagagctgaggagctgcgtaatcttttgacccagctcagaccattttttgcagttattcctaaggcaaagactgcaaaaattgtccgtggaataattgatgctgtcgccaagatacctggaacatcagatcttcagatttcactctgcaaggaaatggtagaatggacccgtgcagagaagcgtactttcctccggcaacgtgtggaggcaaggttggcagctctcctgttagagaatcaggagtatactgaagcccttaccctgcttactagtcttatcaaggaagtcaggagacttgatgacaagttacttcttgtggacattgaccttttggaaagcaaacttcacttctccctgagaaatctgccaaaggccaaagcctccttaactgctgctagaacagcagcaaatgccatttatgttccacctgctcagcaaggcactattgatctccagagtggaatcctccatgctgaagaaaaggattacaagactgcttacagctacttctttgaagcatttgaagctttcagtgcactggaggacccgaaggccatctttagcctgaagtacatgctcttgtgtaagataatggttaaccaagctgacgatgttgcaggaataatctcgtctaaggctggcctaaaatatctgggtcctgatgttgatgctatgaaggctgttgctgatgcatactctaaaagatctctcaagtattttgaaactgcccttcgtgattataagtcccagctggaggaggaccctattgtccacaggcatctttcttctctgtatgatacactgctggagcagaatctctgcaggttgattgagccctactcaagggtggagattgcacatatagcggagatgattgaattgccgattgaccatgttgagaagaagctgtcgcagatgatcgttgacaagaaatttgctgggacactagatcaaggtgctggctgcctcattatctttgaggattctaagaccgaggaaatcttccctgccactctcgaaaccatttcgaatgtcgggaaggttgtggacagcctttatgtgaggtcggccaagatcatggcttga

SEQ ID NO: 34530 - DNA, 1936 bp, Zea Mays
agaggggacaggggaggcagaggacggagagagtcgcccaccgccgccaccaccaccaccacaggcgccaccctgctcgatcgagcaagcagtgtgacattatagctaggctgctgcacatgcaccgtgctgtgctggtcaacgatacacttctcttttcaccaatacagtcacgaagaagtactccagcagcagctgcagcagcagctgtattatagccggctaccaccaccgatccgtcgaccggagatgcagccggcctgctccggcgccgcgcttctcgccgccttcatcgccgtgctggcgtattcggccgcgcgctgccgcggccagctcgccgacaactactacgccggcaagtgcggcaacttcagcgtggaggccatcatccgggacgccgtcaaggcccgcctcgcgtgggacaagcggatggtcgccggcctcctccacctgcagttccacgactgcttcgtcgccgggtgcgacgcgtccatcctgctggacgggcctgacacggagaagacggcggtgcagaacagcggcatcttcggctacgacttcatcgacgacgtgaaggcggcgctcgagagagtttgccccggcgtcgtctcctgcgctgacatcatcatcgccgcgacaagggacgccgttggcatggtgagtcaccctgcccggcccggccctacctacgagctacatgtactacgtgaacaagcaataatgccgattggttttctttctgaagaatcgcaatgtcgagctgaatggcgatgattgacttcatccgctgctcttaccttttgacatatgatgatttatcttttggttttgctaagagcgagctggcaacggcttcgttcgatttttaattattcattactaggcaggctataaataccacattgtgaatccgtttattgttgctttaatacttaaatactggttacaaatgacgaattaagtgacgatttatctgcgctgtgaacgaattattcaatgcaagtccagtgcggggggccgagctaccaagtgcagctgggcagaagggacggcatggtgtcgcaggcgtccatggcgagcattctgccgggccccaacgtcgacgtccccaccgccatcgatctgttcgcgcggaagggcctcaacagcttcgagatggtcagcctcatgggcgcgcacacggtgggggtgacgcactgctcggtgatccacgaccggctgttcaacttcaacggcaccgggtcgccggacccggccatggacccgatgtacgtgtggatcctgacgacgtacgcgtgccccaggggccaggccttcgacaacatcgtctacctcgacgacccctccagcatcctgctcgtcgaccggagctactactcccagatcatgaagcgccacggcgtgctgtccgtggaccaggccctcggcgacagcagcgccaccgcgtggatggtcaagttcctcgccaccaccgacttcttcccctccatgttcagctacgcgctcaacaagctcgccgcgctcgacgtcctcaccggcaccgacggcgagatcaggaagagctgccggaggaccaactgatctgacggatcggatcgatctgccgcagttgttagttgattgatacacagagataggttaatcaatcattaccagcagctacctaatagctggctagacgagcagctgctgtgctgtgagacgcaaagggggaaaaaaggacaagagaaagcatatcgaaccaatggatcgaggactgagggagcattaccagtggtagcatttggttttaccgtagtaaatttgagtaaagattcaatttactggtgtagtacaaggatgcattttgtgtgtgtgtgtgtctgtacgctgattcttttgtacgtggccgctataaaaatatacgttccatgcatatacaccactaatttatact

SEQ ID NO: 34531 - DNA, 2170 bp, Zea Mays
ctctccctttaaatcgagcgccgcttcctctccgccgctttctctccccttcactcgagcgccgcttcctctccccttccatcgagcgcagcgcctgcgccgccgccaccactccgcaccgccgccagttccccacttcctccccacacccgaatcggattgaagccagaaggcaaggtgaagagtgggcttgggtaacggttgcaaagagatatccccaacagttgcagtcactcgcatccagtcggctcagctatggaggaggactcatcagcgatggagccgaataggctgcgcgaggccgaggcggcggctggggagctgaagaggctgcgcgaggccgggcagtctcagtacatgtaccggtctatcgccgacgccagggttgtcggcggccgggtctgcctcttcgccgtcgtctccgagatcggcgctaccgtccacagccgtggcacggatttcactgttacgttgagggtaatagatgaatcatacaagtctggaatatctgtaactttttttgctgacagcactgcactattgccttgtgtgaagtcgtgtggagatgtgatcagtctccataacgtcgtgtccatatcagacttctataagatatcatgacagcgaacacgacaaagattttttaaatcagatgagaacgtggctccctcaaggtctgaaggatttcacttcaaataattccgaattgtatttaatgaatttgaagtccgattctacttttgatctagtatgcaaggtttttcatgtacatgtggagaacaacaattcaatattttatgtttgggatggaactgatacccctgcagctgagtttccagcaattttggatgctgaggcagccaaatcactctctctacatgaaggcccccctctatccagggagattttatgtacaatgccagatttcggaactgtcctaaggattttttcagatagatttgtcaataaagtatcatatatgcaaaagaacatatattgggccaggttctggaacattacttgcaaacaaaactttggcatttggaaaggtactttctcggactccggtggagttcgcctattatcaaacaaagatgatagcgttgttgatcgtctaaagatgtatgacagccgcatcgccaaccgagttcgtcgtcggccgatggcaagcatcccctccagtgttactgatgtagaatacgaggatgcaggttacgcttcattaatgaagtctttaactcatcatgatgtactgcttctttcccattttctccagttatttattagttttatttctgtttttgatttggtctaacattatccaacccccctgataacacgcgaacgtatttactttcagttgtatcccagtgatctatatatctccctttccatggaaaaactgtatattttctgaactctgattataaaagcacatccatgtgaagctagtttgctttcaactggtaactgtcatcttcggttgactcttgaggatcctacagcgagaattcatgcgtatgtccacaagaatgatttggtcggattctttggtggtggttttttgacagcagaagtgatagtaaaaaagatgaacatggtactgggcatcccggaaccacaaggcagcgtggaagttgccccctcgaccaggaatccaccttggatatggtgttgcttgatgtcatactatatggacaaaaacgatccctgggtcagcagaaagtaccggatctatagcacagccatcagggattgagcagagggatgctgctggaatgtgcaggaacaaacttgtaaatgaatgggacagatgctgtgtagtattggcatcttgcttgtagaagaggccatatgcttttgcaggtgcaatcagtgaatcattccatactgaacactgagaatagcacctcgggttcattctgtatgtgcctacactctagattgtcttttgggtgctcatcacgaaacgtgagcatatcttttggaaacagagacctgcgtttgattcctgtgcttgttatgttgtgattgatcattggggggaggttgagcttttgagccagtataaaaatactgaccggaccatcaatattattgatcattgggagtatgagtttttggacggtttctatttctgtattggtagatataaattttttttatccga

SEQ ID NO: 34532 - DNA, 1867 bp, Zea Mays
aagactcgttttggaccaaaatctgatcatggaatggccacttcatctgcgggaagtatgactcctaggtctccaataacaactccaagatcaaatcatatagacatgcttttagccggtaaaaatgcaattaatgagagtgatgatcttccacagattgtcgaacttgctgatattgcacgatgcatagcaaatactcctctggatgaagaaagtgcattatctcaaatggttacctgcatagaagatctccaagaaattgtcaactgcaggaagcatgagtctctcacagtgcagacatttggaacacgaatagaaaaactacacagggagaagtatctgcagctctgtgactcggttgatatggacaaggttgattcagcaagcaccataatggatgaggaagacaacgttgttcgtagcttgcgcgcaagtcctgtccatccaatcaaggatcgcacttcaattgatgactttgaaatcatcaaacctattagccgtggagcatttggacgtgttttcttggccaagaaaagaactacgggagacctttttgctataaaggttcttaggaaggcagatatgattcggaaaaatgctgtcgagagtatattggctgaacgtgatatattgattacagtcaggaacccttttgtggtacggtttttctattcgtttacctcacgggacaatttgtatctggtcatggagtacctgaatggaggggacctttactcattactgaggaatttagggtgcctggatgaagacgttgttcgtgtatatcttgcagaagttgtactagctttggaatatttgcactctatgcacatagtccatagggatctaaagcctgacaacttgttgatagcccatgatggacatattaaggttttgggttgtccaaggttggtttgattaacaacacatatgatctgtctcgccctgttgttagtggggcttcactgtatggagatgatgagcctcagatgaatgaattcgagcaaatggatcaccgagcacggagacaaaatcgttctgctgttggaactcctgattatttagcaccagaaatcattttggggacaggacatggttgcagtgcagattggtggtccgttggtgtcattctatttgagctcattgttggcatacctccgttcaatgcagaacacccccagacaatttttgacaatattctgaattacaaaataccttggccgcatgtcccggaagagatgagttttgatgcacaagatttaattgacaaattattgaccgaagatcctcatcaacgactaggagcaaatggcgcctcagaggttaaacaacatccatttttcaaagacattagctgggatacccttgctaggcagaaggctgcctttgttccctcctcagataatgcatttgatactagctacttcaccagtcgctattcctggaatccatcagatggaaacatatatgaagcatacgagtttgaggattccagtgataatggaagccttagtggaagcagtagttgtctgagcaaccgccaagatgacatgacggaggacagcgatggcctcaatgagtttgaatctagtgcaaatgtcaattattctttcagcaacttctcgttcaagcgtgcagcggttggatcaccgtctaaaagttcagaatgcttgcttgcacgcttgcacctaagacctgcttgcacaatattcgttccctatttgtaaatatcaacatttgcaattgcaatgttatcgcaatagcaattgtagtactgctgtacctgtgagccagatcttgaatgctacaaaggcagtatcctttctttttagtatgatgatatatgcagctcctgcgtgtttgagac

SEQ ID NO: 34533 - DNA, 4160 bp, Zea Mays
cctcctccctctctcccccgtgtccgtccgccctccgcctgtggcctcgcctccccgcattccgctcgcccctccctgatacggtgataccgcgatcagcggggcgccccgcgcccgcctcttctctctctctcgcgcgcgcgagagtagcagatccggcgattcgcattccgctcgcccctccctgatacggtgataccgcgatcggcggggcgcccgcgcccgcctcttctctctctcgcgcgcgagagcagcagatccggcgatccgcaggccctccgccggcgccccgcctgcccgacgatctagatccaggtatttggggaagcatctgctatcattttgttttcctcaaagtaatccaaggaaagttgtttccagatgtcaactgcaaaagtgttagatcctgcttttcaaggggctggccagaaagttgggacagaaatatggcggattgaagattttaagccagttgcactgccaaaatctgattatggtaaattctactgtggagattcatacatagttctgcagacgacctgtactaaaggtggtgcctatctatacgatatccacttctggattgggaaagattcgagtcaagatgaagctgggactgcagccatcaagacagttgaacttgatgccatccttgggggtcgtgcaattcaacatagggaactccaaggttacgaatctgacaaattcttgtcatacttcaagccttgcattatacctttggagggtggttttgcctctgggttcaaaaagcctgaagaggaaaagtttgaaacacggttgtatatatgcagagggaagagagctattcgggttaaagaggttcccttcgcccggtcgtcattaaaccatgatgatgtgtttgtcttagatactgaaaataagatataccagtttaatggtgctaactccaatatccaagaaagggccaaagcgttggaagtaatacaacatttaaaggagaaataccatgggggtgtttgcgatgttgccatcgttgatgatgggaaactacaagcagagtcagactctggtgaattctgggtcctttttggaggttttgcaccaattgggaaaaaaactgtgagtgatgatgatgttgtacttgaaactacagcaccaaaactgtacagtatcaatgatggccaattgaagctggaagaaacagctcttacaaaagctgtgcttgaaaataccaaatgtttcttacttgactgtggggctgaaatatatgtatgggttggacgggtaacacaaatggaggatagaaaatctgccactaaagcagttgatgaattcctcattaatcaaaagcgtccaaagacaacgagggtaactcaagtgattcaaggttatgagagtcatgctttcaagtccaagtttgaatcgtggccagtgggtaatgctgctgggaaccctggcacagaggaagggcggggaaaagttgccgctttattgaagcaacaacgcgttgatcccaagggagctgcaaaaagcaccactccagtaaatgaggaagttcctcctttgcttgatggcggtgggaagcttgaggtatggtgcgttgatgggaacactaagactgccctgccaaaagaggacattggaaagttttacagtggagactgttatatcattctctatacacatcattcgggcgacaagaaagaagagtactatctcagctactggattgggaaggatagcttggtggacgatcaagtgtcggcatctcaaataatcaatacaatgtggaattcattgaaaggacggccagttctgggccgtatataccaagggaaggagccaccacaatttgttgctcttttccagcccatggttatcttgaagggtggaatcggatctggatacaagaagctcatagaagaaaaaggtgctatgggtgagacttatactactgaaggcatagctctaattcgagtatctgagacatctatctacaacaacaagactcttcaagtagatgcggtagcaacgtctttaagctcaacggagtctttcgtactgcaatctggaaatgctatgtttacatggtttggcaattctagcacatatgagcaacagcagtgggcagcaaaagttgctgaatttttgaagcctggcgttgcagtgaagcactgcaaggaggggacagagagttctgctttctggtttgctcttggagggaaacagagttatacaaataaaaacactcctcaggatattattactagagagcctcacttgtatgcattctcattcaagaacggtcagttgctgttactgagatcttcaacttttctcaagatgatttgttaactgaagacatgatggtacttgacacacatggtgaagttttcatttggattggtcagtatgtggaatcaaaagagaaacagaaggcatttgacattggccagaaatacgtggagcatgcaaattctattgaagatctttctccacatgtaccactatataaagtcatggaagggaatgagccatgcttcttcaagacgtacttttcttgggataacacaaaatctttggttcatggaaattccttccagaagaaactctcgctgctttttggattgcgttctgagggtgcacctaggagctctggtaatggtgggccaactcagagggcatctgcattagcagctctatcatccgcattcaatccatcatctcaacaaaggctgtctaatgagaggcctaaaagcacaggcgatggacccacgcaacgtgcctcagcactggctgccttatctaatgcattcaacccatccttaaaacccaaaacatcacctccatctcgctcaggtcgaggttctcaaagagcagctgctgtagctgctctatcctctgtgctgactgctgagcaatctggatcttcagaatttctacgatccaaagctagcaacacagcatataagactgatgtcgaccggattgtcataactccagctggcccatcaggcccatcttctcctcagtctgaagctggggagtccaatgtgtttcaccaggaaaaagatgctgcagcagatggggcaccgcctgacactgatggagcagtggctgaggccggagaggaagaaacaacggaaaatgttggtgaagcgacatttagctatgaccgcttgatatccaaatccaccgatccagttcgtgggatagattacaaacgcagagaggcatacttatcagatagtgaattccaaactgtttttggcatgaccaaggatgcattctaccgacagccaaattggaagcaagaactacagaagcgaaaagcagatcttttctaaagagaacaagccttgttaccagtggtctgctacagtatgcaatcctcttgtcgtgaatggtcggtcccatgagagttggtgtattaatatattgttggtcgtttctgaggacggtctactggtggctttgcacggttgtttcttttttggcaaccaattttataggtcaattcttttatttgtatatggcctgggttgtgctgcttgcgaggtcctaagatgcttctttgttcttctttgtgaatgtccatatgtgtatatcattttctactcgccagtttgttacgtacgggcatttcctggcaggttcgtcattgcattgtcatctatatgtcttgcacacgaaatatttgtgctgtccgttttgctgttaatggttggcagttgtttgggatttgaacacttggctgaattccatcattttcgtgtggctgttggcgcatgcttgtcatttctaaatagaaaattagatttgtctagtgtctggatcagcagttgtagaaagtggaattagaccagattatgctcattgttatctcatgttttttatcacaaacaaacacgatcattctactggtaagcggttatttcatgtaccgcctggagccctggacacggcattcctgcccaccggcagtccggcatcagctcgagcacgtgcaagtgcgaggagacggccgggccaaaggccggggcggcggcgcgggaaccaggcggaggcggcagtactcatagcagaaccatacgaaaaagaagaaaaatccttcggattgtaatagaattttggattggggtttaaagtcgggtctataatacactatagtttagttt

SEQ ID NO: 34534 - DNA, 2621 bp, Zea Mays
cctcctccccgctaatcaccacgccgcgcacgcgccgcgcgaggcccgtcttcgttcccccaccgctaatctcgccgcggcatccatggcgctgccctcgccctcccccacctatccacgccggcgccccctccctcgcgccccacctcaatctcctccattgcgcgcccaagaacgcacagatcccccattcccgcgcccctccctcgtgcctcgatggaatcgccgcagcatccatggtatggtcctcaggatccacctccaccgcgtcgccacagttcgcaggggccgagggtgccccgacggtggggatttgtactgtggtcaggagcatgcgtgttcaagcaagcactcttgctcttcgtccacaacaagctctccatgtgccctaggcacgcgacaaatgtttggggtggtgggcattaccgtcacctccctcgtgtcccgtgccgccgtggccggggtctgcttcctcgccttccgcaatgagcaatccgcggggtacgccacctctgcctacgacttcctaacaagctccccgggcgccctcatcaccgtctccggcccaggatgcgtccacaggctcgcgggcctctcccacgccaccaccaacgcctggtcgctcctcatgatctccagatcctgcgaccaggctgacgctggcaggggcgacttccaggagctcgactagatcgccgcggtgtctggtttgctcacgcggtccctcacgctccaccaaactctggcgcaattcgagcaacttcagccctcacactccgtcaatccgagcaactccaacgcaattcgagcaacccgcccttcacgcaccgtgctgcacgcagtctcgccccaatcctcattggtgtcgacttcatctgcatggaagcacatttcagagatggccagattggcgtagagacacagaacaattgcaacatgtactggttgttggtacttcacctgtgttagacggaacaccacaattgcaacctggaaaggagaatgacaaatgtttgaacagcagtggccagataggcgtagagacacagaacacaatattgttctctctacttgagatggaagaattacaagacaaggaattggaggatgcttaggaggatagacaaaaatgtgaagctaaagaaagagaagctcttagagcttatcgcaaagcacatagagctttacttgaggcaaatgaaagatgtgcaattctttgtagaaaaagggagattttctcttcacaagtccatggtttaattgcagagaattcttctttggtgcagtctttgagtattcggaatcctgaagatggccttgcaatgccatcactgctcaattctcaaattcatgcagttagtcagattcctgaaaatcagggtggtagacacaggttgtgtcctgaagaaccttctaagcagcaaattgataagcatgaagatgaagcacgtccacactattgtgataagcttgctgccagcacagctgatcccagctctatgagtgctgtcaatgctgacaacatcctttcagattatatggaagatgttcttctgttcccgactagatagacaagatcagaatgtgctctggatgttgagaatcaaatggaagaaactatacatgtatatgcataggaaaacatacaagttcctggtgacggtggtcaggattatgaacttttagaagcttctttgaggtctagatgccaccgtctctgaaccaaagcaagaaaaagtcttgccccatatctaaacagaacagataatttgcaataaaagataagcaattccatgtgcaagaaaatacattgactaaatttctttggctcgacgcttaagaaatctcgtccttccatggtttttgccatccgctagaaacaaagaaaagctaccactcactgaaagtctgaaaccaaattcagatcgcaaataaaggacccgtctgaaggttatgctacctggacatagaacataccatgagacttgcttctctgcctctgtgggatataaacataacctatgccaatgaccagaaatcagatgacacaaagtttctcaactgtaatcagttgacgatatcacttcatcatcaggtggaagagactttgttcaaacaaactaagctgtttacgtgtatttgttccttcccacatcgtgatccgggttgcggaaattttgaaagttttagacatcgccggtgagcgcagcctcatcgacaactttttctgaagttaataggtgtggatttcaagactgcacttcatgaaaagtgggtagccgctgagctagaagattaagctggaactgcagtgagtcgagcaattgcagagcatcctgtgcagaaccattaaatcttggaagagaagttgcttcctctattcctttctctttttttccacatgattcaattgcagcaatgctctcctcaagctgtgaaacatattatggaaagaactaaactgtgaactagatgtttgtttcaaactggttgtgaactgaaagagtgaacaaatgtatgtttcaatctggttttagcctgtcaactgaaactgaaaatgtgaactacctatcaatttaaactgtgaactacctatcacatgtgaactaaacatgtgaact

SEQ ID NO: 34535 - DNA, 310 bp, Zea Mays
cagaagtcgtcggtgcaccaccttgaacctagagctctgtcaccaaggaccgcagggagaagagaatccgctcactgctgcagtgctcgggttgtgtcggcgttcgggcaattgcacaaggcgggggagcttaaccatggttcgtgggaccttgtggtggcggcgttgggctcggggcgtcactggtgccagctcaattgctccctggagacacctcaccaccgcggatccacgcatctctatgggcagggcacaacaccatgtgattcacgacgagcaagtgactgaggactcagaagctcagtaggtg

SEQ ID NO: 34536 - DNA, 1316 bp, Zea Mays
cccgcctccccggtctgtgtttgccccctgcccggttggcccctggctctcctcccgcccgcccggccgcccccaccccacccaatcctaccccgcggggggaattctcagttctcgcggcgacgactgggagaccgccgccgccgccatcctactccaggtgccctgagaactcgatcgggctcttcgctggcgacgaacacccaccaggcggcgtggttagctgctgccttcaagaatgcagagacccaatgcgccgtcggcttgcgccaccatcaccttcgcggaggctctaaggagggagatggagtaccgcaagtgggtggagaggacccacccacatctgctcgtcggaatctgcggagcccctgaaatgcagagagatttcagtgcaggaccagtacctgatgcgatcaagagaaaactagctgccgagaccagtgtgcctccacaacaatcaagtttcagctgtgtaactggacagaagcagccccaaaactggtaccccacaaagaaaaaggtgaaagttccacatcttccatcgcagattctgcagtgtcccagaccaaacgtggtgccatccttctggtgcaaaatctgcaaggtcgactgtgtcaccgagttcaatttcagcgctcacgttggaggcaaaaagcacaaggccaaaaagctagagattctaggtaagaggaacgctgggggacctgctagccgatgcgcaggcaacaggagcgctggacagaatggactagcagtttctgggagcagaagcagcgaacagaatgtggctggcagcgttgctgctggaccgaactgtgacatgtcgtctgagagcagaactaatggaacagaaggaagtgggtgcactgtccggctatgagcagcttgggtttcactcgagtctggtatttcaataaaagttcgccttgcacattttcttctcaagggcacagttaacatatttatgtgtcagatggctaggccgctagggagatttcatctgatgggttggactgaacaacactagtcagataataagttgaaacgtatgcactatgcagtgtcctattcccatgtgagagcagtacattgtttggacatatatctgacagcagatgcatcctgtgtcctttcgcttccttctcgaaaatgtacagtagctaaccttgttcgggtaggaggtggaagttgaggacgctgttctgagtatgtactgggtagttataatgtatgacatcatggcttgtttgttgtttccatttcttactggtgattgaatcattgaagacggtgagggtaactgtagtgtgtgccaa

SEQ ID NO: 34537 - DNA, 1743 bp, Zea Mays
atcgccaatctcctctgtgttcttgcgtgcgcgttgacctgctggcgactctgcgctggtccctctcttcttctgtgaggagccaccagagtacgtacgtacaatggaggaggagggcggcgtcacttcgccgttgctgctgcggcaggggcaggagaaggtttaccacccgggctgcccgggctgtgccaacgaccggaggaaggagctccaggagggactgccgtacaaggagttcttgtacgtctggatcatctgcctcgcgacttctttaccggtgtcatcattattccccttcttgtatttcatgataagagacttgcacgttgcaaaaagaacagaggacatcgggttctatgccggatttgtgggcgcttcatttatgctcggtagatgcttgacctcaactgtctgggggatggcagcagatcggtttgggaggaagccagttgccatactcggcgtcttctccgtggttatattcaacactttatttggactcagtactagttactggatggcaatagccacaagatttctacttggcgctctgaatggtctgcttgggccaatcaaggcttattcgatcgaagtttgcagacctgagcacgaggcgctgggaatatcacttgtcggcacagcctggggaataggtctcatcattgggcctgctctaggaggctaccttgcacagcctgcagaaaaatttccagacctgttttcacctgactcgttcttcgggaggtttccctatttcttgccatgcttatgctcctcgctcttcgctgctgttgttcttgtcatctgcatatggatgccggagacactacacaaacacaaagctcgccatgacgaaaataaaaatgacgaagctttggaggcccaccagagtgactacaaggacaaggacgaacagattccaagtttggatgacaagaagagtttgctcaagaactggcccttcatgtcatccttaattacgtactgtgtgttttccttccatgatatggcttattcagaggtgttctctttatgggccgaaagcgataggaagtatggcggcctcagtctatcatctgaggatgtaggtcaagtgctttcagtcacaggcgtcagtcttctcatataccaactctctgtgtaccctcgtaccaacaaaatccttggacctatcaagacttctcgagttgcagctgttctgtgcatgcttattctcttgggctacccctacatgacacatctgtcaggaactgcactgtccgtcgttctcaacattgcgtcgatcttgaaaatcaatcttgcttctaccatcatctcgagcagcttcatccttcagaacaatgccgtgcctcaagatcagagaggagctgcgaacggactgtcggtgacagtgatgtccctgttcaagtcaatcgctcctgcagctgcaggcactgtgttctcttgggcacaagaacggcagcatgctttcttctttccaggtgaccagatggtgttctttcttctcaatgccatcgagctccttggacttgtcctcacgttcaagcccttcatggccgcaccagagtccagagcagcatgatgcagatggttcgtggatcactaatcgatcagaggtcgagcacacgtaaagatggcaacggtgaagattcgtcggattttgcatgccactccgaattcgccccgtccaatatttgtacccagtacaattctataccgtaccatgtgggtattctatacccg

SEQ ID NO: 34538 - DNA, 1044 bp, Zea Mays
caggtatttaattgttcttttatgttctttgttggttgattaaagtgttctattttttaatgcaattttgatgtaaaagttcatctaattgattacgagcgactatctttctataatatagttattccatgatgcctagcaggaaaggtcataatttgttggacattcagctgcagttagaaatttaattattgtggctattacaaccagacttattgcagtatgttgaaatttgatttactatggaactttttaaatatttagattcaggtgttttttacttgggtttatgcatttattagttctatacatatgttcatattcaccatatttaacatgaaaaatccattttttttctctagacgtgaccatttgccatatttttagccacacactgttattgaaatgacttatactgaacaacaacttacagcagcaattatttctcaagcattgttcactggaagtcaaaaatgataatccaaaaagactggcagcaaggttgcacggcagtagcagccctgatagtgagaaataatccttttgtagccaatgctgctgatcgccgaacaaagacaaattaacttcgttcgatttcctttcctgtatgcaggtgatggtctatgatgatgcttataaaagcaccgacagtgaattcttagaatctgacagtagtcaaaatcaatgtgggtaaactgcatcaattgttgtacttgttggtgaccgtctttttgtcgcaaatgttggtgactctagggctataatatgcagggaaggaaatgctattgttgtttcaaaagatcacaaacttgatcaaactgatgagcggcagacgcggcaccgtattgaagatgatggaggttttgcgatgtgggaaggtacgccagtcattgtattgtcttcaagttctatggaatatgattcttctcctaatatccatcctttgttctataggaacatggcatgttggtggtgtacttgctgtttctcgtgcttttggtgacaaactcttaaagcaatacatagttgtggatccagagatcc

SEQ ID NO: 34539 - DNA, 3435 bp, Zea Mays
ccggacccgggcccggcccggaacaaccaggtgggtgcagcacaccggctgccttggggcggtcgtggtgggcaacgcgaggcggctgaaactgacacacacagacacactctctccctcttcctcccctcgctctcttgcagtcttgctcacacagcacatagcacacacacgacacgctgcgagaggggtaaagaacttagaagggcaggcaggagaagcgacacaggaaactgacgtcgccttcggcggcctgctacttaaataaatcccctcgcctcgcctccggctgcctcttccctttttccttccgcgcaaatcactcaggtgccagttgcgcggcggagatcgcgacgaattccggacggcagggaggtggtcgggggaactgggaagtgcatgtgagatccgatggcggcggctgcctgcgccggtgcggaagcaggacgcggatgcggagggaaggacgcgctgttcgtcgagctgtggaaggcctgcgcggggccgctgtcctgcgtgccgccgcttggggagaaggtctactacctcccgcagggccacatcgagcaggtggaggcatcgacgaaccagcttgccgagcagcagggcacgcccctctacaacctgccatggaagattccctgcaagctcatgaacatcgaactgaaggttgagccggatactgatgaggtgtacgcccagctcaccctgctccctgataagaagcaagatgagaatacatctacaacagtggaggaagaggaggtggtggtgcctcctgcgctaccagccacaaatgagggtcctcacatccattccttctgcaagacattgactgcctcagacacaagcacacatggtggtttctcagtgttgcgccggcatgcagatgagtgcctcccaccattggatatgagtcaacatcccccaaatcaagaattggtggccaaggacctgcatggggccgagtggcggttccgtcacatctttcgaggtcagccacggagacatctcctgcaaagtggttggagtgtttttgtgagcgccaagcgtcttgtcgcgggggatgccttcatatttctcagaggtgagaatggggagctccgtgttggagttcggcgtgcactgaggcaccaaaccactatcccatcttcagtcatatcaagccacaatatgcatcttggtgttcttgcaacagcatggcatgcagtgaacactgatagtatgttcactgtctactacaagccaaggactagtccagctgaatttgtggtttcgcgagataggtactatgaatcactgaaacgaaattattcaatagggatgagatttaagatgagatttgaaggtgaagaggcagcagagcaaagattcactggcacaatagttggaataggtgcttctgatccatctggttgggctgactcaaaatggcgttcccttaaggtgagatgggatgaaccttcttctatttctcgtcctgaaagagtttctccttggcaaatagaaccttctgttagcccatgtcatgtgaaccctcttccagttagattcaagaggtctcgatcaagcgttaatgctttgccatctgacgtgtctactgtaaccagagaagtcatggcagactcgcagcaaaatagtctcacaagagccttgcacaatcaaggaaggacacaattgacagttcgataccatgataacagtgatgtgaagactactcaggatcttaccgtgtggtcttcaggaactgagcaacagagaaacaatattgctgcccagacaaagctatgtctggagggttggacgccaactagaagtcctgaaggctacaatcagatattctcggcatttaaaccactgaaagatatacataacccacttggtccttttcctagtcaaatatctgggactcactcaaatagctgggacacagctgatgctcgttatccagtccaacaagctaattacagcatgttacctggcacatggtctttgaggcctcataacagtggttttaggatgaatcaacaaaattatctagtgatgcctgaaggtgcaaattttacggggaaatcagctttcacttcacttcaggaccatggcactgataaatgctccacaggctgctttggtcatattgagtcaagttcccacacagaccatgcatcctcaagtttgatcaggccccagcctttggtccttggaaatggtgttcagaaaagcaaaggcacttcatttaaattatttgggattccccttggcagcccagaaaaatctgaacctctggtatccccaccaagtgtcgcatatgacgggaaacttcaaacttctccatcagaaaaagggaatcagctagacgtagttgaagtggataattgttctcatccttctaagactgtgaagccacttgatggtcctcagtcagattctattacagagaataatcagccttctccagaagctacccttaatatccagaacaaagtgcaaagtagttccaccagaagctgcaagaaggttcataagcaaggtagtgccctcggcaggtcgattgatctaacaaagttcgcttgctatgatgagctgattgctgaactggatcagatgtttgacttcgatggtgagctgaagagtccatgcaaaagttggttagttgtctacactgacaatgaaggcgatataatgctggttggtgatgacccctggaatgaattctgcgatatggtccacaagatcttcatctacacgagagaggaagtcgaaaggatgaacccaggtgccctgaactcaaggtctgaagatagtctatctgactcgctgggaagaggggtagcttccagagatccccgaggaggcgggtctacttcggctctcgattccgagaactgctagtttgttcagtcagtgaggcctttggaagtgaagcagacaaaaggcgtgaatcttgcggtgtagagtgtagttggtacattgtgtgtatgcctccgggtaagccctgcggtacccagtttgtgtcctggcgccagtttaccatttaagctaagtttttgggtgtgccctgtgctggggtctgggctctagttattgtagcagagcaggcaatgcatgcaagaaactgatgatgcgcctgtttggccctctttcccttcccaagccatgtaaatagccttggctctgaagcgtagtattgtattgtcgacagccgtacttgagatagtactccaagaggcgcgcttgctcctgtcagttgggtgtgcgtatgtagatgtgcgtgtgaagccatgcaagcaagggtttgtggggttgatggcttttcatggtagcggatctgctttcatggtactgacgtgcaggtggcaggctggtgttggctgctatgttttgctgcacgatattggcagaaaacagtagtactaaggggtgtttggtttctag

SEQ ID NO: 34540 - DNA, 905 bp, Zea Mays
cttcctagagtggtgctttcttttgaatagcttggatgagctgtggtatttgataataaactgcaatttaggttgaaacttttttaaccaagatgttctatagtatcagttactgcatgatattttgatgtgtgtgctgattgtaccacagaaaatgctgttctaggccgctaggaatatgaatttgttgtacttgtagtgttctttagtacaactattttgcaaattatggtctgtggtaatatcagagtggcactttttcttgaaagaagctgatgttgtagttttttctctctctctattctgcatttaccattttgtttatgcttgagaaaattgcattatgttgttttatgtttcttactagcaatgactacatgcagactacagcatctgaaagtggactttttgatcatttggtaaacgtttgggagtttaagcctggtcctgttccagggacatgtgacatctatttcttagtcaattttaagtttcaatcaccactgtatcgtcaggttgcatcaatgttcttcaaggaagttgtttctcgactagtgagctcatttagtgaccgttgttttagaatatatggccctgctgttccagtgctggaaaatagttatggacaaagaagatgaagccgttatggttcaattttgaaggttgtatctttcatggatctctagggattacttgtagtcaaggcataatccttccttttgtaatcggtggtagtgccatttagaacaccatcgtgcaagaggtcgtctataaggaaatcagtcagtattgagttttcatcattggctatttctgaggttatattttcatctatttcaaaattcgtttcacgtgcatacaacgaaatggttatgttttcatcattggcaaattggcaattcctg

SEQ ID NO: 34541 - DNA, 2385 bp, Zea Mays
ctgagaggagggtcccggcccatcgacctcacggtctcgactctcctcgcagggacacgcacacgtacccacccacctgtgcacacagcgccgtcttctggagcagcgtccgaaagtgtgtggagaacctgcccgatccctcccgccgcctccgacctcaccgtcggcgggcttgttcctggggtctgatcagccatgttcaagaaacctgttgatgtgaaaaccatacagcgcttgtctggggcagacaaaaagaagctaagaagaactgccaagggaaggtttccacaggcttctgatgctgaccttgatgccatccttcctcccaaggctgagataacagttgctaagtacccgaaccatgttcttgtatatggcatagagggagagttcccaatgattttcaacactgacgcaagaggtcatgaactgtttcctacagtttatgcgctttggaaggtcccccatctgttgccagcttttacgcttaaaggtggtgaggtttcacgtttcgtgattggtggcgctgatctgatgtttcctggtatcagcatacctccagaagggtttccatcttttgaagctggccaaccatgggcagtaaaagttcctggtaaccctgctgcaattgcggttgggagcacaactatgagtagtactgaagctttgaaggcaggactacgtggcaaggctttaaagattttacattactacagggatatgttatgggattcggctgatggttgttatgtccctaatgaaggattttttgatgacattgttgttgaagatcctaatcctgtttcaacatctcaggctcctgattctgctgaagaacctgaagtcacgaatgatggtagtgtttcggctgaagatgcaggagtcgatatttcagacaatcatggtacaaatcctggcatccagattgaagcagtggaagagataactgatgttgttaacgaactaaaacttcccgaagataaaactactgaacaagcacctgttgaaatggaacatcataatttgagaactgaggaaattgattctctcttggacaaatgccttctgcaagcgctatacacaagcataaaagaaaaagatcttccaatgccaggaagtacactatgggcaaatcacatactaccgaacagacctcctggtgttactattgatataaaaaagtcatcacacaaaaagttgtcgaagtggttacaatcaaaatcttcatctggccttatttcagcaaaggaggacaaatataagaaggaagttgtattgcttgctatcaatcacaagcatccagactacatggcctttagaccggaaaagagggtacaggagcttgttgaacacgaaaaggatgttgctgaaagtagtgtcactaagcaattggaggttgcagagatttataagccaagttctcatgttaaacccatatttgtggctgtcgaagctgacatggagaagtattacagtgcaccagaggcttcagatatagtcttcaggtacgtcgaaaaggaaaaattggttaaacctacagacagggccaaggtgattcttgatgttacattatgtgatgcattgtacaaaggggctatcaaaaagggctcggcatacccaactgaaatccacaagaaagacttaggttcagcattcttaaaccgcatgcaagttcaccacaaggtatcgagaggaactcaggaggtcatacgcaagggtgccataagaactatccagatcatgacagaaagaagacagggcaacaagaagatgactcggctttctgggctcgagtgtttcctgatggatcctgattcattggcttctgagctccagaaaaaatttgcttgcagcaccaccacagcagagcttccaggtaagaaagggcagtacgaggtcttggtacaaggtggagtgattgatgaccttgctaaacaccttgtcgaccattacgatgttcctaaaagatacatcgaggtttatgacaaaacaaagaggtaggaagtgggggctgatcatgtccgtttaggtgttggagcgcttggatggtctacgaaatgatcccaggattgtttcatgatactttttgtcatcacatgtctgagcaatattacgacattgttgatctacgagtaccttacgatatttgttttcgttcctgcctttggttgatggaaaatgctattgtgcttactgaagaaatatggttacaggatggataatgaggtttcctcatgcttttggtgctgcagcttttcatgtccagtctgtcatcttataaagataacaatttgtagttcgtgcgactgatccatgatatgttagcatcattagtaacactcgtgatgtacagtacccgcaaatcataccgctatagtttcggcc

SEQ ID NO: 34542 - DNA, 2597 bp, Zea Mays
atggagttggattggatcacaatttctaccgacaggaaaagaggctgcagtggaggtggggttggtggtccgggtttgatcaagttcatcaccctcgtcaggccccagccctcgatcgcactcctcacttgtcctctcacctcacctcacctcacctcgcctcgacctcgagcagcgaaagggaggaactctggaccgagaaacaaaaggcaaaagcaccagcaggtgatcaactcccctcggcaacaactccggcctccactcgctgcggatgtttcactcacctgtgacgtgaggcggcacggcaggtagagcgattgcgattctatcggagcgctcatcaggatggatagcgccgcggactcgtcttcaccgaggtgccaccacggtcagtatcgacaggatgccggagaactcgaggaccagactagcaccagcaagatgccgtccagtgcttctgagcttccatgctccttgaagcgtgaggtccgagtccttgaaaagcgactggatgatcaattcgtcatgcgccgtgctcttgagaaagcactaggttacaagccttgtgctgttcatgcatcaagtgtgaactgcattccagagccgactgaggagctaatcaaggagatcgcagtgctcgagctagaggtcatatgcttggagaaacatctcctgacactataccgaaaggcatttgagcaacaattgtcccctgtgaactctgcttgtgacgcggaaaataacaagcagccagcaaggtctttttcaggcatactatctgaagcttcagtgctcagtttctcgaccccaaggaagcatcagccagtccagtccagtcgaatggtcctggcacgcaagtccacgcctacagcttctacaagcgaggctagcagtgaaaagatcaacatcggacgcagccattcctcgctcctgcaccgttctgtcagggtgtctccatccgcaaacaatcttgctagagctctgaaaccatgtcatacttcacctctatcttttgttgaggaagggaagtgcatggagcctggagttgtgagcttggcggacatcttggggaccagggttgcggaccatgttcctcaaacgcccaacaagatatccgaggacatgatcagatgcatcgcggccatatacataaggctgagagacgtcccttccgccgccgcgcagcatgccttcttcccctcaccgtgctcgtccttctcttcagcaagcggactgtcttccaaatacactgcagatgtatggagttggagccccaggtgcaggagagagagcttcactgaggcgtggcaggtgcaggacaacgagctaggcctaggcggtggtgaagcaagggactcggggctgcagtacgattctgtgatagaggtgtctgctctttgcaagggcgatcagaggtccgctgacgttaaggacatgctgcgcaagtatatgtcacttgtacagcttctagaaagtgtcgacctcggtggaatgaaaaacgaggagaagcttgctttctggatcaacgtgcataacgcgatgatgatgcatgcccatatagagtacgggatcccacagagcaacagcaaaaggatactgcttaccaaggtatcctacatcgttagtggccagagagtaaacgcggagctgatagagtaccagatcctgtgctgccgagcacactcttctggacagtggcttcggctgctgctccacccgaaatggaagtccggcagggacagggacgaggagctgcaaggcttcgccgtggatcggcccgagcctctggtgcacttcgcactgtcctccggtagctactcggatccagtggtgcggctctacagccccaagagcctgttccagcagctggaggcggcgaaggaggagcacatccgcgccaacgtcgccgtcggcgtgcgcgggcgggggcagcgcaagatcatcctccccagggccctggagctgtacgcgagggacgccgggctgggtgcgcaggaggtggtggccgcggtcgcgtgccacctgcccgacggcctccgggacgccgtgcgccggagcccgccggccgggcgggcgcgcggcggcgtggagtggaagccccacaacctggcgttccggtacctgctggccaaggagctggtcggcgggtcgcccgcgtgcgggcggcagcaacttaagaaatgcggccccccgatcggtgcgccgctgcgtgctgatcggtgatccgtcagcagatcgccgtgggtccgtggccgtgccgagccgagcccgaggtgcggtgcgggggtatcagggtctgtatgtacagagggagatggacaggaagatgatctgaatagtgtgcgctctgctgtagctagtttggatcattctgattggatgggattgaaatgaatatgagtgtatcctaacttgccctcaatcccatgaaaaataagtgtatccaaattagccttcaagtgtgaatagtgccacatgaattcttaccttaggacttgtttaggagctgtttaggagctagaggaatgaagagaattaaaaaggctaaaatcattttgatatttaattttaaataaagagaggattttaatctctct

SEQ ID NO: 34543 - DNA, 3418 bp, Zea Mays
cccatccatggcacctcgtagctggacgcctggactgctgctgcacaagcacaagcacagctaccaaatccagtcctgggccctactggtaaccaagttgtgttgtgtgtagttgtgtacgtgccctattgcattgcagctctatttgcgttgtctatctatactatatatatatcctccacgatccacacgtctcagcggcagcgctcagaggtcacagcacacagacagcattcattctttcttctccgtcagttccctccactgccttcttggagctgaagctctgcacccttctcctctccccacaattggatcacgccctatctgtccgtccatccggcctcaagattccacggcgctgcgcaagcgtgcctcacgcaatgaatgccatgcaggaccttccatccattgccatgtcgtcaaaccagaacgagagcggcggcggcggcggcgcgggaccgccgctgccgacggcgttcaagagcccgtccacggacggcaagagcggcagccgccggagcacgcggttcaaggacgaggacgagtacgtggaggtcacgctcgacgtccgggacggcggcggcggcggcgacgacgtcgccgtcctggccatcaaggacgacgtccgcgacgacacgcaggacgccgcgtcgctcctggaccgcccggcgcccggcggggcggggggcggcctgtcctccaagctcagggcagcgcgcgcgcgcctcggccgcatcgcgtcggggaagcgcgccgcggtgccgctctcggcgctgctccgccgcgaccccgaccgcgccaggctcgacaggagcgtcgtcaccgcgctcaggggcctccagttcctcaaccaggccgccgtcaccgagggctggcccgaggtcgagaagcgcttccaccgcctcgccgtcgacggcttcctcctccgctcgcgattcggccagtgcatcgggatggtcggatccgaggagtttgcggcgcagatcttcgacgccctggcacggcgaagggggatcacggcaatggtgctcaccaaggatcaggtccgggagttctgggagcagctctctgatccaggattcgatgccaagcttcagaccttctttgacatggttgacaagaatgccgatggtcagatcactgaggaggagctcaaggaggtcctcactctgactgcctctgcgaacaagctgtccaagatcctggagcgtgtggacgagtacacggcgctgatcatggaggagctcgatcctgacagccttggctacatcgagatcgcgaacctggagtcgctgctgctgcagccgccgtcgcaggcgccgacgaggttggtgacgcacagctccaacatcagccagctgatcagccagaggctggcgccagcgcgcgacgacggcccgctccggcgcggcgccagggccgtgctctacttcgcggaggacaactggaagcgcgtctgggtgatggcgctctggctggccatcaacgccggactcttcacctggaagttcctcgcgtaccggcgccaccccacgttcgacgtcatgggctactgcgtctgcgtcgccaagggcggcgccgagaccaccaagttcaacatggcgctcatcctgctccccgtgtgccggaacaccatcacgtggctgcggtcccggaccaggctcggcgccgccgtcccgttcaacgacaacatcaacttccacaaggtggtcgccggcggcgtggcggtcggcgtggcgctgcacgccgtgacgcacctcacgtgcgacttcccgcggctgctgcacgccagcgccgccgcgtacgagcccatgaaggcgtacttcggccagcgccggatccccaactactggtggttcgtcaggggcgtggaggggatcaccggcgtcatcatggtcgtgctcatggccgtcgcctacacgctggcgcacccgtggttccgccgggggaagctcagcgagggcaacccgctgcgccggctcagcggcttcaacatgttctggtactcgcaccacctcttcgtcatcgtctacgtcgccttcgtcgtccacggcgtctgcctctacatcaacaggacgtggtacaaacagacgacatggatgtacctcgccattcccatccttctctacgccggcgagcggcttctccgggcgctgaggtcccatggcctcaccaccgtgaggatcgagaaggttgccctgtaccccgggaatgtcatcgccattcacatgagcaagccgcatgggttcagctacaagagcgggcagtacatctacgtcaactgcggcgaggtctcgcccttcgagtggcacccgttcaccatcacctcggcgcccggcgacgactacctgagcatgcacatccggtgccgcggcgactggacggccagcttcagggcgctcttcgcgcaggtgtgccggccgcccgccgccggccagagcggcctcctgcgggccgacttcgcgtcctccacggcggccggcggcggcgggaagctgccgaagctgctgatcgacgggccctacggcgcccccgcgcaggactaccgcaagtacgacgtgctcctcctcatcggtctcggcatcggcgccaccccgctcatcagcatcgtcaaggacgtgctcaacaacatctcggacaacaaagacgaagagcagccggcggagttcatgacgcggcgcgtgtacttctactggtgcacgcgggaggagggctccttcgagtggttccgcggcgtgatgaacgaggtggcggagcgcgacgcccgcggcgacgtggtggagctccacaaccactgcaccagcgtgtacgaggaaggcgacgcgcggtcggcgctgctggtgatgctgcaagcgctgcaccacgccaagagcggcgtcgacgtggtgtccgggacgcgggtgcgcacgcacttcgcgcggcccaactggcgggacgtcttcaagcgggtggcctgcaaccaccagggccagcgcgtcggcgtcttctactgcggcgaccagaaggtcacgccggagctccgacgcctgtcgcaggacttctcgcacaagaccaccaccaagttcgtcttccacaaggagaacttctgatgtggaccaccacgaagcaggacatgatagtttcattcgtgaagcaagttattcctggtgtgttttagggtaggacaaaaacgcttgacatatgtatatgtggataataacgtatgtagtatctagtaattaagcagcttttgtttttatcttttgcgttttggaaaaaatagataggagtatacagtacagcattgttcattagtgatgttcaaagtatatactgcccgcaagtacaaaatacaaagcaaaaaaatgacttaattttggtggaattgtttgatttccttaacaaacttagcacaaacctaccgtcaacaattttt

SEQ ID NO: 34544 - DNA, 1496 bp, Zea Mays
gttcgctttcctttcaggtcttcattgacatttacccatgtcccgcctccccctctcctccgccctcccagtccatctctccagtgatccagtcctaacactcccctccgcgccgacgcctctggtgtctggtcaggcggtcaccacttcaccaacaggcgccaccacaccaccgacccatttgccgcgttggtgttgccggatcttcaagcaggcagcacaccccacccggacccgagaacccgcgcgcgcgcgtattaataacggcaacctcgctcgcggctcgccgagggaatcgcacgcacccagcgatcagcgcagattccttccacgccccccctcctttccaggtcccctcgcccgcgctctcagatctcgcgcgcctcccacaagggaaaccttgagccatgggcacagttgtggatgccgctccagcagttgtggctgaggtcactgagaacatgttgggtggcaagaaagttacagttgtatttgtcctaggtggtcctggaagtggaaaaggcacacagtgtgccaacatcgtggagcactttggattcacccatcttagtgctggagatcttctgcgtgcagagattaaatctggctctgagaacgggaggcaatgataaaaagtgaaaatgacaaattcctgatcgatggatttccaaggaatgaggagaatcgtgcagcctttgagaatgttaccaaaatttctcctgcatttgtgctattctttgactgttctgaagaagatatggagaaacgactcctggggcgcaatcaggtttccttcatctttttgtgttttttagtcacaaaattcttgtttccaatatttcttactgtctatgcagggaagggttgatgataacattgaaactatcaaaaaaaggttcaaaacctttgttgactcaactctgcctgtcattgagcattacaactcaaaggacaaggttaaaaagattgatgctgcaaaaccaatccccgaggtgtttgaagacgtcaaagccatttttgccccatattctctaaaggctgaatagagcaatctaagggacatgataaaggtgatacatggtgtctaggcaccacataaacatatctgtgattatgatggaccctttaatatagaacaaaagttttggctcatttgagctaccagcgtaccagtaggcaattcgatttgttaccagcaacaagtgatctgattcccagtggtcctgctagagtaacattttttaccactgtctgttgtctatgtatcctttgatattgtgttgtaccaatgtgcaatttactctatggactgatggaacattgtgccatcccatccaccagatttattgtggcgttatggaaagcatagaaccgctgccatattctttaatttgtacgctgaaatatactcgttggcaccgaacttttggttgatgacttcgtgatataataaccctaccggcagtaaatatctacgctcaacaatgttctcaaaa

SEQ ID NO: 34545 - DNA, 2218 bp, Zea Mays
cgtcctggcaactttccccacatccaatccaaaatgtcctccctcctcttcctcgatcgcgttgcgggccgctcgctctcagccaccgccatccacaccacagaccccagctaccgctaccgctaccaccaccaccaccaccactactggaacccccctccctttcaatacaaaacaaaaaagcgcacgcaggcagagctgctgcacgcggcgcacgcactcccactcctcccgttccgtccgctccaagcaaggcacccccatccagatggcggcctgggcggttccggcgctcgcggccgctgcgtgggcgctgcgggcggcggtgtgggcgtgcctcgcggcgtcggcgatgctcgtcgccgaggccgcgtacatgggcctcgccagcctcgcctccgccgccgcgatgctgtggcgccgcccggacgcgaggtaccgctgggagcccatgcccggaggctgcgacgtcgaggcggccactggggcggacttccccatggtgctcgtgcagatcccgatgtacaacgagcgggaggtgtacaagctatccattgacgctgcgtgtgccctcacatggccaccagaccgtattgtaatacaagtcttggatgactccactgatccgattattaaggaactagtggagcttgagtgccaggattgggccaccaaaaaaattaacatcaagtatgaggttagaaataatagaaagggatacaaagcaggtgcgctgaagaagggcatggaacatatatacgccaagcaatgtgaatttgttgctatctttgatgcggatttccaacctgaacctgacttccttttaaaaaccataccatttcttgtgcataacccaaagattgcacttgtacaagcacgttgggagtttgtgaactacgatgtttgcctgatgacaaggatacagaagatgtctctagactatcatttcaaagttgagcaggaatcaggatcatttgtatattcattttttggctttaatggtacagctggtgtgtggcgtgtatctgctattaaccagtctggaggatggaaagatcgcacaactgtagaagatatggacttggctgtacgggctagcctcaagggatgggaattcttgtatgttggtgatattagggttaagagtgaactaccaagtaccttcaaagcctaccgtcatcaacaacataggtggacttgtggtgccgccaatctcttcaggaaaatggcatgggaaatcattacgaacaagcattcctgtatgggggctggtctatattcccactgcaatcacatgtatgaacgccatcagaaatccttggtctctccatttgatgcccttctggattctcttcgagaatgttatgtccatgcaccgcatgcgtgctgctgtaaccggtttacttgagactgcacgggcaaatgattgggtagtcactgagaaggtaggagatcttgtgaaggatgacctagatgttccactccttgaaccagtgaagccaacagaatgcgttgagaggatttactttcctgagctcttgcttgcactccacctcctaatatgtgcttcatatgacttcgtacttggaagccacaaatactatctttacatatacctccaggcctttgcatatgttgtaatgggttttggtttcgttggaacgaaaactccatgttcatagctgccaatatgatgttactattccccatttcacagtaagttcctaggagtactgccactatgtgcaagatgaaatttgtctgatggtaaatgttattcgcattgcggggcccatgcttagtctagtgggtgtgtgggtggggggcggttgggcctttggttcttagattgctaacaagatgttcttcaacagttcaactgccattggtaaactcagttttatgatttgcctctgtaaacgcattttccttgacatacatgtgttttctcaataatcgccctgtgctagatgtattcatctgtagcagttccattgcagaactgaatataattggtatggatttcagattttggattcatggttgtaatagggcgagaggcaagtttgtatccaagttggatttgtaaattattatagcttattttttatgattgtcatgtatagattggcaccaggaaggaatgtatggcataatgagaagacaatgaaatatgaaattaattcttgtattgtgacatagcaataggcattgtctt

SEQ ID NO: 34546 - DNA, 174 bp, Zea Mays
ggaagttttcttctatttatacctccctaaccctagaagccacgtcctcccacccctagcagccgtcacccttttatgccttgccccaagagaagagaggaagaaaaaagaagagaagagaggggagatgagggcataccgtcgcccatcatcgtcgttcctctccaagaattg

SEQ ID NO: 34547 - DNA, 1586 bp, Zea Mays
ttttaagatcggtgacaactagagagaaggcgaagcgaacttgagccagagagagaatctcgcaccgcagcaggaggggaccgagagagaagcgaactcgagaaagggattcaaggaggctgttgccgatggccatggcggcgcggctgctgcgagcaaccgaggtggcatctcgatttctatctgcttcccatggtttcgtccagcgagctgcatacacagctggtgggatagtcgatgttggccaaccaacaccccagtctcatccagaggttgtacacaacccggtggagtagcagttttgagtgaagaaacagggttctgcatgttcatgccagatacaaataaggagtctcttttacaaacaatgttgatgtcgaggacccacagagaggaaagccagttggcagctaagattgaatacgagtgcaaaatgagaggtgcccaaagaatggcgttccatcccgtagttggtggaggagcaaatggcagcattatacattattcaagaaacgatagaaaaatcaggacaggtgatcttctgctcatggatgttggctgcgagtatcatggctaccttagcgatctgactcgaacatggccaccctgtggcaggttttcacctgctcaggaagagctgtacagcctaatactggagacaaataaggagtgcataaagctctgtaaacccggcacaagcattaacgagatacacaatcattcggtaaagctgttgataaagggattccaagaactgaggatcctggagaaggggaaatccatccaatacaactacttgaacccaaccgcaataggccactcgttaggcatggatattcatgactccatgacactccccaaggacaagcccttggagcctggcgtcgtaataacgatcgagcccggggtgtacatcccggcggccccggtcctgaacgagcgcgcgccgagcaggtaccgcggtatggggatccggatcgaggacgaggtcctcatcaccgacgacggccacgaggtgctgacggcgtcggtgcccaaggaggtctcgcacctgaccaccctgatgaacatgggcaggggcggctcggctgcggacgcccatggccatgagctgcgagccgcctgcagctagctgaggcggctgcgtgcgtgaggtcatgcccgtggcggcggccggacctagtagacctggcacgacgtcgtggagcagaatctacgtgctctgcgaatacccgttgcatccattgattggactgttgtaatcacgggaacagatagcgaattgggcaggtgtttttttaaggtaatgggaggtgttatattctggacccttaccatggcgcgtcattgtatttgcatgcgcagttgtgttgtggccgcattcagcttctttatattgttttgtcgccgttcagaacggttagccgaatcttaccgtgagccatggcatggtgaccacacggattacagccagccgtgtggcgctagcagatgcatgcaacagtcggctggggcggccatgaatgcgggaggctgtagacctgtagtgatgtcctgtttgtttcagtttatacattatataatct

SEQ ID NO: 34548 - DNA, 683 bp, Zea Mays
tccatatctatgtctcccgtggcaacgcacgggcatatacctagtcaataaataaagcgcgcgcacccgcgtcgtcaatcaaagtgaagaagaaattcaccagacacgcctagcaggaggaaccggctgtccctgtggccctttcacgcaacagcgacggtcgcatgcagcatctaaccgcgaaccaaaagccgtgcatgggatggcgaccggccggggctaggctaggcgcgcgcggtcgagagcgacggcgactgcgcggaaagcgcggcgtgcatgaatcccggcggagcgccggggctgtaagacgagaaggaaagcggtggcactggcagtgccggaccgtatcgtacgtcatgggctccatcgatcgcgcgcgcgcgccggcgtgctagctctctcgccttgccctggcgttcatacgtgtgtacacgcggcaccgctcgatcgacggtggcgccctggatgacgcagagatgtaaacggcgccaacggcgccgggggaggagaggacgacattggaggaaataatccttgtccatctgttttaactgtattttatttttttcccttatttgatacctaaatttagttttcttgcaaacgtccacgttattagaggaatagatattgccatattggagaagtctgtcaagttttgcagcatcaataaaatcatgtcg

SEQ ID NO: 34549 - DNA, 2003 bp, Zea Mays
gaccgagaaacagaagccaagcgtccaagcgcaatagcgttcagtccccactccccactcctcactctcgcggtcgcggcctcaccggtcactgcttctcgaaccgccgggagctggaatcgcctccatagggaactgctctaatgcccgcggcgatctggaggcggccgcccgcccacctaggccacgtgcgatggtgaggtcgaggcctagggtttggctagtggcgggctgcgccgccgtcctgctgtgggcctccgtcgcgcagctcgtcgccgtcggccgccttctcctcctttttggcctcgcgggcgacgcggtttcatcgccgccacctactgcgcttccgcccccgagaatatacaagagcaatggttatctgaagatatcttgtaatgggggtctgaatcagatgcgctcagagatatgtgacatggtagcagttgctcgccttctaaacctcactatggttgtcccagaacttgacaagagatcattctgggctgatcaaagtaattttggggacatatttgacgtgaagcattttattgactcattgagagatgaggtccacatcattgaacagcttccggagaagcttggtccaagagattcagacattattatacttgaaatgtcacctgtgagctgatcttaccactgttcagcaaatacagtgtcatccattttaacaaaacagatgctcgcttagccaataatggtatcagtacagagattcaactgcttagatgccgtgttaattttcatgccctgaaattcacacctcaaattgagggattagggaatgaactggtacataaactgcgagccaagggatcatttgtagccttgcatttacgttatgagatggatatgctggcgttttctggttgcaaccatggcctttcacctgaagaagctgaggagctcaaaaaaatgagatatgcttatccatggtggagagataaagaaattgattcccaagccaagaggttgcaaggactatgcccacttactcccgaggaggcatcacttgttttgaaagctcttggatttcaaaaggatgctcttatatacatcgcagctggggaaatttatgggggagataggagactagagccactacgggctgcttttccaaaccttgtacgaaaggtgatgctgctaaactctgaagttctgcgtcaattccaaaatcactcttcccagatggctgcacttgatttcattgtatccacagctagtgatgttttcattcccactttcgatggtaacatggcaaaacttgttgaaggtcaccgaaggttcctgggtttccggagaagtgtggtgctagaccgacggaaattagttgaacttctagacctgtacaccaacaagacaatgtcttgggacaattttgcatcttctgttcaggaagcacataagaactgtgtagctcagccatcctgcaggcgagaacttaaaaacagaccaaaagaagaggattacttctatgctaacccccacgaatgcctagccaattcaaccttgtgcagctaaactgagtttctggtttctttaaggtaaccaggtgggcgtgaaatcatttccgagcacgcagtggctcacagtcgttttggtgtcgtgttgtcaagggaccgagccagcttacacggagcatcacatatcttttggctttacattccttatttcactgttatataggtcagtttttttgcttctctgttgattcgttggcttttccaacatgccaaaagcggcctgtttggggcatgtaaatttcggtctgttgtctaccatgcttgttcattggtgactattgactaactagtgctgctaggccgaagggttagctttttattccttttcaatttatttccctaatttttacaagtgcttagtgaaattatcaccttctaaaattgtgctatgtcaaagcaggagtgctgcacctgcctgcctttttatggaaaatgctgtccagtttgcttgttgcatca

SEQ ID NO: 34550 - DNA, 2977 bp, Zea Mays
cagagctgaacacaaacacccacatcgatccaacccaagccacgcctcggcgacaggccgacagcccacgagcgagatccaacccaagttccgacgccgcgggcgagaccgatcagatccacctcagccgtctcggatggcgtcagcatcgacggcggtgcggatgctccccgacggcggcgctgacgacgaggagcggtggctcgccgagggcatcgccggcgtccagcaaaacgccttctacatgcaccgcgccctcgattccaacaacctcaaggacgcactcaagtactcggcgcagatgctctccgaactgcgcacctcgcgactatcgccgcacaagtactacgagctgtacatgagggcgtttgatgagatgaagaagctggagatgttcttcagggaggagactcgccggggcagctgctctgtggttgatatgtacgagcttgtgcagcatgctgggaatgtcttaccgagactctatctcctgtgcacggtgggatctgtgtacatcaaatcgaaagaggctcctgctaaagatgttcttaaagatctcgttgaaatgtgccgaggcattcagcatccccttcgtggcctttttctgagaagttatctttctcaaataagcagagacaagttgcctgatattggttccgagtatgaaggggatgctgaaactattaacgacgcagttgaatttgttcttcagaatttcatagaaatgaacaaactctgggttcggatgcaacatctggggcctgcccgagaaaaggaaaagcgtgggaaggaaagaaatgaactgcgtgatctggtaggcaaaaaccttcatgttctaagccagattgagggtgttgaccttgatatgtacaaagaaactgttcttccaaggatattagagcaggtggttaattgtaaggatgaccttgcacagttctacctgatggactgcataatccaagtctttccagatgaataccatttacaaacattggaaacattattgaatgcatttccccagcttcagccaagtgttgatatcaaaacagtactctctcaacttatggacagattgtctaactatgctgcctcaagtcctgaagtgttaccagagttcttgcaagttgaagcttttgctaagttcagtaatgctattggaaaggtgatagaagcccaacctgacatgccagttgttggagccgtaactctatatgtatcgcttctgacttttactctccgtgtacatcctgaccggcttgattatgttgaccaagtgctcggtgcatgtgtcaagaaactttcaggcaaagcaaaacttgaagatagcagggcaacgaagcaaattgttgcacttcttagtgctcccctagaaaaatatagcaatattgttactgcattagaactttcaaactatcctcgggtcatggattatcttgataatgctacaaccaaagtgatggctgtggtaataattcaaagcataatgaaaaacacaacctgcatatctacttctgacaagattgaggcactattcgatttaattaaggggctgataaaggatatggatggggctcaagatgatgaacttgatgaagaagattttaaggaggaacagaactctgtagcacgtctcattcacatgttgcacaatgatgagcctgaagagatgttgaagatcttatgtactgtacagaagcatatacttcagggaggccccaaacgtttaactttcactgtgccttctttagtattctccgctcttaagctggtcaggagattacaaagccaagatggagatgtcactggggaggatgttcctgcaactccaaagaaaatattccagatattgcatcagactatcgacgcactttcttgtgttccttccccagagttagctctgagactatatttgcattgtgcagagttgcttatgagttctttactcaagcgttcatattatatgaagaagaaattgcggattcaaaggctcaaatcactgcaattcacctgataattgggacccttcagcggatgaatatatttggggtggaaaatagagacactctcactcacaagacaacagggtactcagcaaaacttctcaagaagcctgatcaatgccgagcagtttatgcgtgttcacatcttttctgggctgatgaccaagatgggataatggatggtgaaagggttctgctttgtttgaaacgtgccttgagaatcgcaaatgctgctcaacagatggctagtgctacaaggggaagcagtggatccgtacttgtacttctttgagaaaggaattccgcagatcacaaataccgtgattcaagatttgattgaattgattagaacggagaagcaaagtgataactctgtagctgatccatctacagaggcattcttttctagcactttgcggtacattgaatttcagaagcagaaaggtgggagcataggcgaaaaatatgaacagataaagacgagttcatgagtcagaactagcgcggcgccacgactggtttcgattttgttgagaattgggtcgtttgtttggcatggttcagtgaaatagaaaccataagttttagctcgctccatgtaaaagatgtttatacgagctgttaattctcaaatctcacggtctgagcgggtctgttcgcccattggcaacactttcaggtttagtcaggtggcaataagctgtgtcctttggggagcacaggtctgtacaggattacttgtgttcgtgatcagttctactgctacctgaatttcatcgttgtatatttccgccccttatgcgaagcttatggattttagatctctgtaacattcggagtacatgccttcatttctgagttctgactggacattgatgattgtttcagagtggccagtgcaggacttgaacattttggatgcccgttcgttgacattttaatgttacccattactctgctgtgtggcatgacctcgc

SEQ ID NO: 34551 - DNA, 3007 bp, Zea Mays
gctgtcgccttgactcggagtaagtcctctccgtctcagctcgcgagccacagtagcagccgccccttcagcctccatcatctggcgctcgtccgctcccttcctccgcacctcgccaccggccgctgccgcaccggtcgcccctttcttcgcggccccatcgcatcgcacccggttggcctcaaccggctagctccgcatcgtgccccaccaaatgggcgccccgggccgcgacctcaccgctctcctatctatccgcggcagcggcagcccgtctgttcaagcggtaggctatcgcctttcagtgtctggtaggtggtatcagtgattcagtgtgaggacggaggcggaggggaggtggggcaaactcggtgtgaagcacatcagcgggcatgtttgggtcggggctgaacctagtcagcgcggcgctcggcttcggcatgaccgcagccttcgcggcgttcgtctgtgtgaggttcatctgctgccgcgaacgccgtggtgacacccgtgcgccgccatcgccggatttcgccgcggaactcgatggcccggtgcgtgcaatgcccccgccccctttcctgttgacactgtgctgctgcctagtccacggtccttcccacgaaggggaattttctcgtatctcggaaaaggcatggactctgaagtgtccctgctgtatgttgtctgcgataaaaatcgaaaggaggattacattacatgagaatttcatgtgcgttccgaatcaaatggggaattaaatagggacacacgtggccaacttgcttttccagtgggtgtgatgcagtcaaagtggctttagattccttagtgttacgaggtttttttgggattatttatgaaaatctggcgccctttaaaataacaggctacttaacttcgctttggtatccttgttctatccatatgtgattacaatgaaactgaagtcctagccttgaagggccttgtcggcagtctccgaaataccatatcttcattgcacctatgattgtttttatccatgacctggtaattatgagtgcaactttgatatatctggatttatttgttttatcttaagccttgattgttttggtagcattctgatctatttcgagttccctatgcatccacgaacaaactttacaatcaacaagttgacagcacctgcacaggaccagctggaaaaaaggataagagttttaggctgtattctttctatgttattatatatttttcatgttgccaactagctgtgatccactcagcactcttttgcaatgatctgttccaattcattgttgtttatattatgtcgattacaagtttgtgaatcactctctttagagcaaaatttgtgtttgaatggccattgtgtgttcttttttttcatacatgtactaaattttaaaaaatgactatgccaatcaagcaaaagtataattctcagagttagtgttctatcattcacaaagcatctctattaaatattcttttttaaccggaaagtggttggttttgtgtctttaaatgttatttgtgtaatttaccagagacttgagagaacatttgagggagaattaagaagagagggagagggaagctgtggtcaagacgtggcaggtgttttagagttactggagcgtgaagggagtaatggccacaagggccaaccccaagccaggggcatgagatgggctaagcccttgatcaacttccgcttatgagtttcgaagggtacagggggatgctctgtatagaggaggctccactttactgctaactaacctatcctggccttctctatttcgggggatactttccaattgcaagagataaccctaaccaactagatccatgatccttattattctggacttgatggtgatgcaggggtggcactacattactgcagtcgagtcagtcttaggccatgacagcaatagttaaactagcagtttttcttcaccggtgtggtgctgctactagaataagagtacgagacagtaatttatgaattggtgaccatgttattcttgtttgcattatctgatttttttttgaacacacaggagagatggtcaggtcacacacaaacaaacaaactcacgcacctagtaaacaaaggaaaacgacctgaccaaatgttacctgaagattattatagttttggtcaaaataatgaatagcaaaatagcctagttttttattataaaagttgaaatttaatcctgtcattttgtgttgttcagatagaacgcactcgtactgggttggaacctttggttattgctgcaattcctactatgaagtacaattgtgaggctttcaactctaaagacgatgtccagtgctcaatatgtttaggcgaatacagggagaaagagatactacgaatcataccaacatgccgccacagctttcaccttgcctgcttagatttatggttggaaaagcagacgacttgcccaatatgccgggtctcactggaagagctgcaggctgccatgccatcggtatgtagcatccagcaactcccgcccgagcccgaccccgaccccgacccagagaattctgataacccagcacctcagtgtttccaacctgctcgtcaacatcccagagatcaaaataatagccaggagacgcacgaatcagtagaagtgattattgaaattcgacgatgaatagaaacattgacatgaatgtagaaagctaagcgacggaggcaaatatggaacatttcctgcaaccaagcaccggcgttttctttagggctactgctaatcaattagtcatgtcgcccgcagcattgtctcggtatcatgacgtttcatctcccaattcctttgtagaggaaaaagaaaagtttatgtacgattcacgtagtaggtcatcatgttatattattgagaatctgaggcctttgagatcattttgatgttgtaaatatacattgtatcaatattgaataacataaagggtcagagctgcacaaatatct

SEQ ID NO: 34552 - DNA, 264 bp, Zea Mays
gtcgtcggcctcggtgccggtcggctggtgagccgggatcctgcctgctgatgagtttggtgttccagcagcgggcctggcttccgcgcctggtatggtacgcgaacgccgccgccttgcaccgaaatattgcacgtactgtaacttactagcagtggctgccgctgccattggccatcttgcttgcgcacgcagcaggcaggggcgagcgcgcgcaccggaccactgccggagtgccgactgttttgatgactaggtgtgccg

SEQ ID NO: 34553 - DNA, 1941 bp, Zea Mays
tcttgccttatgaatacccccagcatgagtatcggagtttcctgtagtgctgctgttgatggagtcaatggatgcctcacctacagtacatgtcgttcaagaaactactactatcagtattctcataccactaacttgcaaatttcaccagtagaccagatgcctttgcctcggaaattaaagaaatcaattcagcgaaacgcttactttttaacccagaagaggaagctcgtaccacactgttcatcagaccttagtacctcctgcagaggagtgcccaactatttatcaatcaatgttttgcaagaccaatcaaatacaaaacagggagctattcgtaaagcgcttgtcattttgaatcctaattctggattccgcagctctcgggatgttttctaccagaaagtgcaatcaacattgaagctttcaggcttcaagatggaagtcattgaaacagcatatgccgggcatgcaaaggttctttcttctactgttgacctcaaaaaattccctgatggtattatatgtgttggtggcgatgggatcgtcaatgaggttttgaatggattacttagtagagacgattttgacgtggcaattcgatttcccattgggataatacctgctggttctgataattcattggtgtggactgttcttggcatcagggatcctgtttctgcggcaatcgctttagctaagggggatttcacaccaatagatgtgtttgccgtaaagtggatccaagctggagtgactcattttggtttgacagcttcctactatggtttcgtagctgatgttctgcaactgtcagaaaagttccgcgtgcagctcggtcccttccgttacgttgttgctggccttctgaagtttctttcattaccccagtacagatttgaggtggactatctcccttcatcgctgcaggggagaagttctgaatcaagaccactggctgaaaaacgtcacgaacagctttctgatgacggcaaggttaggagaggcacacagaccaacggtaggatcaaagacgactgggttaccaggaacggggagtttcttggcatttttgtttgcaatcacttctgcaagcctgcccaggggttactttctcctgttatcgcaccgaaagcgcggcacgacgacggcagcctggacctgattctcgtccatggaagcggcaggctgagactgttttgcttctttgttgcctatcagctctgctggcatcttctactcccctacgtggaatatgtcaagataaaagaagtgaaggttaggccagttggcagtacccacagtggttgtggcgtcgacggtgagcttcttgatggagagcgcggtgctgaatggcagtgctcgctgcttccagcacaaggcaggctgcttggccaggatcccggtgctttcaactagttagggctcgttcggttagctctcaatccatgtagattgagtgagattagatgagtttgaatcccaaacaagtcaaacttcttaattttttccaatcccatctaatccatgtgtattgggaataaccgaacaaggcttactgttttatctgtccagcagtaccgaggttgttggttaatttcatgataagagagcgagtttcagcaatgttcgtatactgattatacagtattctgtctctatagattgtagctgcagcagtctgaacaactgattttaatttttggccactattttcgtatatttattgtgagtttgtgaacaaggctagagcctagtgcacataggggaaaagcttaggcgctggataccagattgccagtgccatgttttgctgtatcgtgaaagctagcaggtgcagagttgggattggaatagcagtagtataagattgtcttcagcgtcctctccatccacaacacatattgtccataccgtatacgttcaaaaacacatatattc

SEQ ID NO: 34554 - DNA, 4318 bp, Zea Mays
aaacgacattacccatcatggggcaaatcgatcggcatgtgtttcggcgtgattataattttttcttgtcaagaaacagcacaattttcgacatagacattgaagcgtttcaactgaagccttggagacagcaaggagcggatcttactgactactttaattttagtctggatgaagaaggctggagaaagtattggtgtagcatgaagcaattaaggttaggggctagatcacttgtaaatgaaacatcaggattggagcaggaatcatacaaattgaaatctgcgaaagcaatgtccaacgtagcaaatgattctggatctgaaggaagaaatgacattggcaagccaaaaggtagagcaatccatgttgaaggcagtgcgtgcgaacgtgttccttcagcagacttgtggcgtccaatacaaagggattcagatgttgtgattcaagtaaacatgacactttcaccatcaaatcagtccacttcggatgacagctcaaagttaaatcacaagggtgtggctactgaaagggtgtttgataaggaagtttatgatggaggttcctcagagggtgttgggagcaaactggacagaagagattcttattttgcacgtgaccaatctcctagccctgattattctgatgtactttctggagaatcaaaagaaaatcactattttaagagatccaatagacattcagatttcagggacttctttgaagccaccaaacttcaggatgagcatgtcaaatctgatttttattgctatccaagtaagccagacagagaaaatagtgaaagctgcagacgtggttataccccttctactgatgatagaaacatggcatctaaacttctgtggatgggtgaagctcctttcactgggcgaggcaagtctggtgatctttttttgggtcacaacagcgaccgtgacttcaaatctcgacataaagcaagaaaaggacagaggagacagagtttagatgacagaaggaatgctatatttgttgaaaaagaaaaaccaacagatagctatcatagtacgtgtgataggaagttcgtgaagagaagatctagctcatcttccctgaggaccaactatcacaattccgtttgcaatcaatcttatgagcagcgttattcacctcttgaaaaaaaagctctgaaaaacgatgagcattactttagcgatgagtctaattaccaccataggcagtctttgtcatgtgacatcaatgaaggagatattgacaagtgcttctcttcagcgaaggagtggcaacgagatggtgaccatatataccattcaatggtaaaaactgatatgcctgatgctaatgatggacgcatgtacagagataggtatagtccggaaaagaaaatagccagacatgaccatagcatggatgttgaattttcccattacactgattacagattttgcgagtggcggagtctggaggtaagaggcagatacagagataaaggaaaatttgccaaaagcaatgatgggcatttcagacatgctaaccatctcgagttgtattctggcctcaacaattttgagagggacaaacctgctactggcttccctgttatgagctcaagaaacagatgcatcgataacaaagaagtctgcaatgctaagatgacacaaaataattgccatgggtatcatcaaaagaacaagcaacatgattcatcattttgtattggcaacattcctcgatatgctttgcgcactgatacttatgctgaaaagggccattttgttctgccaattaagaggaagctttattctgatctgggttccatggaccaaaggactcttgctgatttgccacttctgaaaggaagattgatgcatggccaatccattgccagtgacaggaggatttatgctttgaagctgcataagtcgacaaagaaaattaatacagaagccatttgtagttccagtgatatgagaaatattaatactctttcaaacatttgtgttggcagaagacatgagctggataatgctgataacatccacttgaatgatagaaaaataaagtttgagagggaaggtaatgagttaagacgtgtaattgaagataaccaaaagggaagccatcctgtggataaggatttgcacacttctagacataagcatgtacatcagaagctgtggaaacagaatctgagtcaccgtcactcaggcaatcaggatttggagaaatcagcagaccagaattgtctaaataaagatgtggagatcgaggaaggagaattgattgaagaggaccataataatatcatttataaaagcaagcttaagcaggaaaatgttgtactgaaatcagttattgaaacaagttcagcagagcagttacaggtgaataatgcaacgtcgaaggatgctacctgcaacaacagagctacaagagaatctgatgagaaacacattcttgaggtaatggaaaagatgcaaaaaaggagggaaaggttcaaagaggctattgcaccaaaaaaagaagtcggtgacaagaaagacctatcggctttagcatgcagtacagatttcatccagaatcaacggcctgctaggaaacggcggtggggtggtaattgttggatgctggaaatgccttgagagtttgtccgtgatggtttcttcaacaagtgctgggcagtcctagaaagcaagggtggaaatattcgaagggcacgcgagctatttgatgccgctactgtggctgatgcaaagcatattgctgcttggcacgggtgggcaattttagaaataaagcaaggaaacataaaaaaggcacggactttgttcgagcaagccagtcaatccaatccaaaaagttgtgcaagctggctagcttgggctcaggtagaaatgcgtgcaggaaacaataccatggcaagaaagctctttgagaaagctgtccaggctagtcctaaaaaccgattttcatggcatgtatgggcactatttgaggcaaatgaaggtaacattgacagggcaaggaagttgcttaagattggacatgctgtaaatcctagggaccctgtaattctacagtcactcgcgctactggaatacaacttttcatctgcgaatgttgctcgtgtgttattcagaaaagcgtctcagattgatccaagacatcagccagtttggatagcttgggggtggatggaatggaaagaaagaaatgcaagaacagcaagagctctctatcaaagagctttgtcagtcaattcaacaaatgaatgtgctgctcgttgtcttcaggcttggggagtcctagaacagcgtgctggtaactacacggccgctagacgattgttgaggtcttcactgagtataaactcccaaagtgaggtgacatggatgacatgggcagcacttgaggaggaacagggggatccagttcgagctgaagaaattcggaacctttactttcagcagcgtactgaagttgtggatgatgcatcctgggtcataggcttcctcgacatcatcgaccctgccctagacagcgtgaagaggctactaaacctggatcagccttctagaccggcgaggcaagatgatgttaaaagcacaacagaaccgtgtcctcccactgccaagtcttcagaaacttctgcgggcaatgatgctcgtaacaacgggagcgaagcaatggggactctaacaagtgatttcgatttggatgctttcatcaagaagaggctggccctcgacccatcggagctggatgccgtgctcgagggctctgacccgaggggtgttgtttctcagaggaggaaacagcggctgcccaggaagccactccctcttctccctgtcccgtaaattttccagatcggtctgtctcatttccattccaccggtaaaatccataagggctagtttgtttgagactccatttttttccaagtgttaaaaataaaaatcccttgaaaaaaatgaggttatcaaactagccctaaatccctaactgtagcagcctgcaatacgtgaatatgtgtgaggactaaggagatgacgtcccctgccgctgccatagcaatcaccacacctgttaattgtcattccagccacgtgtatgtaattctgccaccatttgttagtaaagtctagctctgtacataaattagactctttttgtctacataatatcgccggactaagttatcgagaagtattttgacaatggtagtgccattacttcaacaccttagagcatccaagaaaatatgtaaaaggttcccaaaaccatttttgacggcgaaacaccatcttcattcact

SEQ ID NO: 34555 - DNA, 1314 bp, Zea Mays
ctggatcgtaataatcggaaacttgtcagggctaaaacgcaggtagcgctgcgctgctgaagacgctcggtttataagcgaaggccaaaaactccaagatgcgaaggtgggaaagcaagcaagcggcggccggagcatcttggagacaggaagaaggggtggtagtaggtgaaaccggaggcggcaggatagggagagggagcgagagtagaggccacgcctgcttgacagcaaggcccgtgcgctcggcggcggcggcggcggatatgggcgactctggcggctctgttgtgtcggtggacgtcgagcgcatctccttcggcggcaaggaacatcatatacaaaccaaccatggatctgtatctgttgccatatatggtgaacatgataagcctgctcttattacctacccagatattgctttgaaccatatgtcttgcttccaagggctactcttctgtcctgaagcagcttcattgctgcttcataatttttgcatttaccatatcagccccccaggacatgagttaggagctgctccgattttgccgagcacacctgtggcatctcctgatgacttagcagatcaaatcgcagacatacttgatttttttggactggattcggttatgtgcttaggtgtcactgcgggcgcatacattcttactctgtttgcaacgaagtatagggagcgagtactaggacttattctcgtttcacctctatgtaaagctccctcatggtctgagtggttttataataaggtaatgtcaaatttactgtattattatggcatgtgtaatgtcgtgaaggatattttgttgcagcgctactttggaaagggagtacgtggaggctcagctgaacctgaatcagatattgtgcaggcttgcagaagttttctagatcaacggcagtgtgtgaacgtgtggcgatttatccaaactatcaacgagagaaaagacttgacagagaacctgaagcagctacagtgcaggacactaatttttgttggtgagaattcccagttccatgctgaagctgttcacatgactgcaaagcttgataggcgatatagcgctcttgtggagtacaaagcttgtggctcggttgtgacagaggagcaacctcatgcaatgctgataccaatggagtactttctcatgggatatggactgtacaggccaagccagataaactgtagccctcgtagccctctgaatccgttttgtatatcaccagagctccctctctcctgagagcatgggggtttaagctaagcccattcaagaacgcgaggctaaccttaatgca

SEQ ID NO: 34556 - DNA, 3902 bp, Zea Mays
tttacccctgttgcacttgtttactgaaacatctccaagaccaaggtgattgtattcaccaactgtagtctagtttttttcacatcattcaacccatatttcaatgatatcgtttttgtggatcatagttggatgaccaatgataaatgtgataagttgcaaactttattctcagaagatgactggaagttagttcagttggtgcttactttgttccgcaacgtcttggctattcaagaaatcacattgacgcagaaagcatctggagaagctacccacttactcttcctgtctgataactttttggagctcatgttccaagagaatgtgatggacataatcttagttttgactcagcatattgatgagccctctggttaccttaaggaggaaaaccttcttttaatggagatttaccattatctcttcttaggccgagacccaggactgattgcccgagcttctaataaaggtttaaaggatggatctaaatcattgtgcaaagggaacccaagctctgcatctgctaatagcctcttgaaaatacgtaatgtccaaagaggacctcagaaacggatagcctgggacaatgaacttctgtacgtaccaaaggagggtattacagaaatgcttagaagcttcatggatcaatttttatctggagcatacaatatcctgatgcagtcagtctgtggtgatatcatggatgagcaccactccattgagaaatctgacataactacattcttcaaagttgctcggtttgttctagcttttcaacatgaaaaggcttcaaatgatcagaaatctgctaaagggattcaaccatctggggtttctcctagcaatgaacctgatgataatctgccatttcatggtgatatatgtggacctgttgcggccacgttgaatgaagatatgttcaatatagtcatttccaggtggcgtgagacgtatgaggctcttaaggaaactaacgactacaaaactctttcagcagctgggtctttaatgaagaacatgattgacatgatatatttggtgctaaaagtactccctgaagattcaagggaatctcaaacagctcgtgttttgctctataaactgttttatgatcagacagaacatggtctcactcaatttctgctgaacttgttcagatcgtttgatagtcacaagcaacccaaaagtgatctagtggatttattagaaacaattcatatcatgctacagctcatggaaaagcttcaagcacgtggtgcattaagggttgcaaaaaagacaaaaaaggtcagaagaaagaagtccacaaatgataaaaaggagaattcagaacccaaagtggataatgcagaaccaaacgatgctaatcctacagatggaacgaaatgctcacctgaaacacttccagatttgagaagcgagggtcctgctttagaatcttctccctcagaacctggaaaagtagacactagtggcgcacatgtactggatacacttgtggacactgtagttaacattgagagtaccgcacatgctgaaggtgacccatcttgcacagacagtggcgtaatgaagagaaatctcattgaagaagagggtgagacttcagattcttcagttgatcaccaacctgctacaagtgaagttgattttaatgtttctcggttaatatctagtcttgcaaacaattctgttgtgcaaaatatttgctggctgttgaagcattacaaaagtaactcctaccgtacaaaccattacataatatgcatgctacggagattctgtgaagacctagagctgtcaccgatgctgtatcaggtaaaagaaatgcctacatatgtttcctcacagtcgtttcttctttgagagtttatattctactgcctttttgcagctatcacttttaacaactttctatgatatattagcggaacaaaagttgtctagttcaaaggagtacacaaacattgtaaattttctttctaaagttgtgaggaaaatgttgagaacaataaaaaaacagccactgctatttgtcgacatactattttggaagacgcgaaaggagtgtcattgcattgatgctgatgcactactgaatgagcttaagaatgatgttggaagcaaagacagtgaaattggttcaagtaaggggtggagagatcgaataaatatagcagattctcttggtgacgatgaagttgacgtagttataccgcaggcaccttatgatgctgataaggatggagatctatcagctggtgaacatactgatgactttaggaagagtagtactaaatataaacggagcagattgtcactttcagatagtgaggctgatgaaatcgagaggaaccatgtatcaagagattcggtgcccaaagttccaaaacgacgaggtcgttctctttttacggaagagcaagagaggctcataagagacctttatgaaaaatataaggatggtcctaaatgcagtcatataatagctgagtctttagaccccagcgggaagatatcttctgctcaagtttctcgtaagcttacacagttaggtctcaggaatgtcacaaggagaaaaaaggttgcaggtgaatctctttcaactggagatcggactatagaacaacaagacaactcgcttgatgatctgaaccccatgctaggcgaacagaaccatggctccaaggctaaaagctccaggcccagaaggaaaaaattacacacggcaagtgatgaccatgatgacacaagtcagagaaaatcatctgatgaagacacattacaagtacttaaaagcagatcaaaaagtaagaaagttccattggtggatagttcactgagtggatcacagcatcaagaagctcagcatgacccagactctgatgatgcgaccataggatccatgattagaagtagaaaaaagaagaggttatccacgtcagattttgaagggaatgtacgaaaccatcaagaatcttcagacaacaccaaagccaaggactgttcaccgattatatcccaacatgagaaagcattgcaagacatttatcctgatgatgagaccattggatccatcattagaagtgtgaaaaagaagagatcagtgacatcaaatttctcagcgaatatagaagcccaagagtctttgagaaatattaacctacaagatgaaactgttgtttctaatatcatggatgcttctgtaaatcatgggtctgatccagtcaataacagtgacaatactgttgaagatgaacttttggatgattttgaaactgagctagtcaataacggtggcaatactgttgaagctgaacttttggatgattttgaagttgagctagatgatcatgagcatactgaccaaaggatcactgatgatgaaattatgactgaatcagggaaagcaacaaactccgatgctaagggaagggctggtttgaaaagaagacacagaatggttattgacgatgaggatgatgattagtaactgttcaggactgaagaacccgtaactattgaggagtggagtttcaaatgggaaatgggattaaaaaaagaacttttcaggattgtttcccttgcactgctaagctctgagcacgattcaagctgtttcacacctactagtgccagatgttcttccatctgtaatgtttagtggggtcacaatctaatggaattttgcagatgcaaagttcaggctgccctgctgtgtggcctgctgtacagactgataatttcgagtactgttttttttgaaatgaaatactgtagagaagccccccgcagcaatttcgagtactgttggctgtatttgaaactccgaacactgcaactctagcgaatgcgctcagttatactgttttcactttcacctaaagtgctctttagac

SEQ ID NO: 34557 - DNA, 3957 bp, Zea Mays
acgaaatcacgaccatgtacatctgatatgttcctacccttgttcgccaccgtattcgccggctgtctccgcccatctcgcctgagaactaaggcggccgccagtcgcagccctcggtggtcggcacctcctcagcccgtttcccctaacgctcacactctacgccgccgcgtcgtcggcctcgccctccctctcgacgaactaagccatccccggccgagcttccgacgcattcccgggccacttccctcccttccggccttcctactccctccacgcaccgcaactgtgacactccgctccgacgcgggcgccgcaggccgttgacgacacccgaacccaaccggcaacgcgcccgaaaggggcagggactccttttgcttgtccttcgcccctcttctcgctttctgcggagggaaaaactttcccagtcaattaaaaaaaaaatcgacggacggctttacgcacgcgattcgctgctcgcccccaaatttctcctctgcttctggttcctttgacgcatctgatcatttccccctcctctacgcgggtcgaatcgcgagagtgtggcggcggctgtggtggttgactggtgcttagggttggagctccaggaggatggcgagccacggcatcggggcggccgctggatctgacgccccgcacgctgaggtcgtcactatgggacagacaaatccatctccttatcctcctgtatcttccagtcatcattcatggtcctctgcaactgggtcagtttcatggaacaatacagtggacaaacttagccaagatacagtttattatgatccacaaagggatgtatcggtttcaggagggaatcaaaatgtaggaagcagtgcgcctcatgttgcccaggcgagtatggggataacagacgcagctcattcccatgtaccttactctagttcagatcaacatggctataaccctgtagaatatgccaattattattatagctacccacaagcggcaaatgattcttctgtccagcaaggagcaaaccaacatccagactgtgccaggatatggaagcagcagctactattttcagaacaacacatggaatggtggaagcacagggaataattttgctcaatcataccagaactactcaccatctgatacaaatgcacaacagagctctacttcagtgcctgccaattctttaccgtatcagcagcagtataaccagtggccgtactattacaatcaatctgtgccaagtgcttctagcaatccagttgctgggaacagtactacagataacttagctgttaacaccccttctagctactcctatcctaatagccagccacctccaccaggaacaacatcatggaaaagtaattcaagtgcttctgttgcgcctcctatgcaggtaccaggtgttttggaacatcaaaatcaatatggcaaccaggcggaaggtcattataaccagggaccaggtgtccaatggtctcaaaaccattacgcctaccagacacagccataccctcagaagattaattccaattattcgcaactaagcaaccctgaagatcaactgaggactgtagattctaacggtccaagcacaaatctttcgtctaaccatgtttctgaaaattttaaaccaaacttgctggattctgtgacaatgaacacttccagcgaaagcaaaatacaagttcctataaatcctcgaattgcccaaggtttctctatggtgataccaaagaatgagaagaaaagttctggacttgatttatcaaggaaacctgcctatgttagtgtgtccatgccggcgaacgatgctaaagcaagtcaagttggtcctgatgctagatcgatacccttttcactccgtaactatgctatgaggaacctcaatcgttgcaagaatgatacccagagggcagcctgccgaagcataatggaggagatcacaaaaaaagcttttgctgagggaacccttcttactaagaactgggacactgaaccactatttcctttgcctgaaagtgttgtgggcatggctggagcaagcagtgatttaagtcccttcttgtcagtatctaccccaaggaaacgtgtgaaaagtagatgggagcctgttgtggatgaaaatgttaccaataaggtggaacaaatagcaaaaggattgatcagcagtaatgtccacagtactttggaccctaaaaatagaattccaaatcctgtgcggggtagcagttgggatcgtgggaagtttctccagtcttgtcaagcatcatcaaataaagtcaatcagaggcctgccaagaagcaaaaaatggctagtaatttgagtcaaatacagaatggaagtgcttcaagtgacagtgagaaggaacatgatctaaccaaacattatgccagtgcaactgcactagcaaactcgcctgaggaaaagaaacgtagggagcatagatccaagcgttttgaaaagagtaaagattcatcattaaaatcaagaaatgcttctgcaaataacgatggtatggctagttttcgtgcaagaagggcaatttcgtctcttcgtactagaacctatgaagaaggcactttggctgtggaggatatggattgggatgcactgacagtcaaaggaacatgtcaggaaattgagaaacgctatctacgacttacagaagcacctgatcctgccaaagtaaggccagaagatgttctggagaaggcccttgcaatggttgaaacatcagaaaagaattacctttacaagtgtgatcaactaaaatctatccggcaagatcttacagttcagagaatccagaatgaactgactgtaaaggtttatgaaacccatgcccgattagctatgcaagctggcgatttacccgaatttaaccagcttgtcaaaagaagccaaacaagatgcagctgttaagcattcccttgcagttcatgcttctgttttatcttgcaattacgttcaatttttcaaactatacaagaaggcacccaatttgaactcatgcctcatggatctatatgtggagcggatgcgctttgaagctatgaaatgcatgtctaggtcatatcgcccaactgtacctgtgggatatgttgcacagattttggggttcttgagaacagatacaggctgtgcaaccaatggggatgatggattagaaggatgcgaaaaatggttgaaagcgcatgggacagttctttcagaagatagcagtggggaattgcagatagatacgaaggcctcttcttctacactctacatgccagagccagagaacgccgttgcacatggtgatgcatcacttgctgttgatgacttttttgcacggactgacggacaacttaaaaggggcagcagcgatggaccaacagtggatactccgtagtagtattgggggctgccgtggcagtagtgctgaggtggcttcttccgtagaaattacaacagggggcatgaaatggaactgaccaacgatgccagcggagctacagtcggaacatgggtgctctaactgatccagtcatcgggttctggcatttgcctcaaagtgatctagtcatccagagttgcaccgcgatgagcttcgttgagaaggcagataagaaagcagcattacaagtttttaatgtcttggtggtttactcacccctaactttaagcgtagaaagaactgtgaaaaaacaactacaggtctacagctttgaagcatacacgtatgttttccggggctcctttttttctggctgccccttagtccgtgaagattgtaaaaatatttttaatgcacataaatttgctttcctatcctatcgaataacaacatttatgtacgtactaatactcctatagttatatctctcgctcgctcgagccgaaccgtttactgatactaagtctttcatatatatgatgatgcgatagcccgaaatggcttgtta

SEQ ID NO: 34558 - DNA, 869 bp, Zea Mays
cggccatggaggccgcaagcccgcaagcaatcaggagccggggagatgtggagacgccggcgacgaggcgaagaagaaggaggcggcgcttgcatcaagcaggctcctcgacccggcgttcaagccctccaaactatcccaggaccggctcgacaagtttaaggaattacacaagaaacggttacagataactgaaaagccgaagtataaaagaaaactgaaaggatcctgcatcaggcctgtcctcgaggaacaaaagaaagctacattgggggcttgatattaaaggacgatggggaaggaaggcaaacatgtaaaaatctgaagacccaaccgcaaaagcatatccacagttccacaccccacttgattcagatttgaaaggagaaggacagaggaaagtggcaggccttttccacggatcatcaggttgcttgtaaggttcatgtttgtgacagcaaccagaaacactggagcgtggacagcagtctcagaactaagcagtaagctatagtatccaaacttacaagtgcgatgatagtttgtttatcggtttcgcttgctgtgtggtgtagtttgtctgtttttgtttgttttttttttggtgaaaaaaacactgatggtgcaagtgcaacagaggcccacgtggctcgtcaaccttttgcaaggcctggcaggcccgcgttgatttagcccttttcccttgtaccttatgtttatgatctgggggttgagcctattatgatcaagatgttgttgaggtatatattaagattattctctcacacaaatagcctgaggtgccgtttgaatctgttcattttttgaggaatttgaatttacataataaagtacgctatttgacttgg

SEQ ID NO: 34559 - DNA, 1822 bp, Zea Mays
agcattttgtttttttcagaataatgatgattcatgccttgcctatgtattaggagccatttctaatctattatcaaagataggcatctcaaacacagttggaataatcagttctccatattcacttgggaccaatattggactaggcacaccattatccattcagcaacagttacttgttcttttaaagcgatcactcaagagagctgatgcattgaaacttccaagtttactatcctttgatcacctttcgcttgcaaaatttgatctgaagcatgtccaaaggccactagtctctttcggccctaatgcatctacaaagcttagaacatgtcctgcagatgtctgtaagtgctccaatggtacgaatgaatgttctagtttatgcaacctgctttgcggatgctgcaagttcatcagagttatcactagcatatgttaagctaattcaacaactggcggtgttcaaaggatattcagctgcattctgtgctctaaagcttgctgaaaagaagttcccatcctcaacaagtttacacatccagcttctaggaatgcagattctacatgagcgcgcacttcatcgagggcatctaaaagtcgcgcaacaaatctgtgatgagtttggggtgttatcatcttctgtttctggagtagacattgagctaaagacagaatttagtgtacggcgtgctcgcactctccttgccgcaaaacagtttagccaggccgcagctgtggccaattctcttttctctacgtgctacaagtacaacatgcaggttgagaatgcaagtgttcttttattacttgctgaaatacataaaaaatctgacaatgcggtacttgggcttccttatgcgttggccagccaatcattctgcaaatcattcaacttggatctgcttgaagcctcagctacacttactctcgctgagttgtggctggatcttggatcaagccatgcaaagaaggcactgagtcttgtctaccagagccttcccatgattcttggtcatggtgggcttgagctgcgtgctcgagctcacgttgttttagcaaagtgccatttatccgatctgaaattctcagttctcgaagatcctgaagctgttttggatcctctgaaccaagccactgaagacctgcaagcattggagtaccacgagatggcagcagaggcgtactatctgaaggcaatggcatacaaccatctcggcaagcttgatgagagggaggaagccgcggctcgtttcaaggatcacgtcactgcccttgagaccccgcataacgaagaggactcgcttaagtactgagacccaagaccatttgttattggcaagcatgccccactgccagagactaaagagggcgtggtggccttctggacccgcatggtggcactggcaggctacaatgctacactgaggcgaatggcgtttgctgccatgcggaggcactgccactgactgtgggcggaccggcggacggcggtgactgaaggagacgggcagccggtgaggtcaatgtgctagttgggtcagcgtggtatggtctcatccatggaccatggtgttcattagagcgagacgaagacatcagattgagacttgatgttcttactctgttcttatcgacttctctgctctgttactggggagttccgaattgctaactcagacagacagtgctgacaatgtgtttgtgtttgaatgtaaacagaacaagaacagaaaaatagaagattgatctgtattttcccttgactgatgctggatatttatagatggtgaatacacactaagaacgaacacgtttgttg

SEQ ID NO: 34560 - DNA, 2444 bp, Zea Mays
gtttttttataccatatggcagtggccgcccggtcgtttctgctgccccttgcgaagcgagcgcgccataacttccaagaactggggttcgagtggggcggaggttgcaacaagaggaaggagacgacgacgacgcggccgcctcggctcggaggagaaggagacacgatcacacgaggcgtaggcgacgaggaggaagcgtccaccaggggacgacgggaccctgtgcgaaagttttacaggctgacagctgcggccgtcttctgctattgctgtaaccgcggccccgcctgggatttctgagctgtgggtgatgttctggtactctcttggttgatggcgaacgcggaaggttttcggctcgtgagatgcccaaactgtctcaacgttctcccagaaccgcacaacgttacagtctacaggtgcggcggatgcggcaccacccttcgagctaaaatctgtgccagcggtggccgacatgcgtctgcaaaacaagctcgccaggactccgacagttattcggtcgctacagccgtgagcaatggcaatggggcgcctccccaaatcaaagaccaaggctcagagagctccttcggtgctgatgctccaagcaccgagcatggcagcaacggggcagggagcggcgaaaatggtggtggcatactggctgtgcagaacgctgtggtggtggctcacgacgctgagaacaaggaaaaccacaccgtggaacagcctacggagaattcagagacttgccgagcagtaagtggacatgatgatgatacagaacgccgcttgaacgcctctgagatcaaaacggttccttctgagatgagcaaggcagccgtcagtgcgcaagatcccgagcagaaggaagaaggcggaggcgaacatgcagcaaacaagaaggggtatcttgtgagggtactgtctcggtcctgtgatcttcgatcgtcacgagactcgactgatttccaatctgcacggacttctctccagtcgaaaagcttcagtgccagcgagcccctccagtcgaagatcatgaacacagtggacgagctgaagggcgacctttctgagctgttcagtaataaacctgcagacgactgcaagccgaaggcgcaccaacctccacgaccttccaattccaagcaagatggccgcacgactcgtgcagccatcgcgtccagtgcacctctcgcggcataccatcctgccgccaagcattctggctacgtgtctcgcccgagcaagtctggccaggttgctgctgcttctcgtggactgccgtcgctgcggtatcgccggcactgggtttatccgttccacttccaccacaacgtgcagacggaaacgagaccttgccgtcatgggtgctgccaccatagttgccagcagccaccctgttacagatacagaccctgcaagcaagaacctgcagcgacgcgcaggccaccggtcatggtgagcaataagcgccctcctcctcccagaaactactgcctgccagtcctacgtggcgccccgttcgtgatctgctccagctgcgtcagcctggtccagctgcccgcggagttcgccgtcccgagcaggggaacgcgccggctgcggtgcggctcctgctccgaagtcctctcctactcctacagggaccccggcgccaggaagaggctgcagtcaccgttcgggggcgacgagtacagcactgacgagtacgagcaggcttccggcggccacaacgccgccgccgccggcggcttcttcggggaggcggacccggtgtcctactccgaggagtacgggctctcgttcggcatcggccactcgaccagcaccgaggacgggcagcagccgctgtacgtgtcgaggaactcgtccttcaacaccgtcgacgaaaggacgggtactagagacggcaagcttcaccggctgatggggtactcgtcggcgagcgaggtgctgcagcactcgcccgacctgttcgaaagcttcggcaggcgcgcggccgacgcaggaagagcgcacgtcggcgggaagggcaaaggcgtttgcgtggcagagaacgacgcgtgcgagcgagacggtggtgcggtggagagatcgaaggtgaggagtggtggttggccggtccatgggatcctgaagaaggggatccacggcctggaatcactcaagctcaggtcgtagctggtggttttcgtttggcggggctctggcgatcatgtttagagttcagtggcagtgtagtcatgcttattagtggttagcttgtgtgtgagttgtttgcgattcatctctgtgtctgtgtgtgccgagttggttggtttgcaatttttgtcatgtgtgtaaagccttgcacgccgagcaatgctcgatggtgtgaatgtatatacagaattactatttggttcaattcaagataaatagtactcactctgttgttg

SEQ ID NO: 34561 - DNA, 1691 bp, Zea Mays
tgggaggcccaatcgtcctcgggagcacgaaagctgtagttgtagctagtgttggcctgcgcaaccaatcgccaggaaacagcttggtagtataaccactgaagatggtcagtgggaggccgcatggtgaattggactcatggttcaagagcctcatggtgacctctagcagcgagagggggcaggctgggagtggtggtccagcgccaacattaacaggatggaaggaccttccgatggagctcctggtgcggataatatccacagttggagatgataggatggtcatcgtggcgtctggtgtttgcacaggctggcgtgacgcgctgggatggggggtcactaatctttcacttacatggtgcaaactgagcatgaataatttaatgatatctcttgcccacaagttcacgaagttgcaagttctcactctccggcaaaacaaacctcagcttgaagacagtgccgtagaggctgttgccaactactgccatgacctacgtgagttagacctcagcagaagcttcaggcttagtgaccgctccttgtatgcgctggcccatggatgcccacggcttacaagactgaacattagtggatgttccagtttcagcgacactgcgttgatttaccttacctgccgctgtaaaaacctcaagtgcctgaacttgtgtggatgcgtgaaggctgttactgacagagctttgcaggctattgctcagaactgtgggcagctgcagtctttgaacctaggctggtgtgatgatgttacagataagggagtgaccagcttagcgtcaggatgccctgatctcagagccgtagacttgtgcggttgtgttcttataacagatgagagtgtggttgctcttgccaacggatgtccgcacctgcgctcgctgggcctctacttctgccagaacatcacggaccgcgccatgtactccctcgcaaacagccgcgtgaagagcaagcgtgggaggtgggatgcagtgaaagacgggctcgcgaacctcaacatcagccagtgcaccgccctgacgcccccggcggtgcaggccgtctgcgactccttcccggcgctgcacacctgccccgagaggcactccctcatcatcagtggctgcctcagcctcacgtcagtccactgcgcctgcgccctccacccacaccgtgccgggagagccctgatggccaaccatgcgtactaataaacatgttggtggctttgcgctgatagttctcgcgaatggggacgcatgcctggggggtgatggcgtcgtccaggtgtagaggaagctccctgtgtacataaactcgaaacttggcggtgtgataaggcactgctgtggtaggactttgtgtgataatcatggagtggcgaatttctagagaatggcatgtactccagtgctacctggacattgaccagaaaaaatgtggtatctagttgccttctgtgtaagggcggacgtgttgggatgttcatgcattttcattaatctgataccttaatctgactaaaatctagattaagttacatatcaaatcattactttaatctcataacttaatctttatttagattcttgaattgagctgaaagatctaatgtgtacttattttatggactgcctaaatgttgatgccaaatgcctggctctgttgaaaattttgcataggagaaaata

SEQ ID NO: 34562 - DNA, 2091 bp, Zea Mays
tataaatcgttgcagaaaccatccaaccaatcagccctggttctagagcaactctcatcctcactccccccactcgcccgcatcttccggtcttcctcatggcgtcgagcgacctcgccgagagcctcctccccggcggcgggggcggagcctccgcctcacatgacgaatacgaggagcgcgcgtacgactccgaggacaagatctccatcgccgtgtcggattccgacggcgaagacgacggcacgccggcgtcgcgcccgcccttctcgtggcggaagctctggcgcttcacgggcccgggttttctcatgtgcatcgcgttcctggacccgggcaatctggagggggacctacaggcgggcgccgcggcggggtaccagctgctgtggctgctcttgtgggcaacgatcatgggcgcgctgatgcagctgctctccgcccggctaggcgtggccacggggaagcacctcgccgagctctgccgccaggagtaccctccctgggccactcgcgcgctctgggccatgacggagctcgcgctcgtcggcgcagacatacaggaggtgattggcagcgcgattgccatcaagatcctctcggggggtgccataccgctctggggtggcgtcgtcatcaccgcgctcgattgcttcatctttctcttcctggagaattatggcgtgaggaaactcgaggcatttttcgctgtactgattgcaactatggctgtttcatttgcggttatgtttggtgaaacaaagcctagtggcaaggaacttctgatcggtttggtggttccaaaattgagttcaaagacaattaagcaagcggttggaattgtgggctgcatcatcatgcctcacaatgttttcttgcattcagcactagtgcagtccaggaagattgacacaaacaagaaatctcgtgttctagaagcagtttactactataacatcgagtcaattcttgcactcatcgtgtccttcttcattaacatctgtgtcacaactgtttttgccaaaggattttatgggtctaaacaggctgacagtataggtcttgagaatgctgggcagtacttacaagaaaaatatggaactgcattctttcccatcctctatatctgggctgttggtttgttagcatctgggcagagtagcacaattactggcacatatgcaggacagtttgttatgggaggtttccttaatcttcgattgaagaagtggctacgggcaatgattactcgaagttttgccattattccaactatgattgtggctttatttttcgatactgaagatcctactatggacattctgaatgaagcactcaatgttcttcagtccatacagattccgtttgctctaattcctctcatcaccctcgtttcaaaggagcaaatcatggggtcgttcgtaattggtcccatcaccaaactggattgttacggtatttctgatgcttatcaacgggtatcttatactatctttctacattactgatgtccggggtgcattgcttcgctcaagcttgtgtgttgtgttggttgtttaccttgcattcatcgtctatcttattgtgcgaaatacttcgctgtattctcgcctttgctcatcaacgtcaaagagctcgtgagcatttcaatgtcgtcatctgctgctttgatgggttggaacagtgctgtagatccatgcaaagcttgtgctgctgcttatttattggcttcagagaagactatgtatgctgtatgcatatcccgtgtatgcttgcatttatgggatatttggtagtagggctccttcccttttaggatgctatattttcacctccagtcacacgttgcagatagatttcttatttctgaggtttatggtgatgtgaaaagactactggcaaaaaaactggcattgctgttcctcctgaaactgagcagatgaaatttactgaatgatctgtaaagctcgatgttgcagttctgaattccaggagctcaatgcatattctgctgaagcttgaatggaatgtcgtgtaagatatgaatgagttgtactttgtgatctaccttagagatgatttggtgacaag

SEQ ID NO: 34563 - DNA, 3220 bp, Zea Mays
cgttgcagagtgagccttccctccaccggtcgctcctagcccggactaggcggcctcccagtctccaccgggccggggctgcccacccccaagtccccaactgcatccgcgccgccgccatccgtcgcagtcgcagtcgcactgctggctgcccgccgtaccgtaccaacaagcttcttctacttctcttcctcgcccagtctcccctccttccctaccatccccgcatttcgaaaggagctagctaagctagcgcaccggcctgcttcccttccctcccgccgtccgcgcttcttccatttcccttcgcaacggcctctcggtcacacccgagcccgtagctgcgccgtactccgtccgtccgtccgtgccacaccgccacccaccaggccagagccaaccgggagtggccacgcagagtggttttggcggcttgctggctagctctgcctctgcccgccacctcggaccagccagtgtccatgccgcggatggccaagctgctgctccagctgaaggcggcggcggacaggaggcacggccccggccccggccggcgccacccgctcgcgccccgccacgcggccgcgtccgccaccagattcgtgcccgcctgcctcgccctcgccgccgccgccaccacgctcgtcgcgctggcgctcacgctgcagaatcgcggcctcggccccgccgacccctctccctcctccgtctcgccacgcggcggcggcttcgcggtggttgtcaacacgtggaggcggcccgcgctgctgcggaggtccgtggcgcactacgcggcctgcgggggcgtggacgccgtccacgtggtgtggagcgagccgcggccgccgccggaacccctgcgccggggcgtcctcgggctcggcggcgcccggcggcgcgtgcggttcgagatcaacgcgggcgacagcctcaacaacaggttcaggcccatccgggcgctcgagtcggacgccgtcttctccgtcgacgacgacctcatcgtcccctgctccgcgctgcgcttcgccttctccgtctggcggaccgcgccctccgccatggtcggcttcgtgccgcggatgcactggcctaccgacccgagaagcactgaagatgcataccgatacggaagctggtggtcagtttggtggacagggacatacagcatggttctttccaaagcggggttcttccacaagaagtacctggaaatgtacaccaaccagatgccaccgtccattcgcagatatgtggatgagaacaggaactgtgaggacatcgccatggcttttcttgttgcaaatgctactggagccccgcctatatgggtgcaaggaaggatatttgagattggatcgagcggcatcagcagcctgaaaggccatggcttgcagagatcaaggtgcctcaacgcgttcgccgccatgtacggccacatgccgctcgtagccaccacagtcaaggccgtggacagccgcgggagctggttctggtgataaagatatgtgcctcttttttctgtacatcctagccttgcctctagtctacattgtttatatagcagagtttgaaaccagagataagaatgagtaggctagtgtgtctgtgcataattcatccgcaccttagaacacaggctatatagattttacagatggaactgagacgcagtgattatatccatattgctgttggagccttagtccaacatcaggatcagctaaggccctgtttggttcctttagttagtaggtaactatgtgcaaggagattgtttatgtatgtgagacagtaattattaattcaatgaatgaaatttatggtggtggtctgtctctctcctctattttgtgtggaggatcgactattttgtgtgcgcctggctgcctgccaagatcctgatgctgtccagttcagtgatcagtgggctaacttttatgtggctgtgacggccgaaacaggatagtgaggataaggggggcactctttcgttgggccagcgctgcatgcttccttgcttgcttttttgtcgcgcctgcttctcccccctctgcctcttggtgctgcttcctggtgggggaagggaaggagaaggctgtgtgcgtcctgcgccgataacgcgatggtgtccattgtcactgaggtatgggcgctcgctggatgcggcccggcgtccaaggcggcggcggtagcggtagcggcgcaggagttgccggcgcagcatccttctcctgccgcagcgggaggagggaaggccaagaagagagccgtgccagtgtcgttcagaggcgtcagcagcggcggtggtcaggaccaccagcgtgaggccgccgccgtcgtcgtcgggcggcggcgcggcctcgcgtcgtgcgcgctcgccgccgtcgccgcctcgttctccgcccgcgctgaccgccccgcgcgggcgcttgtcctcgaggaagacgacgacatcgagctgctggagcgcgtgaaggaggacaggaagaagcggctgcagaagcagggcatcatcagctcctccggcgccgagaccgggtatttgcaggacctcatctacaggctcagcaaagtcgggcaggccattgacaacgacgacctcccagccgcgagcagcgtgctgggaccaagctcagacgcccagtgggtgcagaacatcaatgcagctttctccaagctcagctcaagcccggagcagaggaacgtggtcgacagcttcaacagctcgctggccacactgtttacatcagtgagcaagctcgaccctgaatcctccaagtcggcgttcgtgtcgtccgcgacggcgttggagaaatggatcgcgttagctggactgggcggccagctcaagggctactgatgcgtgcgaggggaagagaagcactgggttgttctatgtttgggtccggcatttgtgaatctcctgaagagggtaccgtgaccgagaactgagttcagataggcatgctatgctcatcaagaaactgtgactgtttttgagactctgctgttacttacaagtggtaggaaacgaagttgtcttgtatcttgttgtccagtttaactttcgaaattccaaagcagctggcgtttattttttttaaatccaaaaattgttgcatgccatgtgggactgaggcaggctcgtgttggtatggtattgacaggatacacgatagttggaagcagcatacacaatagcacaaaccgatggtcg

SEQ ID NO: 34564 - DNA, 1971 bp, Zea Mays
gaggattcatcagccattaacagtgaatcatacagaggttattacaaagaagacaagcaagccaatcaaatcgcttcagcatatgatctcacaagctcagacctcagcaagtttaacttgattgtctcatacaactcaacatacaagggtgctattgaattgtcattatcggtagcttcattttcgttttcaccaatcttgcttcgagttccacgattactgaatctggtctcaaatgcataccttcaattgaggggcagtgatactaagatgcagtttgagtttattaaagacatgcctagagttgctcaacaagaatttcctattgatatatccttcttagtgggaaaattggttttcgtatggatgataatgctttactttcctgtcatcctgagcaatttagtctatgagaaggaacagaagctaagaactataatgaagatgcatggcctaggagatatggcatactggattatatcatactgctattttcttcttctatcgctactgtatatgctcttcttagtttcttttggctctattttcggtataaagttatttagattgagtgactacagggtacaattcgtggtttacttcgcctacataaacttgcaagtttcatttgcttttcttatggcaacattcttttcaaattgcagaactgctagtggaagctggagtacactcatggagttgttcccaccattttgtttgtaccgcataatctatgagttctctccacctccatcacctttgtatcgtacagacttttctggagtacactgggaagacttaagtgatcacaagaatggaatgttagacattctcatcataatggcagtcgagtgggccacattccttttgttaacattctttgtggatgaatttggtaccttccgaaacggaattagaaaaacggtttcaattttccgctcaaacacagatcagagctctcacacttgtcagatgcagactattcagcttgaagaattcctaccctcagttgaaacagacaggactgatgtttcgagagagagagaaacagttcaacaactcttacgagaatcagatagcaatttttcagtaatatgcgacaatcttaagaaagtgtaccatggaaaagatggaaatgcagagaaaattgctgtcgcagggttatcactttctgtgcaacgtgggcagtgttttggaattcttggtccgaatggtgctggaaaaacctctctcattagcatggtaagtacaaacagtcttagatgcataaaacttgcttgtattcacatacctgaccataattcaggaaaatatatagggtgcatttcttgtacaatcgttattcgaaagagtgtggtgagctttctgtaggttgtttacatggacgagccgagttccggattggacccggcatcaaggagggcactgtggaatgctgtgatgtctgccaaagagaacagggccatagtcctcacaacgcattcgatggaagaggctgaagctctgtgcgacaggatagggatcatggtaaacgggagcctgcagtgcattggaaactccaaagagctgaaagccaggtacggaggcacgtacatgctcaccgtaacagctgcggcgggcgaggaggcggcggtggagcagcttgtccggtcgctctgccccgcggcgaacggagtgtaccgcatctccgggacgcagaagttcgagatgccgaagcaggggctgaggatcagcgaggtgttccaggccatggagcgtgccaagagctggctgaacatcgctgcctggggcctgtccgatgcaacgctggaagataccttcatcaaagtcgcaagcgggagtgacgcgtcctccgtgtaggctgtagatagatagatggcggcgtttggacttctgtattcgatctaataaatccatgccggggcgttgttactggtagacacaattgcgcacttcaaatgcatgaaaagt

SEQ ID NO: 34565 - DNA, 1135 bp, Zea Mays
gctgactccgcctccgcctctacggtgggggccgccacgcccctcgtatgggaccacgtcaccggcgccgctcgcctgccgttccgcctccccgcctccgtcgaatccctgcccgcggggctgccgcggcttgactccccgcgccggatcgccgccgcagccttcggatcggacgacgagctggtggatctggaactgcgggtcgagatctcgtccatcgccggtatcgaggacgcgcttctcctgaagcccgcctctggtaaggccgccgagacgcggctccgcgccgggtgggcacgctggctggaggggaaggccgactacctacggcgcgatcggatgctccgctccaacctggaatccctcaatccgcgcaaccacccgcttctccaggatccggacagccccggcctcacttctctcacccgcggcgaccgcatggtgcagcgaatgctactagccgagctcgacaagcccgcgtccaagagctttgagcggcgtaggcttctatcttacgagaacaagcagagcatgacaacaactgtgaaggagaagccgcagacgggaaggaggtggggatatttcccggggatcgatccacatttgggattctcagagttcatggagaggttcttcgagcatgggaagtgttccatgagagtgttcatggtgtggaacagcccgcagtgggcgtatgacatcaggcaccagaggggactggagagtctactcaagcagcacccagatgcctgtgtagtcatgctatcggagacactggaactagagtccttccaccaattcgtcaaggaaggatataaagttgctgttgcagtgccgaatcttgatgagcttttagaaagcactccaactcacgtatttgcatcagtgtggtatgaatggcggcagacaaaatattaccatttgcactacagtgaactagtacgccttgctgccctttacaaatatggtggaatataccttgactctgatgttattattcttaaacctttaacatcgctccggaattctattggtgccacaaatcatgtctctggaaattcccgttttggtggggctgtgttagcatttgaaaaacagaggtgtcagattggaacagctacatcattgactggct

SEQ ID NO: 34566 - DNA, 136 bp, Zea Mays
ggccacctgtcctccgccgcatcaagggcctcctcgggcgtcgtccgtcctccgtcatggccacacgacactggtggacgtcgtcgccgcgcccctacggtgtaggtggcagccagagactcactttccaccttcc

SEQ ID NO: 34567 - DNA, 1564 bp, Zea Mays
ctttttagaattttaagaaaagaaacaatcaatttggaaatccgatgtcgggtcaaatacttgctgcttactttttgaatagtttccattctaacgttgttttggtcataaaatggcaaggggcacaaataggatagtttcttctactttgttttactacattttctgtgagtaccagttttataaaaaaaacttgacctgcggggggtaagacagcccccgggtattgtattaagaataagaccttctcacacaggtcaagaaaacccccgaacccctgccccacacatacacagcggcatcgaagctcatgtgagaacgaccacgaccagggctgagccttagacctatgctttggcgtggaacagacgagaggatttttttaaccacagcctggaaattcgctcccacggggagtcgaactcaggacctgaggagtgctactcagaccacctaaccaactcagctagaggccctttcgcgagtaccagttttatcatatttctctaattctctttatgtttcaggaatggtggcagctttaacaaacgagagtgcaacaagcaaatctgtatattttgctcattgcacgtcagagatgatattcattactcatttgctgacagagcaacctgagaaactcgctggtcctctgctggctgacacgtatgtaactctcttaaaaggtcgcaatgcatggtatgggcaaatgcttgccaagggagagttgagtcctgacatgggtgatagtatcaaggggaagggaatgattcagggtatctctgcagttggtgcattttttgagctgcttagtcaacccagcttaagtgtgcagcacccagaagaaaacaagcaggttgctccagctgagctatgcccaatcctgaagaggctttacagaatactgataaaaaggtttgtgctatgtatcatcactactctccatatttggagagtttacagtgtgcttgaggagtgagtgccgcagtgcagacgaagtgagaagtgaccacttctcactcattcattttattggtttcattttactctcctgattagatatagacctgacttatgtgcagggagctcccagcaagggacattcttcaagccctgagggacgaaacgatgaatgatcctcgggaaaggattgagatggcacaaagccatgcattctaccgcccgtctctccttggaaaaccatgatctagttagtcttgtagattagtagaatataaacggacgctgtgctgcaggtttctccactgtgcttgctgtccttgtgtccgagctacatggggatggggctttgtcagttgtcgaattctttgtgcttcctcgttgccatggtgtacaagagattactgaaccaataaatgttctaagtgcatattatatgaacacccaatttgaaagtacccgaggaagatttcttatgcatggatttgtttggtccaacgtcatatgctagtttgggtggcaacatctatattctcatgattgtagattattattcaaggtatacttaggttttcttacttcaaaacaagactaaagttgcatc

SEQ ID NO: 34568 - DNA, 1624 bp, Zea Mays
atggaactatcaaggatttccacagaaaaatttgatgatgcagttaaatccatgactgatgctggtttcttgaaggaaactgttgaacaagcactgaaaaaactgataatattatatgaggaaaactgggagcatatagaagctgataattattcgactttggttgaagctttacttggtcattcagatcccaaagcagggcagaaaaagcgagctgagaagaatctcaatgtggattcagaccattataataagaagctgaagattaaaggtggtcagacgcctagatctagtatgcatggcagtgccaagaaagagttgactgaagaggcagattcccttgaggagagaaccactggtaaccaattgcaaaccagtcgtgcagagactacaataactggtgaaaacagttgtactttacttgaaagtcaagacccttgcacctctgagaccccaacagtcatgtgtcctaaagttttagggtccaaccgtcacaatggcatcaaaagacagtaccatgatgtcaatgatataacaagaggcgaagaatgtgtgagcattccaatagtctgtggagaggatggggttcttcctcctccatttcactacatatcacaaaataccaccttccaagatgcctgtatcaacctctcacttgctagaattggagatgaaaattgctgttctggttgttttggggattgtctagcggagccacttccttgcgcttgtgcaagagaaactggcggagactttgcttatacgagagatggcctgcttaaagaaggatttctagatgcgtgtgtctcaatgctccgggaaccacttaaacaaccgcacttctactgtaagggtgtctgtcctattgagcaaataatgaagggagtcagctcagcgaaacctgatgcttgtaaagggcaccttattaagaagtttatcaaggaatgctggataaaatgcggctgcaccagaaattgtggaaaccgtgtggttcagcgaggcattactcgcaaactgcaggtgtttttagcttctcggaaaaagggatggggcttgcgttctgctgaaaatcttcctcgtggtgcttttgtatgcgagtatgttggtgaaatattaacaaacactgaactacataagcgaaacactgagctatatggaaaaaataataaaaaggctggtaaagcaaggcatacataccctgtgaatctcgatgctgactggggcactgaaggtgttctaaatgacgaggaagccctttgcctagatggtaccttttatgggaacgtggcgaggtttatgaaccataggtgcattgatggtaacatcatcgcaattcctgttgaagttgagacgcctgaccaccactactatcatctggcattcttcacaacgagggaagtagaggcttttgaagaattgacatgggactatggaattgattttgatgatgtcaaccatcctgtaaaagcattcaaatgccattgtggaagcacattttgtcggggaagataaaagacctatctcaggaggatgtaaatctctggtgttgtcctgagaatattcaaggctcgtggcgggttcttttggaccatcctacttattgcaatgctttgcgtgctaaaag

SEQ ID NO: 34569 - DNA, 1244 bp, Zea Mays
acataatctatttaaagatagtggacatcttcagtagcagctgccgtggccaccataagaatcctccttcagagccatatgtccttgagattatgttggaagtggaggctgtgtgcaaggcgtgacagcgtgtcgtggtcaaggaccctaagctctagcgccaaattcatatcacatttgttctagaatgagatcatgaatggtccctggggttggcctggttcacgctccattctcagtgcgttttccgacatcgttcttcaagcaagcatgcgagctggctcctattttcactgagcttgtggattgtgtgagcttagatggggagtccttgcaagctgctttgtctagaacaaagcaggttcatgaatttaccgcaaggctgctagatattcatgataagatgatgttgataaataataaagaggatatacgcttaatattgcaccggtcggactatatgttggattctgaaatcaattcactgcttcaaattgaaaactctaggagctatattttgccaccaacgctgcaactttctgttgttccatcaggtggttggcaatgcagtgatgctcggtgaaatcataaactacgtgcagtccctacaatgacaagttgagtttatgtccatgaaactggccaccgtgaatccccaggtggacttaaatagcctgcctaacgtcctccctaaagatgtacatcagtcttgtggtccgccacatttctcgctggagacctcagacgcttcgttgtcgtacctcagccagcctcaccatggaagccctcttggctgcatggacaaccagagttgtatgcatccacttgacacgacgttttgcctggcgataaatccgcagtatcatttcctcaacggtgttagcgatgcatcgtctcagttgcagctaatttgatgcttgtgtttatggaaaccaagaggtggcgctgatccattggaaacctggttgtgtatgaatgggtttccagctacttctattcttggagatagaaaccaacatgtttggtttttgtttttattcgctttagaacaactcatttttgtacgaaaagaggcatttagctataattgtttgttgtagtatgtttaccgcaggatagccgttccatgaaatacataaaaacctgatactgttgttatatttggtttagtcatgctcttatggaacctttaatgaggatttttctatatcaagatatcatcgtcatcgtcattattattgcat

SEQ ID NO: 34570 - DNA, 3353 bp, Zea Mays
gacccgcccatgtcccctcgatagcaccccctgttctttcccatctctccaactctccttgcccggctgccccacacctctgctcttccctctcgcctcccgccgttacagcttgcagctccagccccaacccccgtccctctctccctgagccgtcgccttcgccttcgctgcgaaatctagggtttacgccgcgcatcgggtaccgcgcacgcaccgaccgaccacccggcggtcggcgccgctacacgcgggctcgctctcaggtggttgagcgtggccggagaaggggaggggcgacactgctcgtgggtgggtcagccagtgtgccccacgaggaacggcaatcatgtcgcagacgaactgggaggcggataagatgctggatgtgtacatatatgactattttgtcaagagaaacctgcaggcaaccgcaaaggccttccaagcagaaggcaaggtctcatcagatccagttgctattgatgctcctggtggctttctctttgagtggtggtctgtattttgggatatattcatagcaagaacaaatgagaagcattcagatgttgcagcatcatatatcgagactcagctaattaaagcaagggaacaacaacaccagcagccacctcaacaacagcaacagcagcagcaaatacaaatgcaacaaatgctgttacatagagctgcacagcagcagcaacagcagcagcgtagagatggttctcttctcaatggtactgcaagtggattttctgggaatgatcctttaatccgacaaaatccagctaatgcgaattcgatggcagcaaaaatgtatgaagagaggttaaagctccctccccagcgggattctctggatgaggcgtcaataaagttgcagcaaagatatggagaaaatgtgggacaagtaattgatccgaaccaagcactattgaaagcagctgcagctggacaatcctctgggcaaattttgcatgggactgctagtggtttgtcaggtactccgcaacaagttcaggcaagaagcccacaacaaccacctacagcagaacagaatatcaggaccgagatcaatccagtgttgacaccaagagcagcaggcactgagggttcattgattggtatccaaggatctaatcaggctggaaacaatttaactctgaaaggctggccgctcacgaagccatttatgcaatctccacagcaatttcagcagctccagtttctgaccccacagcagcagcagcagcttttgctgcacgctcagcaaaatctgtcgtcctcgatgtcaagcgatgttgataccaggagattaaggatgcttcttaacaacaggaatgtggtccttggacaggatgggcagacaaatagcggcggtgatgttatcccaaatattggttcgccagggcaaagtggtggatcgcgtaatgatatagatatactaataaagaagaaatttgctcttctacagcagcagcagcagcagcaaagtcatagccagcagcagcagcttcagcaacctgcgctctctggacagcaatctcaaagttcaaaccagcttctccatcagcatggaaaaccaggagttgggagcttgcctattgatggaaacttgccaaactcttttggatttcctgaacaaggatcaaagaagagaaagaaacctgtctcatcctctggtagagctaatagttcaggaacagcgaacactgctgggccatctcctagctctgcaccctcaacaccatctactcacacgccaggagatgcaatgtccattccacagctgcagtataatggtggcccttcaaaaccattgatgatgtttggctctgatggcactggaagcttgacttctccagcaaacccgctgggtgatgttgaacgtctgttggaagatggttccttggatgaaaatgtagaatcttttttatcgcaagatgacatggatcctcgagaaacaatgggacgctgcatggattctagtaaagggttgggttttactgaggttgcaaaagcccgtgcgagtacaaacaaagttgtttgttgccatttctcattggatgggaaacttcttgccaccggagggcatgataaaaaggtcgttttatggtttacagatgtgctaaaacgtaaatccgcattagaagagcactcttccctaattacagatgtccgattcagccctggcatgacccgccttgccacatcttcctttgacaaaaccgtgcgggtttgggacgctgacaatccagattattcgctacgcacttttacaggtcattcagcatctgtcatgtcacttgattttcatccgaacaaagaagacatcgtttgttcgtgtgatagtgatggtgaagtgcggtgttggagcataaataatggtagttgtgtgacctgcgttagggttttcaatggaggagctactcggttaagatttcaacctcgccagggtaaatatctggcagctgcctcagaaaagggaatatccatactggatgcggagacattacaagtttgtagaactcctttgcagggccacgtacagattattcagtcagtatgttgggatgccgcgggcaactatctggcgtctgtcagtgaagattctgtcagggtgtggtcatttacctcagggaactacatcgaatgcatacatgagctgatctgcagcgggaacaagttccattcgtgtgtttttcacccaaattacccgaatttgcttataatcggttgttatgagtccctagagctttgggacataagggagaagaacacggtgacaatcagcaacgctcatgacggcatggttgctgccctagccgcgtcaagtgcatcggggctggttgcatcagtgagtcatgatcagctcgttaagctctggaggtgacactgaacacagcaacgctcgtctgtgtcattctcatttccagtgtcgtggcaaaagcgaaagggcagctgatctgatctcctaggttgatttgcgactgtggcatgcgcaaactattcaaatagttgtcagtaatgtgcttcccttatttctttgtttgtttatccatgccgggtgatactatgttacaattttatctatttagagaactgctattataatttgacctcccacttaggcctatttggctactctagtatttattccaatccatgtgtattgaagtgggttagggtgtaaattagtttaatttatacacaattcaactcaatacatgtggatttagttgaatactagggattaatgtaaatactatagtatccaaataaagtaggcttatgttcatttcatcccctagtccacggggattgaaggagattggagtggactgatagtg

SEQ ID NO: 34571 - DNA, 1739 bp, Zea Mays
gactgacgtacgatttcaaaaaaaaatgaacattgaactgacatgagtagcttggagtttcgagaacataaagatgtccatgttctcatgtttgattgccaagcccagtgaaatgtggctttttcagggtctggaaagactgaggaaaatcttgctggatgcaagctgaaatccaccctgtgtttggtttctgctacttgtgtcggtggatcaggtggttgacacctgacatggccaagacgacaataataaattgtcaatataatccaaaggatctactgtgatacaaagtgccatgctcttccacttgcggcaaaagctttatcaatactgcatgatcttacatttgtgaattctggggatggatggacacattgcatcttgttgagaggctttgacccgcagtggctgtccataacattctctaaagccatcttccttgggaacggcttaattgccattgtatctgggctatttgcgaaccttcttgctgagaacttgggctttggtcctgtggctccattcgatgcggctgcgtgctttctggcgattggcatggctatcataatgtcctcatggagtgaaaactacggagatccatctgaaagcaaggacctgatggcccagttcaaggttgcggctaaggcaattgcgtcagatgaaaagattgcattactgggagccatacagtcattgtttgagggctccatgtacacatttgtcttcctatggactccagcattgagtccaaatgaagaagacattcctcatggttttatttttgctacattcatgctgtcatccatgctgggtagctccatcgcgtcacgtctattagcccgaaagctcaaggttgaaggctatatgcagatcgtgttctcgatatcggctgtcacccttgtcctccctgtcgccaccaacatcttagtgccaacgtcttctgtgaaaggaggcagcgtatcaattggaggttctcttcagcttcttggtttctgcacctttgaggcatgtgttggtatattctggccgtcaatcatgaagatgagatctcagtacattcctgaggaagcgagaagcacaatcatgaacttcttccgcataccactcaacttatttgtttgtgtggtgctttacaacgtgaatgcattccctatcactgtcatgtttgggatgtgttctatcttcctcttcatggcagcaatcttgcagagacggctgatggttgtctctgatcaagtacacaaatcatcaactacacaagaaatgatcggggaagatgagccactaaatccttagatgtcgacagaaccatacatgcgaaatcagatattgacgacgacgtccatactccatactgcatttcgtttcgtcacctgtgcaataagatggacgtcaaaaccatgtagtctagtggttttcgtttctgtagtgtagatttgaccaggctgctaagtttgcacctgtcccgagaagattagatgagcaagtcaatcgatattggctattcgcattgttgtttcttttttttaaaaaaagatgttcgctttaaagtttaaacgatacggtatatatccttgtaagtgttgcattgctgcatctgatgacaattctagtggtgctgttactgactgttgagggctctctctacttggtcgttgtaagaactgttgcttcttaatgaaaaacgggctcaataaattcagtagaagcctgcagttgcagtaatcatacaacacgat

SEQ ID NO: 34572 - DNA, 738 bp, Zea Mays
ataatgatagaaggtcgtagcacaaccttaaatgaggtgccgccgtcgccgccgatgatgctgaacggacgtgccgcgtccccatccagaaccatccctgctcaacaccttctccgttgctcaccatggcgtcgtagttgttgccggacccattgccaccagatagtcacggcctcttcgtaacttcactccgttcatgttcgtcgccgctcgtgccaccctcccgcggctgtaactccctctcccttcctcctctcaccgcaggcctcatcacggtcgttgctaacctacttccttctctcttcctcctctcactgcaaccctcatcaccggctaacctacctccctctctcttcctcctctcactgcagccctcatcacccatcgttgctggttctgcccgctgttgctggagatcgtgaccatggaactcacgtcgtcgtcctagcgctcctcgcgatgttgctgctccagggcgtcatcctcatgtcaacggtggagggccttgtgtggatcatgcaagaagctccacaagttcctcatcaagaagatcaggcaaactggttggagggatcttatcagaaatgtagcggcggactactcatctctttggagagcggaaacagccttactttccaacttgataaggagaagaacatgtggttcaagaggagccatacatcgaggagttcgtttcgatctaggtggcgtctcccagtgactttatggcaacaagga

SEQ ID NO: 34573 - DNA, 1526 bp, Zea Mays
cactttccaatttccgtctccaccctccgcggtccgcgccgcggaccgcggtcaccactcaccagcagcgctgcagcgccacgccgccactccagtcccccaccgaccacttgccgattgccgttgccgcgtcggcgttgctggatcctcaagcagaccgcccggacccgggaacccgcccgcgcgcttattaataacggccacctcgttcccccgcccgccccgaaggccgagggaagtgtacgcgcctagcgaccagcatagattcgttccacgcctacctcctgccctcgcccgtgctctcagatctcgcgcgcgccccgcaaagggtaactttgagccatgggcacagttgtggatgctccagcagttgtggctgaagaggtcactgagaacatgttgggtggtaagaaagttacagctgtatttgttctaggtggtcctggaagtggaaaaggcacacagtgtgccaacattgtggaacactttggattcacccatcttagtgctggagatcttttgcgtgcagagattaaatctggctctgagaatggaaccatgattgaaaacatgataaaggagggaaagattgttccatcagaggtgactataaagctgttgcaggaggcaatgataaaaaatgaaaatgacaaattcctgatcgacggatttccaaggaatgaggagaatcgtgcagcatttgagaatgttaccaaaatttctcctgcatttgtgctattctttgactgttctgagaaagagatggagaaacgtctcttggggcgcaatcagggaagagttgatgataacattgaaactatcaaaaaaaggttcaaaacctttgttgagtcaagtttgcctgtcattgagcattacaactcaagggacaaggttaaaaaggtattgatggatttttatcttgccaggggtactcctactgcactccgatgacacaaatatgtgatgtattatacagtagaaataaagccagaaataagatgcacattagaataaatacgggagattcaaagtatattttagatctattgtgtgtgtgtgtgtgtgtttctttgctaatggtcattatagtccacatttcaattaactgatggccttttctttttgcaaactttagcacctatagtaactttcatttttattagattgatgctgcaaaaccaattcctgaggtgtttgaagacgtcaaaaccatttttgccccatatgctccaaagcatttgttggcgctcccattcccctccttcccgcttttgagtcctctgggctaggttcaatgaattttgcccacttccaatctaagaagggaaaacgatacagctcgtgggcccttcttcagcgacgccaaaaagaactgaacaaaactgaaatacattcatttgtatccataatcccaattctaaaaacaccaagacctcgttcgattataatttagatatacatatatgtactatttgtttttatgcaattgttatataccaacatgttattgaatatttgtgtgccgt

SEQ ID NO: 34574 - DNA, 1489 bp, Zea Mays
gagagctgtctcactaggtcgcggaattgaagtagcctctctgtatttgcccggggaaggcttaccacggtttatcccttcctcagactccactcatgtattcgtattcaaaatcttcaaccaggtcaaatcatcatggatatagatttccgttggggtggtaatccaagcataatcctagctgttgatgctgtagttgcatcactgccaattcagctcaaggatcttcaggtctatactgtcatacgtgttatatttcaactgtctgaagacatcccttgcatttctgctgttgttgtggctctccttgctgatccagagccaaaaattcagtacaccctgaaggccattggaggaagcctaactgcagttcctggactttctgacatgattgatgacactgtcgattcaattgtttctgatatgctcttgtggccacacaggcatgttgttaaacttggtgtcaatgttgatacgagtgacttggagcttaaacctcagggaagactttctgttactgtggtaaaagcaacttctttgagaaataaggagatgatcggtaaatcagacccttatgtgaaactgtatgtgcggccaatgtttaaggtcaaaacaaaagtcatagatgatgacctgaatccggaatggaatgaaacatttgacttgattgtcgaagacaaagaaacccaatctgttatttttgaggtttacgacgaagacaaacttcagcaagacaagagactaggtgtggcaaaactagcagtaaacactcttgaatctgagattacccaagacgccactctgaagctgctacattcactggatccaattaaaaataaggacaccaaggataggggcacattacatcttaaggtaaagtaccacccctttacaaaggaagagcagctggaagccctagagatggaaaaacaagccatagaggagaggaagcgtctgaaggaggctgggataattggtagcacaatggatgctgttggttctggtgttggatttgtgggtactggcattggcgctggcctcggtttcgttggttcaggaattggtgctggcgcaggccttgttacctctggtattggtgctgtcagcagtggccttggtaaagccgggaagttcatgggcaggactgtgacagggcctttcagcatgtcccgcaagaacggcagcagctctactgctccccagcatgatcaaccttcggcgtagtctgatgtacagtgaaagacaattgtcatatttgtgacagggttgccattctactctgtatacgtgctatacctaggactatacgtagcacttcgtttttgtttctgccactgcctggtgcctggttatatgaaatatgttttcgtcgttgtattgaaacgaggatctttcaaagtaaagattgctgtaaattgcatcagctttcccgaactatatgaaatttgtgcagtctgttgaagtaaaaaaagaaaagaaaatccactga

SEQ ID NO: 34575 - DNA, 339 bp, Zea Mays
  misc_feature (1)..(1): n is a, c, g, or t
nagcagcaaagagtgttactggtggtgatgctagtctaccagttgaaccaaggattgggattgatggtactaacacacaagtaataatgcctgctactggtgatgctagtgcaccactcgatgatgacaaggaggagggtgaagaacatgcaattggtaacaatcaaaaaaggcagaaaagatgcacatcttgggtgtgggaatactttacgaagaagaatatggtcattgaggagaatgggaaaaagtacgaacaagtgtgggggcactgcaactttgcaagatgtaaggcaaagtatagagctgaatgcaaccatggcactactgggtttagcaacc

SEQ ID NO: 34576 - DNA, 1013 bp, Zea Mays
ctcgtcgtcccgggtgagcacccgctctcgatcgacgtgtagctaggaaaccagagcagagctgactggcctatacatacgtaggctacgagggggtcggataaccggagatggcgatcgatgagcggagcgtgcacggcggcgccgcactggtcctgcggctgctggtctgcgtcgtcgcggcgcgggctgtctcggccgtcgccgatgataacatgctgaggaacggggacttcgaggagggcccgtacatcccgccggactcgcagtggggagtgctggtgccgccggtggacgaggacgacgtctccccgctgcccgggtggaatatcatggcgtacaagaagtcggtcaagtacatagactcggcgcacttcgcggtgccgcgcggcgcgcgcgccgtggagctggtgtccggcgtggagaccgcgctcctgcaggaggtgtacaccaccgtggaagggagctggtacaggctggagttctcggccggggacgccgacgggtgcgcgtcgtcgtatgatgacggctcctcgtccgggatgaaggtgaaggcgtacgcggggacggccgaaacgaccgtggacgtcgatttccgcgacgccggcggttccaagcgcgggaagatcgagttcagggccaccgccagccccaccagggtggtgttcgtcagcttgggctaccacaccaagtccgacaacagcggcacgctctgcggtcccgtcgtagacgacgtctcgcttgtccccataccgcagccgtatgctcgccgcctgcttctataaggcctaactcatgctgcgtctttttctttttctttttcttttttgtagaagtacccatgcagcttggccgcttgggtaatggagagtgtgactgtgctggtttactggcccattttggcttaccttaattttgcactactacatttattcgtttttctagctcattaatgtgcggttatttgacaaaacaaaatatgtacaccgaattaagttcttttcattaaaaat

SEQ ID NO: 34577 - DNA, 2133 bp, Zea Mays
gcacggcttgggatttgcttggcgcacccgcacccgcaactgcaaatccctctccccactccccagcaccaccgctcaactcaacaaagccgagcagagaagagccgaaccgagccaaaaccaaagcaaagcaaacccagggcggccagcggacggaacccaaggcgaaaaggaagccagcggaagcagcgaaaagcccacgccaccttccaatcccccccaaattcccttgcattccattcccttcttcccttcccacacacctcctcctcctcctcctccgcgtctcttccccggcccccacatccgtccccccctctctctctcttcgccggccgccattgcgctcccgcattgcgccgggtcctaccagtccagcgcgggtccgtgccggcggcgggcatgatgccgcggcgcgtggcgtcggtgccggtgcccgactggctggaggcgctgctggccacgcgcttcttcctcgcctgcgccgcgcacccggcgtccccgcgcaacgagtgcaacatgttctgcctcgactgcacgggcgcgccgccgccgccgccgccggccttctgctactactgccgcgcgcaccgacactcgtcgcaccgcgtcatccagataaggcggtcctcctaccacgacgtcgtccgcgtgtcggaggtggaggacgtgctcgacatctccggcgtgcagacctacgtcatcaacagcgcccgggtgctcttcctcaacgagaggccccagccgcgcggcgccggcgcggccgcgggcaaggccgccgcgtccccctacaactgcgagatctgcggccgcgcgctgctcgaccccttccgcttctgctcgctcggatgcaaggtgttgcctttttttttcctttcctgcggttgccgattgttccgcccaccaacccacccgccctcccgctgtcccgcatcgttcattcgttgaattccccacaaataatgcacatgcctcgcaagaacaccaaaagtttgcgcctttcttcatgaatcttgttttgctttcttgtctttgacataaataaagaaagaaatataatgccatggccatgggggtgaaacgaacggcaatgccaaggaattggcgtccattgggttcggttctgttcagtcacgcttaattcgccgccttccttacacctcactagcgcctttttatggcttttttttttaaaaattcgcgcagctggtggacaccaagaggagcaacggccacgcggctagttccgcggacggaggcggcggcggcggcggcgcagccagtggcaatgacgagacgacggaggccggcgggagcaagaacggcccgggggcgcggccgcacggacggcggcggaaggggaccccacaccgcgcgcccttctggtcctgacccaccaccggcaatggcgatcggtcgagttactccactagcgagcatcgaggcaatcaagagatcgataggggaataatggagggaggggacgatcgccgtctctcctccgcgccgccccgcgcttcttcggttcggttcggtttggttgtccttatatatacgtaattagaaacagaaaagcaaaggagagagaaaaagatactgcccgcccaactagagaaaggaaggaaggttatagataaacagatagaaaagcgagctgaggtcggcaccctcgcgcgcatcccccctcaaccaccggagggagggagagagggagccggcccggggccgcgcgctcgctggactgcagtaagcaacttgtctgtccccatccctctctcaccataccatggcgccatttggtacggtaggtgtgcatgatggcatgcctgatcatctcctcctcctcctcctcctagtcatcatattcatagatgatgctggtgaacttgagctagcaggaaatggatttaattctttctttttttttgacattggttggttaaccgttgacagtgagtagtactgataattatgtcttttttttctccctgctacattatagtaatgtactcctgttgtttggttcacattgcattgccggataatatatatatatatatatacaaagttattcctcaagcattgtggaaaggaaggaagggataccataccaaaggaaaacgaatgattgtc

SEQ ID NO: 34578 - DNA, 780 bp, Zea Mays
atgtgctcaataaaatgcgcagcaagccacgcgtcgtcgatttcgtacagcagccccaggcatctccgcgcactgccggctcgctgttttataaagcgcagtgaacagcacgccgtcgacactcgccgggtgtttgctgttttttgcgcaaccccatccgcgacgccgtcggaaccccgtggtgagaaaaccctcgctgcccttgctgctattatatttttatttttgtgctcggtaaaactgttgaacggttgtgtgtgtctaatcgcagctagctgtcaatgccattcgtcgcgcacgcgtgttcgatacaagaccggtcgggtgaaccacgtgcttgcacaacccaaatccgatcccgttcaggttgattgatttatagtttatattatgtatgatttggttgaagtcagacagtgcatgtatatgtgtggatgtgtgtaaaacgtttcggtcatacgcattggtaggagcacatttgcggttggagaacaagaagttgtttgatgtgtgcgatttgtagtttgtctaaatacgttttggtcgatgtggtgtgtattggtgtttgaatatatatggttgcgatgattcatttaggtgtcacgaggatggttcgtggatggtattaatcgtttgttaaaatacttcgtcataaagcagtgtgttagtcgtggtaaatctaataaagcgtaaagcatgtggtggtttccgctgtcggctaatgagttagtctatgtaaatatattttatgtattcatcatggtgtaggttagagtgggt

SEQ ID NO: 34579 - DNA, 431 bp, Zea Mays
gccccctggttgttgccgtgccgcgcgctccggtgttctgcgtgccttcctctgcgcgcgcgcctgtgacctgcgccgcgaaccccgccgtggagcttccccgaactcgccccagccccttgtatcccccatggccggagcttcttccagcttcagctcggctccatctccctgtgtccgatttctctctactcctctgccgactgcccacctccatggccggctgtagctcccagccatggcgtgcccaggctcggacttctctccagcgcccagccgaacgggtcctccagcgcgcgctctgcctctccctcagcccgtcgcatcctgctggttcgctgctcgccctgtctacgcgtcaggcgaggtagtcagtagtctctgctcgccggtcgaatcctttgcgtcgcgcgcgtagcgtgtcgttgttc

SEQ ID NO: 34580 - DNA, 4380 bp, Zea Mays
tttgtccttccggcgggcgagggtgacgcccgccacaccgcgagctccagctgctctaatcgatggggcacagctctagaaagaaaaagaagcgcggcgcggccggccgcaaggcagccaaggaccacgccgcgcagctcgaaggagacgagaccgccctcgacgaggagctcacggccctggcttcaattttaggggaggacttcaaagtaacatcagaatcacctcatacacgatgtaatatatgtattaggccttattcggatgacatgggctttgaagatctaaatatttcagctattcttattgtgatatgttttcctggttacccccacaagtgtccaaagttgcggatcctgcctgaaaaaaacttgtctaaagaagatacagatcggctcctttcgcttcttattgaccaggcaaacatttattcccgagaaggacgtgttatgattttcaatttgtttgaggctgcgcaagagtttctatctgagattgctccagctcgtgtttcagtgagcactgcttctttcttgggtttgagctcaactactgatgacaatgtggaagttggctttgacagtgatccttacctgggaatctcttacatatataactccttcgatctatatagtcagttatatgatgatacttattggagtcgacaaggttcagatctgacaacagatagtggcaggaaaaatattgtatctcaagttcaatccaatgttagaagcaagaggaagaccatcattgaaaaatcccacatctcagctgataaggtcaataatgctaaagagtcatctggtgataaagctgaacagcaacatgccacaaagcatggtgccatacgggaggcagctccaactttacatgttgtggatgaggaaactgaaatttacggcaaaagtttgtctgctagcaatacaggaaatacatcagatactcctgaaaggggttttagcagtctaaatgaacctgaggacactgaccttgcagatgaatcttggaatgaacaagattgtgattcggacttcagctcttcaaatgcactaccttatgtttcatacatgttagatgatgcttcacgaaacaagaaaagggatttagttctggtacatctgcttcggatagcctgtgcgtcgaaggattctctttcaagtgctttgccaacaatatcagcagagttgtgcaacataggggtgcatatagtcttgtctatatattttctctttatttttctttgttaccactcccaactgaatggtcattttttccattttggtgttaaacaggttctttccgaatgggctaaggatttaatttctgattctcctgctgtttttggagaaactttcagtcatgtttttgggcaacaaatgatctcttcagagtgttctctattttggagacctgataattcatcatctaagccaaattctcgttatttgaatgattttgaggagctccgttcacttggtcaggggggctttggtcgtgttgcattatgcaaaaacaagctagatgggcgccaatatgctgttaaaaagatacgtctgaaggatagaagtcctcaattgaatgagaagattttaaggtactcagagaggtagccacactttcaagattgcaacatcaacatgttgtccgttattaccaggcatggattgaaactgaatacggtcatcataatattttgaatgctggcgggtcctgcactgctgagagctctatctttagttatgatgaagtcagcctatcggatgcaggtggtgggaataagcaggaatccacgtacttgtacattcaaatggagtattgtcctaggactttgcggcaggattttgagacatacatctcgtcttttgatgttgaccatgcctggcacctgtttcgacaaattgtggaaggtctagctcatgtccatagtcaaggaatcctacacagagacctgacacccagcaacatattttttgatgtccgcaatgatattaaaattggagattttggtttagccaaatttctgaagctggagcagctagatcatgaccaatatcttcctactgaagcactgggtgtatcaatggatggaacaggtcaagttggtacatatttttatactgcaccagaggtagagcagaaatggccacagattaatgaaaaggttgacatgtacagtttgggagtaatattttttgagctttggcatccatttgccacagcgatggaaaggcatcttgttctttccgatcttaagcagaagggagacccgccattgtcatgggaatcaaaatttcctcgtcagtcagtcctgttaagaagcttgctgtcaccaagcccgtctaaccgtccatctgctgtcgaggtcttgcaaaatgaactgcctcctcggatggaagatgagtggctaaatgatgtacttagaatgatacggacaccagaagacacatatgtttatgaccgggttatatctacaatatttaatgaggacaggttcgccaaaatgcaaggccaacatgatagcagcaaaaagtccactggtaacattgataacagtgaacttttggataccatcgttgaggttgccaaggaggttttcaagcggcattgtgctaaaaggttccaaatatcacctttgcatactttggagtggaattttaccaaaaacaggggaaacacagtgaaaatcttaactcaaggaggagagatgctagaactttgctatgaactgcgaacaccatttgttatgtcaattgcttctaatcagacatcatcattcaaacgttatgaaatatcatgggttcatagaagagccgttggccattcaactccttatcgttttcttcagggtgattttgacattattggcggtacttcaccgattccagaggctgaaatcatcaaggtggctttggacctggggacccgcttttatgattccaagacgctagtcatacgtctgaatcacggtaaacttgctgaagcaatttgctcttgggcaggggtttctcaggatcaaagacaaaatgttgctgagtttctgtcttcaactattgttcagtattggccaaatgaagctgaccgcaagtcacagtggagtttgattagggggcaacttttacaggatcttcgtctttctgaagaagttgttgagaagctacataaagcagatcagcggttttgtggctctgcagatctagtacttgctagattaagagggaccctgttttatgatgaatctgcttgcaaggctcttgatgatctatccgcgcttctgagatgtttgagagtatggtcggtagaacaaccaattactactattgatgtactcatgcctccgtcagaatgttactatacaaatttgtttttccaggtatactcaaaagaaggtaatcatggaccgggtttccatgaaaagttgctggcagttggtggacgatatgattggttggtggaacaagcttgggatgagacatctaaatctaaacccccaggtgctgttggtgtgagcattgcacttgagaaatttcttcctaacaatccttcatctgatctgggattgcgaaggttactgtccagggttgaacctagcatcagtgtacttgtctgttcaaggggtggtggcggtctgttgactgaacgcatggaacttgtcgcagagctttggaaagctaacataatggctcagtttgttcctcaggaagatccaagtcttcaagaacagtatgaatatgccagtgaacatgatattaaatgccttgcaattatgactgaatcaggcctgtcacaaacagaccttgtgaaggtccggcatcttgattttaaaaaggagaaggatgttgaaagagagggactaataaagttcctgtctgatgcaatgtgttcacaatacaaaaatcctacgatctggagctgaccaacggccctcccaagtgcttagtgtatttgttttcaggttctagcagagcatcaaaaaatgtgtctttcgaacttccgggtgaaagcaatgtttgctgttcgaacatgtgaaggcaatcatgcgtgttggcttccgtgcatacggtgaggcagctgttggctctctgcaggttgttgccaaacgttacgccctggtctttactgaagatgggcgccgacgtgcggtgattggccaattggtataatcctggacctcttgattgttctcctgaggaccaatgccatgcaacaaggttgcttcagacacaaggtggcgtgtagttggtgcaattctgcagttttggggctgttggtattatatggatctgaaggtactctttcgagggacttattggtgtcggttctgggggcttctccaaaggcgtgaagaaggacatcgtaaggatcaaagttgcctgcagg

SEQ ID NO: 34581 - DNA, 1035 bp, Zea Mays
gaaatttctgatttctgaatgatttttgaagggagagaggtgctcatcccatcgattgttgcggtcagtgaagaaccgttttggttcagctgatgagcttggtgtatttgagatggctgaatttggtctgcaagctgttctgaatccaagccagatgttcttaactgagcatgactctgattctgaaattatggctggtcttgctgtagctgttattttagatggatctaggacctttgctcttgaagttcaggcattgtgtgtttctggttatcatcgttctggacaagtagttggtataccacaaagcagggctgatgtcataatctctgtcctcatcaagcaagcaggcctaaaactccaggataatattgtttttttgaatgttgtgagtggcttcaagttgactgagactgcaggagatctggctatagcagcttcaatttgcagcagtttcttggaatttcctatcccaaatgacgttgcatttattggagaggtcggccttggtggtgaacttagaactgtgccaagaatggacaagcgagtgattgctatttcaaagctgggatacaagaagtgcgtcgttcccaaaacctccgagaagttgctcagaccacttgatattgacattgagatcttgccctgcagcaacctgaagcagcttataaataccgtgtttaggccccaaggttgatgtaggcgtacaagatgcctggtttaggaaatctgacagtaggcagttatttagattagagtattgttgtaggtcaaggacttggctagtttgggttggtgtagcatagtgtggtcggtgccagttagaaagtgcatggggttcattgctgggcttccgttccgttgaattggtgtagcatagtccggtagtgccagttagaaagtggattgctggtgttactctgaaacacagtagggcacacttcttttggttgctttatgtgatgaaataccggacatattctttgctacttcagcaccgtgaacttattggctttttgagttgacttttgtttt

SEQ ID NO: 34582 - DNA, 199 bp, Zea Mays
aaagagtggttccaagtggtgctgctgtatttctgaattttcagattggaaacagtaactgaaactgagtttcagtgttttgatggctgtttgaaagctggtttgtggctagcctataaggttttaggctatggtgtttgtagatgaaataaagaccatatgatggtgaataattttcagtaagtgggtatagcatgat

SEQ ID NO: 34583 - DNA, 1439 bp, Zea Mays
ctacttgtaaggctcacatgccggagcctataaaacagctcgagtgagagaccagtgagtgaactcatcactcccgcttccagcttcccgcagcgagcatcaaaaggagaagagcgagagagagcagcaggcatggaaatgggcgacagcttcgagtactactgggagatgcagcagtacctggagtcagaggagctcagcctctacatgggcacccaggacgatgccctgtcctgctacgactccagctcgccggatggctccatctccaactcgtcctgggcgccggcgggcgtggcggccacggcgtccgagaagcgggagggccccggcggcgcggcggccgcgaacaagaacatcctcatggagcgcgaccgccggcgcaagctcaacgagaagctctacgcgctgcgcagcgtcgtgcccaacatcacaaaggtgagagcccaggtccagtccgtccgtccgtcggcattgcatcgcattgccagagggatcgacggcagatggacaaggcgtcgatcatcaaggacgcgatcgagtacatcgagcagctacaggcggaggagcggcgggcgctgcaggcgctcgaggccggcgagggggcgcgctgcggcggccacgggcacggcgaggaggcgcgcgtggtcctgcagcagcccgccgccgccccggcgcccgtggaggtcctggagctgcgcgtgtcggaggtgggcgaccgcgtgctggtggtgaacgtgacgtgcagcaagggccgcgacgccatggcccgcgtgtgccgcgccgtcgaggagctccggctccgcgtcatcaccgccagcgtcacctccgtcgccggctgcctcatgcacaccatcttcgtcgaggtggattcggaccagacgaatcgtatccagatcaagcacatgatcgaggccgctctcgcccagctagatgatgcctccgcgagcccgccgagcgtgatgagctactattagaatcggacaaccgtcacgctgacatgcacgagccggcctagctactgtggccgaccggtactgttccgtgcgcgtatataggaactaggaagaagtgggtgctttgtttgctatatatgaggcactaggtcagggggttttgtgatggggctttatgcaactttgatgtaatggaccgaaaacgacagattgagtgttggcggctagctcccatatgtttagagtctagggaaggaataaataatcgagacaagtcttatccctgtatttttgtagagaggtatttgaaacaagaagttcatcaaatacaagggaaaaatgtcatggcgacaaatatgttagaaatctatggagttctatgtttaatttaatctgaaaatagcataatatgtgacgacacacatgtgtatgtatatacttactagtacttgcaatagtaccttatacatacatgcaattata

SEQ ID NO: 34584 - DNA, 2648 bp, Zea Mays
actggcttcaagtgatactagctgggatttagctcgaaatggcccacgtgccgatcggagctgggccggaaaatgcttgttcaggctttgaaattaacaccaaataaaaagaagaatggcgggcgcgtagagcattcgcagtagcagataaggcgcgttgcgttatctaatccgtccaagaggctgcggtgctcgctcaggctcactgctcagtgctcactgctcactagctaaaaacatctcctttcttatccatggagacggcagcgctcacctcccactccctgcagcgcccagcagcagcagcagctgctcccgcgcatggccagcggcggagggtcggagcggcgggcctgcggcaccggcagccgcgcgccggcggcaggatccgggccctgccttcggcggaggtcatcagcgagatcctgagccccaagctggtgcccggctcgcccgccgacaccggcgacgtctcctcgctcgtcccggtcagtgccctgatgctgctcttctacttcgtgtccaactgggtggtgcccgagctgctcctgaagggcctcaaggagcccaagcccgaggacgaagcgtccacgtccttcgccgcgtccgcggacaacgccgccgccgctggcccagcggacgacggcggcgcccgtaagatccgcctcaaggtcaagaagaagaagaacgggaaagcgaccatcgtcaaggtctaggtaggtaacaggggagcgcacgcatatggagcgtgcgagggcgtctccgacgtcatgataagttattaccaagtctccatcagaacatcgaaggagaaacactagtctactgattactgccagggtgatcttctgatcgccatgaaagctacagtgcttatttacaccaccttcatggatgatgaatgttactgacggctctcaaacggctgctgctgcatgtttgagtgatgtgtgttccaacttccaagaggtttgccactataagaaactaataaaatttctagagcttaaatagtcagaagttacactctcgaaaagagccggtcgaaaattagaataaatttagacggcaccatcgaaagttaaagccagcgtgcccgtcgaaagttagaggggctaactatagatgtacagaaagcccgcggcacgaaagcacgaacgaaagcacgcttcctaggcccggcacgagcccggtccggcccgttttaaccgggtccgtgccagcccggcccgaataggcgtgccgggctcgtgcacactattcagcccgttgggctagcacggcacggcacggattttagcccaggcccggttagagcccgtatctgttaacttgcgcacagcccagcccagtagcagtacacaggccacattcgcggacggcggaccgcggtcacgcagcgcaggcagcttaaagcctacgcgaggcgagcgccacatgcccttgcccacatccgttgccccaggccccagccgcccccgcccccagccgcatttctcttccccgaaaccctaaccctaatctccagtctccactctccagcgcgcctctccaccgcgcgcctctccgtggatccgtccctctccgtggcgccgcccctctccgtggatccgtgcgtccgttgcgccgcccctctccgtggatccgtggaccgtgggtccgtagcgccgcccgtctccgtggatccgtctccgtcgcacgcccacgcctctccacggtcacggtatctgtctctgtctcctctccgtcttcttccccgcctctccgtggatccgtgcgtccgttgcgccgcccatctccgtggatccgtggaccgtgggtccgtagcgccgcccgtctccgtggatccgtctccgtcgcacgcccacgcctctccacggtcacggtatctgtctctgtctcctctctgtcttcttccccgcctctccgtggatccgcctcctctccgtcttcttccccgcgtctctgtgtctcctctagtcctctgcaaggatctctctccatctctgtcttctttggtgtctcttttgtggcccatcgtcgacggaatcggtgctccggcagaccggcttcattcctaagccgcgtaggtaacacctcctcctcacgacctcaccatagtcggatctgttgtaggcagtagccagtagcagtaggccagtagctaacatctccgcgtcacttttgtttgtaggccgtgaggaaccgacgcgtcggcgatggaggacggtggtggtgacattagtcgctccatcaaccacgatttgaggctgctcggagaacctggagtccctgagagccgtgctactaccactaccgaccatgctagtggcagtggtagtagtgctgcagttcctatcgacctcgccgtcggggaatctggcgctggcctaggcgcagaagctcctgctgaggttggtcagggctccagcgaccgcaagaggtgtaacacctcaaaggtatgggatgattttgagcctgtgtacacgattaagaacggcaagaggttcacaatggttaacaagttcaagtctcatacaagtttacaaaaaacgttcaagtctcatacaagaaacgtcgtgattgatcatcatttgagaattaatgtgagttttggccactacctccactaccatagagcaaactga

SEQ ID NO: 34585 - DNA, 2044 bp, Zea Mays
gcgggtgggtcgtccaaagtagaatccaacggcgcgccgcagctcctccgcccctccgctcccgccgcctatattccttacttgcgttcgttcgtcaagcccttgcacaagcgcgggcggccctccgaccggctgaaaccccggcggcctcctgaagattacggtaccgggatcggtctgagccgccgaggcccgcgcaggcgcttccttatatatcgtttcttggcgtggctaaggtggtggtgaccatccggtgaatatgaacattgtgtgtgaagtatgtggagatattggttacagacaacttctgctatgttgcggagactgtaagcgttatgctgtgcaccaaacaggtgtcaagtgaaagcccactaagtcatgctcattttggtcctctagtacatcagcgtactactaagagggtggagtcagtaacagggccatattcacccagtgatgactgtgaggaattattttcctaccctggcatagaaagcatcccaagtgttcaagaaataagtgtagatcccattaagacttcaagtatttctgaacatgataccatagaagcagctgcaagcagtgaaagattcacggagtgtcaaaaggctagctcctgtcgcgaggggataactgtgaagatggctatggcgccctcatcatatgagaactcaggagaagacattttctctgaaaatgtatttttggaatatgttttggcatataaatgttatctatctaaagcacaaaagaagagagtaatggagcttattcaggaaattcaacctgaattcacagtttttatatcaataatgcggaggggcaatgtgcgacctccgggtccttttctgataaaagcacaaatgtcactcttgagatgcctgacaagagcaagaagtggcatcccaaattctacagaagagatgtaagcagaacctgcatgcttacgggacagtggctagactttgtctgcgacaatcatgtgcaggagggagatatatgcctccttttaccgacaaaagatgagataagatgcacgtttatggtctatgttcttcatgaaacaactcattcttctagaggtgaggctggctttcaaatgggtggcccatgccctggtgcatctggtgtggcttcagaaatccatgttgaggaggaaccaaccactggggaacatgtttcttcagaaagtgatatgcgagaaattcctcatgaatctctctcgagaggagactctgatgatcaatttgagcctccatactttgtaccatgcaagagtcctctatctgaatcccaaaagagaatggttgaggagcgagtgcgagctatccgatctgaaattcccatttgtgtggcagtaatgaagaacaacaatgttggtgtcgctcaacgttggatgctagaattaggttcacgatatggttcggtatatctcccaactaaagggcaaaccatattgctccagtgcggggggacgacatggaaggcaaaattgatgtttcataatggtagaaggtggtttctgaatggaggttggcccaattttgctcgcggcaatggcctgcgtgtgggtgacatctgtctattcgaactgaagaagaaagacagtaagcttaccatggcagtccacatcattcgcagggagaagttttagtttgcactataccaaagtgtggctcctgttctttcggctggtaccctgggcttattgtacttgttctattttgacagtcgtgtggctgatctctcgaaggattagagaccaatctgtaacatctgttggtagctatcgtgccgccttgcttttgcttatgttgtacttaacacccttcttaaagtttcatctgaattaaaagtgatgactattgtttgtcatcgaacatctagtctgtgttctcaatatagtctctcatgcctgttacgtctatctccctctcaagaaagagatccggttgtccaggaaccagttaatattaattgtttattctctctttgtgcatgtacaatgtatgaaaataatggaaaatactattactaattctta

SEQ ID NO: 34586 - DNA, 4287 bp, Zea Mays
atggggaatctttgctggagcacaaatagagaaagatggcgacgtacggccccgtccccctccgtccccgcctgcagcgacctcccggctgccgtatcctccttcgccgacgcgttcgtggactttgccgtgtccgacatcttcttcccgaccttcccctcctcctcctcgctccctcctcgcccgaagactccaaccaccttcctcccttccccatcccggctcgtcgccatcggagacctccacggggacctgcccaagtccctctccgtgctccgcctcgccggccttgtgcccccgtcttgcaccccgactccccctccgcctccggcctcctcatggcccgcggggcccaccctcgccgtccagctcggcgacatcctcaaccgcagcgacgacgagctccgcctcctatacctactccaccgcctctccctctctgccgagacacgcggaggcgcgttcctccccatcctcggcaaccacgaggtcatgaacgtctccggcgacttccgcttcgccacgccgcagggtttccacgacagggcggtgtgtgggggggtgctggcgtgcgcgggattcgcggcgtgggctgctgaggcgggcgtcgcgggagcggcgggttgctggcgcacgggcgttgcaggagcgggagcagtctacactgcctccttaatagttagtagagattgtttaaaattaaactctacgctaggactgtggacgtgtttttgccccatccgatctaaacctaatccattgccatcctatattgatataggatcatgggcaggtttagttaatccacggcgaagaaaaaaatacatgctgccaagtgccaactggcaagaaatgaagaaactgtcctctggcaagaaaagcgggaaaggcgatgggctgggccggccaggagagtcgctcgattcgcaggccaggcagatcgcggtcagatccccactgccttggcgggaagcctatcaatcctcaccccaaatcccccgctactccccgctccggctccgttcacgactacggcgacgagcaccaccctcacccccagccccacaccgcgccacgccgatgtactcccaactcgtcgacggggactccgactccgagggatccctgatctccgacatctccgcctccccgccccgcggccgttcgccctcgcccccgcccccgcccccgccgccgcccgaacaccgtcccaaccccaagcacaccgccaccgtgaaacctaagcctcccaagtccaaggcgaagcccaagcttgcagcatccgcctgcaccgccgctgtttcgccgcctcccctcccctccgccgcgctctccgacccgcacggtctcgtctcgcgcatcgccgctgctcccgcgcttgtcaccgccaccagcaccgtctcttcctcctccttccgccgtctcgtccagtcgcgcaacccctccttcgatcccgccgccgctttcagcgctccgacacccgcacccactctggcgcccaccgagatagcaaccgcagcgacagcgcagtgccctgcgccggacgcgccgccgcagaccaggcccaagcgggtgcatcccaactcggtgtcggaggtggtcccgcccgcggcggaggcagagcaaccgaagcggccgagagggggtgccgaaggaaactttgtgcggctcaacatcaatggctacggtcggaggaggacgttcaggaacgcgcaggccaggcgccctacgaaataccgctcctggcggcggcagcgacatggcggcgcaaagcctcaaggccgtggtgacgaagaaggggattttgtggctgaagctatgatagagcgggagaagaagagggcaggaggagatggtggtgtcctcgaggccgtcgaagcagcgcgagaggacccgtctgagcagaatcttgagaatttgctcagaattatctatgggtacaactctttccgcgaggggcagcttgaggcaattcagaaggttgttgcaggagagtcaactatgcttgtgctccctactggtgcgggcaagtcactatgctatcaggtacctgctatgattttgcctggactaacactggtggtaagcccgctactctccttaatggtggatcaactgatgaagctacctgcatttttgccaggtggctttcttgcaagcaatcagacaagcgatgagtttcatgagacattacaaaggttgcgtggaggggaaataaaggtgctttttgtttcccctgaaagattcttgaatgaagaatttctgctaatatttagggacgggctacaaatatccctagttgctattgatgaagctcactgcatttctgaatggtctcataattttagaccttcatatctaaggctccgtgcatcactacttcgaagaaaacttaatgttcaatctattcttgcaatgactgcaactgcgacaactcaaaccttggaggagatagtgactgtcttagaaataccatctgataacctcattaaaacatctcaaataagggacaatctgcagctgtttatcagcatgagcaataacagactgaaggatctattgctgttgttgaaggcttcaccttttgttgacatgaagagtataattgtctattgcaagtttcagggagaaactgactatgtttcaaagtacttatgtgataacaacattactgctaagagctaccacagtggacttcttatgaagaacaggaatcgtgtacaggagcttttctgctctaacaaaataagagtggttgttgcaacagtggcattcggaatgggtcttgataagagtgacgttgaaggggtgattcactatagcttgccagaaagcttagaagaatacatacaggaaactggccgtgctggaagggatggacgactgtcatattgtcatctatttcttgattcaacaacattctataaaagtcgtagtcttttgcacagtgacggtgttgacgaatatgctatgagcaaatttcttttccaggtattttcatgtgaaaattcagtggggtgcatttgctccttggttaaagagtcgacttcgcgcaagttcgatataaaagaggaggtgctcttcacagtcctaacacagctagaaattggtggtcagcaatatctccgtttacttcctcagttcagtgttacctgcaccctgtactttcacaagacgtcaccacagctgcttgcagacaaggatgtactagttagatcagttctggataagtcagagactaagggtggacattttgtcttcgacatgacaaaggtagctaatgatctgagcatcacagtgaatgaagtatttgaccatttgcaacagctaaagtctctggagaaatttcatttgaattaaaagatccagcctgcatttacgtgatcttaaagaagccagatgacttgaatgcgctttcagcagatatcacaagatggctttctgaagtagaaaactcgaagatcagtaaattggatgcgatgtttgatctagcaaactttgctgtcaagggttgccaaaggactgatggctgttctggctcccagcacactccgtgcattcaaaagaagatcatacagtactttagtaagaactactccacctcagacagtggccaatgtactcagccacaaaggggcagcccattcttgcaagctgacataaaggtgttccttaaaagcaattcgtttgcgaaattcacgccaagggccgttgctaggattatgcatggcatatcaagcccggcttttccatctgccacctggtccaagaaccacttctggggccgctatttggaggttgatttcccagtggtcatggaagctgccaaggccgagctggtcaaactcgtgggaaaaggagagtagcagtgtagtacttaccggcacggcaataggaacagttgctttcactcggtacgtgtcctgtgccgagtagaatgcttgcaagccgcaaccgcaatcgatgatagagagctgctacatgttcgtgccttcttcccagcttgtccgcagttggtccaccacaagcattctaaatggttacacatctgcttggcatcacctcctcacttcatacagatggcggtatttattcaagcgatgctgatgcggccagccaagctggtgttagcacctagaagggaatatcggagagaagagaggtagaagaagggttgaagaagaagataacagcgaggaagacgatctgatttgatatctgatagccaaaatggttcatgaccccttacagccagggtttgggtgttacttgtaaccacacgaccac

SEQ ID NO: 34587 - DNA, 2072 bp, Zea Mays
gtacgaggcccatctcccacgacaaatgaaaaccctaatctccagcaccccggcggcctccagcgctcccgctccttgctcgcctccacccgcggcaaccaccgccctgcggcccccgccgcttgccagcctccaccgcgccgcgagtcgcgttgttcctgcaccagctggtcctggagcacgggaggacgagcatgtcctggttcggccccaaccccaaggtgaccatcgtcgacccggacctggccaaggacgtgctgtccaacaagttcggccacttcgagaagctcaaggtcccggtgctgtccaagatgctgggctccggcgtggccagccacgagggcgagaagtgggtcaagcaccggaggatcctcaaccctgcgttccatcttgagaagctcaagcgcatgctgccggcgttttctacgtgctgcgaggagctggtgagcaggtgggcggcggagtcccttggctccgacggctcatgcgagctggacgtctggccggagctgcagaacctgacgggagacgtcatttctcgcaccgcgttcagcagcagctacagcgaagggagaaggatcttccagctacaggccgagcaagcttcgcttgtcatgaccaacattcggaagatcatgatccccgactacatgtacttgcctaccgtgaacaacaggaagatgcgcaggaacaacagggaggtggagtcaatcctgcgagagataatcgggaagaggatccaggcgatggaacgaggcgagggcaccaaagacgacctggtgggtctactgttggagacaaacatgagagacgacatggggatgacgatcgaagacgtgatcgaggagtgcaaggtgttctacttcgccgggatggagaccatgtcggtgctgctacgtggacgatggtggtgctcagcatgcacccggagtggcaggaccgcgcgagggaggaggtgacggctctgttcggcagggacggcaagcccgagtacgacggtctaagccgcctcaaagtcgtgaccatggtgctctacgaggtgctccggctgtacccgtcggccacctccgtcgtccggcaaacgtacaaggagatggaggtcggaggcgtcacctaccccgccggcgtgatcctggagctgcccgtgctgctcatccaccacgacccggacatctggggaggcgcgcgagttcaggcctgacaggttctccgagggcgtgtctagggcctccaaggaccccggcgcgttcctcccgttcggctagggcccgcgcatctgcatcggccagaacttcgcgctgttggaggccaagatggcgctctgcatgatcctccagtggttcgagttcgggctcgcgccatcctacgctcatgcgccgcataccgtgataaccttgcatcctatgcacggtgcgcagcttaagctcagagcaatatgatctcgacacgatgggtgtcccatcgttgatgccattgttacgtataaccttacaattcagataggcattcggcccctgttaatgtctgaaataagtatcttcgcgttggcattttgtaatgtgcttttcacgtaccattggtgctttattgccttttgtatataaacatgtggatatatgtaactcatacattacacaaacaaacacaaacacaccagagccagagctatagggtggagctataaaccgtggctctacttttgtacacaaaactggctccacatgttcttccaatcctgcaactgcgtttttcgcatccccgtttgattgcaagaacgggactgctaagcaagctaagatttcaatggcatattccttcatacataggccattgagcgacgaggcactccgcgtcagcactcccgtggtggtcacttgcaatgaccagagacgggaggtctccgttgcccagaacatcgctaacaaggaaattaaccgcactgttgcattcgacaagaatgatgacctcccgactgatgtcggtgtcattccaagtgctgttaagcgcatatttgacatcctcgaggcacagagtgcagagtacaacatgaaggtttcttttcttgagctgta

SEQ ID NO: 34588 - DNA, 339 bp, Zea Mays
cgggcagattgatgttagccacggtcttgagcgcggaaggagggcgtgaatggagaaattgggggggcaccatagtcaattgcgcccagacaccgtcggagggtccgtgggccgtgcccgggagcttccctaagccgccacgatggtgctcgtcaatcgtctcgggcgtgtgcgacggtcggcgagcaacaatttctcgccgaactttgactttgccgcacaacgacgcaccaccatggattgcgccggtagcatctagctccgtggtgagaacctttttccttttattcgcttaaggagtagatttcgtttggtgttgagtttgggggcacctgcggt

SEQ ID NO: 34589 - DNA, 1698 bp, Zea Mays
ttcgaatttcttcctcgactctctctctccttcctctcctctcctttcccatttcctcgcctccccctgaccccctctcgtccacgcctcctcccctaccattcgcagttttggacacttggttgtcgtttcgtcccgcagatccgcaagcaccgggccagtagagagagagagagagaggagggagggtcgcggcctcgcggggggtggaggagatgtctgtggcgaaggaggcggggccgagcagcagggcggtgcttgtgacgggcggggcgggatacatcggcagccacgccgtgctgcagctgctcaccgcgggcttccgggtcgtcgtcgtcgacagcctcgccaactcctccgagctcgtgatccgccgcctgcgctcgctcgcggtggaacacgccaaaaacctcgcgttccacaaggttgatatccgtgacaaagatggattggaaaaggtttttgcttcaacaagatttgatgctgttattcattttgctggactgaaagctgttggagaaagtgtacaaaagcctttgctttattatgaccataatgttgttggcacaataaatcttctggaagtaatggcagctcatggatgtaagaagttagtgttctcatcatcagctgcagtttatgggtcacctaagaactcaccctgcactgaagattttcctctcactccacataacccatatggcagaaccaaagtactttaatccagttggggctcaccccagtggataccttggtgaagacccatgtggaactcctaacaaccttatgcccttcgttcagcaaattgcagttggcaggaggccatcgctaacaatatttggaaataactacgcaacaaaggatgggacaggggttcgtgattatattcatgtggttgaccttgctgaaggacatcttttcgcattaaagaagctttttgaaagctcatctaacataggatgtgaagcatacaaccttggaaccggaaaaggaacatcagtgttggagatagtcaatgcatttgagaaggcttctggaaagaaaatccctttgatcatgggccaacggcgtcctggtgatgctgagattctcttttcatcgccggcaaaagcagagagagagctccactggaaagcgaaatatggcatcacagaaatgtgcggagacctgtggaactgggctagcaagagcccttatggatacgcggcatctgagtctccgaagctgaatggtagttcacgctgagcaacgccgattggcccgtgtggactcacttgtacatgagactgtagtgccagccaaccaggataaatgtagatctagtcggtcggtcatacagagagaagttctataggcctaggaaagaaatgttatcctgttcctcagcataagctcccatagtggttcttccatatgcgtatagtctatgaaatttgttctaggaccattgctatagtcaaccagctaattcaattctatttcttgagttgcgttgcctaaaatagagcatgatatagatatcagcatcacaaaaagttgcagttcatacaaattttcttttgtaattgtattgtttctttgagacaatttctgtattattagtatttcttttgaaataaatatgtaatattggttagtgagaccacagtaatacttccatttcaacttcattggtgtgataaatcacacttcactggg

SEQ ID NO: 34590 - DNA, 1241 bp, Zea Mays
tccatgcctgatatgatcccgagcgttggggatacaatgaaggcctggggttgcagcaacaagcctctgccctgagctgaggatggggcacattgctgagcctaccggcactgttgtgattggctgcaaagtgctgccgatcttcaccgagcatggcattgttgacagtgcaatgaagaagatgatggcgcataggattgacggcaagaaggcagttgctcgggttaaggagcttctgaagcgggctgcccaggccaagcctcacagcgtcactgtcagtggaaagaaatggaagaaggttctgagcttccacgcaagggatagcgctgcggccacaaagggagggcggcaacagaagcagcaggaagaggcgataagctgcagctcgggcaagctgagcttcaagtgggacgtgggcagctgctcctcggcatcgtcggttgcgtattcgccgctgtcgttgatgtcggcaccggcaaagtcctcggagcagacgctgctgacgccactgaggaaagactattgcatgtcaaggctgtcgtccataagccagcagagtatgttgaagaacatggaaggagacgaggaggaggaggaagcctgctgctgcaggacggcgcagtggatcaccaccgattcagactttgtggtgttggaactgtaaactaatggtcatcaagacatcaattacactagtgtatctatggtaaggtctgtgtctgtatcagatcagataccccgacggacttcgctgcattacacttacagttgccccggcattgcttcctatgtactcgtatatgtattatatgtgtcttgaatacaatcctaaggataggaaaggtattcatataaattctagtacatcaaatgtgacaccagggtacctaaggttccggtgattgattgatcaggagagcagtgccgtagagtttgtctaccaaggcatgacacactaactcaatagataactctagagaggttcggactgcgtaaaagcagtgtacgggtttacaagcctaggagagaagagatcctcctaaccaccttctctacagccttggatgattttcttgtattgtggttggttgtgtggatctatcttgagtgctgctctaccgtctccttttttttagttcaaggaggtgatagtgttacatgtataccatttttgcgggcttggcttgttatatcacatccgtcgatctatgtggtgtatcttgctgaggcgtgcttccaag

SEQ ID NO: 34591 - DNA, 2506 bp, Zea Mays
tttgggaccttgaaacttttgagttgatcggttcttctggacccgaggtacatcagtgtgcagttttttgactcttctgtagactattggcactctaaagtctaaaatagatatattggttttcttttcctaggatataattaaccttttcttgcttaatgcagaacaaccgagaatactttgagctggctagtgcaatccgttctatgaagttcaacagtgatggtaaaacaattttttgtggattgcatgaaagcttaaaggctctttcctgggaacccaccatatgtcatgatgtgattgatgtaggctggtccacattagcagatctaactgttgacgaagggaaacttcttggctgctcatataaccaaaattgtgtcgagaaatgagccttatgttgatagtagtgctggatcacacttaaatggaagtataaataggccaattcaatcagatgatagcatgtcatcagtgtttgggaggctatcgatttccagaagcccagccaatgaaattggatcggatactctgcttggatgctcaatgtctggttcaaaagaaagtcctgtctcaacttctgcatcaatgaggggattgtcaaagccacctggaaaaggggacctccggctctcaagatctatttctacacctcttctttctcctagagttagattgaacccaaatttcattgacagacagaagaatcaggcagctactgctgtaccattaccagaaccaatagtccgctttaaagcgaatctctcttcagatgctggaatgttgtctcgcaagtcacatgcatcagcagctcccatgtatagatcaaggtccaatagttctcggtatggtattatggaatcatcttccatacctgttctggccttgaggcatagctctagaaaggatgctggtcccgttcacagtgaagctgccacaggtgagttagcagatattgagcctcaaaatatagaaaaggaaggtttagttgccaatcatggcaaagaagatggcaagttggtacctgtaattgcttcaaggagctcaaagatagtcgaagaagttggctatagaagaatcaccaatgatgtaggatgtaagagagtaaccctagaaagtggtttgagagttaattcagatatggactatagaagcagagctccagaaagccacgaggtgcagcagcttatacatctgtcagaacctgctggtttacatgggaaatttataagagaatcttcaggtgctggggacaataactgttctggttcaatatgcactgagagtgctgagtttaatgaagttgatatctggtacagggtatctggttttgataaatggaaccctgctgctgcaaggaatccagaatttgccagcatccacagaaatgaagtgattggaataagacagttgatggagtcaagtggaaagtatgttgttgacgatcgaccttcctcttctaattacgataacatccagtatgtgacaacactatacagctcgaggctgcatccttcactttctggaaaacttagtgcatctgcaagttatgaagatgatatttctggtctagtggaaaaccatcaagaattcattcatgtaatgaaatctcgactaacaaaactagaggtggtttaccgttgctggcaaagaaatgatataaaaggatctattgatgctacatggagaatgttggattttgctgtcactaatgatattgttaatgctctaatggagaataggaactgtatcacattagatgtttgcgcttctctcttacgtcttaccaccagtcttcttgaaagcacatatgacaggcatatgagcattgccttgaggatgattctcagtttcgtgaagagctttggtcccacaatttcttcagccttgttggctataccacctgttggggtagaccttgaagcagagcagaggtgtttttttcttttcatctcactgaaattgtaatggattctccttcctgcctcatgcatacaacggacttgcttcacgagcgcgtatcttgctaggatggagtggtgcaatctatgtttccaagaactgaagaatgtgagcgtcagcctcaagtttctgacaaggcggcaaggcgaggttgggagattagctcaggagctcagcctttttcttcaggatctctttcaattgtcaagcgtgtaaacagtgaccataccacgacgtgcaaaatattcacgcactcaatttcctttggtcataacagatatagcgacatatagtaggatttacctctagaaagaaagaaatatacagaaactatagggtgaagcttacagggtattttctccgagctagtttgggagcatcatttttttcatagaattcctatttttctaaggtctcgtttgtttcctttcattttaaggaattagaatcttactaatataatatgctattttttttagaatatgacatttcactacttttcaaagttatcatataagcttatcttaaattcatggggtgagag

SEQ ID NO: 34592 - DNA, 2672 bp, Zea Mays
ttatttttttatgtgaatagatacaaaacaaaattacaacctatatttagagaactattggagaactcacatttttttactccaaaagccatttagcaacttcttaaatctataatttagagagctaaaatttagctaactattggagttgctctagagccaacatcgtttcagagtcccatctgaactccgtagcgtgatagcagagggcggcagcagcagcaaatccctgctccttcctcctccccggccccaaaaccgcacaaacccctgctcctcctcccgccgccgccgccgccggggcacgccgggatgcagaagccagtggcctccgtcgtctccctatgtccgcagctatggcaccgccacttccgtcgcgctcccctcctcccccgcgcccgcggcctcccctcctcctctcctatcctcacacgccgccgctccgtactcccccgttccacttccactcacctcgccgcggtgtcaaccgctgccgccgccgccgccgccccatcagccacaccgtacccagtgtacgatcggcttctgccgtgccccttgcaggacgaccctccgagaatcgagcacctcgtggctcgggaggacgaggtggcagccgatttcatcgccaggtcgctcggcctgcctcctctgtatgctgcagacctcatcgagttcggtgctgtgtactacgcgctcgtcgccccgcagccgcctccctacgcttctccggagcattttaggctctttcgggaagtcaccgagccttccgtcctgcgccggagggcgtccatcaaggggaagacggtgagggaggctcagaagacgttccgggtgacggaccccaaccagcgcctcgaggccggcacctacctgcgggttcatgtgcatcctaaacggtttccaaggtgctatcaaattgactggaaatccagggtaatagcagtcgctgatgaatacgttgttcttgataaacctgccgcaacatcagtatgttcctctttaccttccactttctcgtttgttggtggtttacgggctctaaatttcttagatagttcatgtcgtatcatggaatgcgtgtctgcaacattggcccttcactttgttgaacatagtcttcatgtctttaactcgatgtcgtttgagtcccctatgaattatgatattgatttttctttcaccattaggttatctgcacagaataaaattcacatccactaatatgagtatgtacaatgtactaccactgcaacatttgacgcagccagaagcacgagttcttggtgaagcaagttttggtttattggatgttgtaggcagctaagtgggcggagcaactgataacattgaggaatcctgtgcagtctttacttcgcgtgcattaggattggaaacgccattgctgacgactcaccagattgacaactgctctgaaggctgtgtggtactatctaaaacgaaagagttctgctctgttttccatggactgataagggagaaacaggttaaaaaactctatcttgcacttactacagcacctgtgtcaacaggaacgattacccattatatgcgcccagttaatcgcgctcctagattagtttctgaagactgtattgaaagatggcatctctgtcaaatggaggtactcgattgtagcaaggtaccatggccaagctcttcgatcaggaaagcttacaatgtaaatggttgtgggtggccacagcaagaagctgcttacgaatgtaaaatcaatctcttgacagggaaaactcaccagataagggcacagcttgctgctataggcgctcctattataggggattctgcatacatgactgcagcaatggcagcgatggccaacccaagcataaacccattcggtagagagaggctgagttacaacagtgaagaggagaaagaagccgccgtcgaagcatggattgcctcccacgggaaggaaccaaaatccgtaattgggctgcaagcgtcagagatctcttgggatcacgagggcaagcaccattcttacaaggctggagttccgtggtggtggcaggatcctgactcctgagtgcgatggtggattggatgggggagttccatatgaacccctggaatctcgcctttttagaggacagatgtttttctacattgttccgagtgctgagcgaccactgtccaacacgaacattggtttggtttggttgctgcgcagaaattgttgggtcaccgaaaactgaatttgggcttgggagatgaaactaagcccgagtctgagctctcgaccaggccaacacgaacaccacaccagagctccttcaactgggaaaagcagatccaggccaacacgaacattgctttgctgttcattctagggcatgcaacgtcattcgttctatgactgtagctgtatggttgtgtgcaaggcctagcttctatttgggacagctctcaataatattccctggagattgagttggggtgagaccgtctctcataaagtcagtgaccgaaacatcaaattttttaaaggcaagcatcttaaaatcgataatggggcgtttggatccctcatttaataggaattgaagttcacttaacaaagtaacctatttgccttatttgccttaattggtatatgtcaaacgatccaaacgggcgttagagaa

SEQ ID NO: 34593 - DNA, 1873 bp, Zea Mays
tgtgtgactgagccgcaaggaaaacgcagacagacgcagccccagatttcttttccatcaaaacaccccccgttcccctgctcccattccgccccggatttcgatttcgtcctcccttcgccgcccgcgccaatactttcctctgccggggctgcaccggcagcgcggggtcgacaacagctcgagatccggtgactgatctcctttgtttctcggagaaatcgattctgttagccatgtggaaaaaattgggaattgagttatgagatggaagacatgagaaccgtgacaacttgctgctgcattactgtatgattttacttgggaacttggaatcctcaatgctgtcctagctcccaagttttgcttgctggacttgtgggttaaagtgtgaatagctgaagcgttctttggccttacagtactgccgaacaaaacactcagcttctggattgtggtctgcggcatcttgctagtcttcttccagattgcttcctaataatgatgacacatgaatgggctgccaatttggctcttgctggtctgagcttggcgccgcttgtggttaatgtaaacccaaatgtgaatgtggtactgacagcatgccttactgtctatgtgggttgctaccgttctgttaaaccaactccaccctctgagaccatgtccaaggagcatgcgatgcggttccccttagttggaagtgctatgcttttatcactgtttcttctattcaagtttctctcaaaagacttggtcaacgctgtgctcactgcctactttttcattctaggcattgttgctctctctgcaacactgcttccttctataaaacgttttcttccaaaagagtggaatgataatctcattgtctggcgtgctccacttttccactcactctcggtggagttcacaaagtcccagattgttgcttcaatacctggatttttcttctgcttgtggtatgcgtcaaagaagcattggcttgcaaataatgttctgggattggctttctgtattcaggggattgagatgctgtcattgggatcatttaaaaccggagccattctcttgggtggactttttgtgtatgacattttctgggtgttcttcactccagttatggtcagtgtggctaaatcttttgatgctcctataaagcttctgtttcctactgcggatgatgcacggccattctccatgcttggccttggtgacattgtaatacctggcatttttgttgcacttgccttgcgctttgatgtctcaagaggtatcaagaagcgttacttcaacagcgcattttcgggatacgccgtgggtatggcggtgaccatcattgtaatgaactggtttcaagctgcacagccggctctactgtatctcgttccaggtgtgatcggattcgtcgccgtacactgtctctggtacggagaagtgaaacagctgctggagttcgacgagtcaaaagctgaggcggaggaaggcggtgcagaaggagagcaagatggtgatggttccaaagccagcaaaaaggtggactagcatgatttagttccgggaggtaaaaaagaggacagggagacatttttcgtgtaaggtcgtcttgcagctagctagctaaacgggcttgttgccctctctaatacttacttgataacttagaaaatggttcaacatgatactagttttttgtttgtttgttttcctttgcggatcatttatttggctcgttaaggaattctctcaccagtcgccagaaccctgactgggcccgccgcgacgcattcatgccatgcttactttgcttctttgcaggcaagaatttcattatggactatatttttaccgccgtgcttaattatgtagtcac

SEQ ID NO: 34594 - DNA, 2492 bp, Zea Mays
gccggacccgcaaggctgcaactgcggcatgcagatccgcagagcacacacgggcaccgggcgcaccagtgcaccaccgcatacggccgtgcgcttcctttccttcccccgccgccgcagatcttccccgcagtcccggttcccgttcaccacctccgaaccagaggaggaatggccatctactccttcctttctgttcgcaagcgcccagttgttgtcgtcgccgccgtcaccctcttcattgtcgtatcctctctcttcctcctcttcagccccgcaccgacagcgctcccgtttttctcctcctcctcttcccacctctcctctcaagcttcaattgctgccgtctcctctaacgcatttccacctgagaccccaacctctgttgtctccaactgggtcagcagcaacacttctgctgatcgcgtctctgctgacgcatctccgcccgtagtcggaaccgccatcgcgtctgatgcggtcagcaacagcacggctgacccgcctaggccagataccaccgccgctgctggcgacgcgaaggctgatgtgtcccaaccagatcacggcatgccccctgccgccactgaagcgagtggatcggcaggcaacggtgagacagccgcgggagtctcgagcgagagggatgaggaggggcaaggcggcggcggcgccgtggaggagctaccatcgtgggagctgtgcaaggtggggaagggggtggcggccgcggactacatcccctgcctcgacaacgtgaaggcggtcaaggcactcaagtcgctgcggcacatggagcaccgggagaggcactgcccgacagatccgaggccgaggtgcctcgtgccgctgcccgagaggtaccggcgtccggtgccgtggccacgcagccgtgacatgatttggtataataatgttcctcatccaaagttagtggaatacaagaaggaccagaactgggtcaggaagtctggtaactattttgttttccctggaggtgggactcaattcaaaaatggcgtggcttcatacattaaattcattgaacagattttaccaaacattcaatggggaatccatacaagaactgtccttgatgttggatgtggtgtggccagctttggtggatatttgcttgataggaatgtcattaccatgtctgttgcacccaaagatgagcatgaagctcagatacagtttgcactggagcgtgggattccagcatttttggcagtgattggaacacaaaagcttcctttccctgataattcatttgatgtcatccactgtgcaaggtgtagggtccactggtggaaaaccattgttggagctcaatagagtactcaggcctggagggtattacatttggtctgcaacacctgtctatcgcaaaaacccaagagatatagatgattggaatgcggtggtagctctgaccaaatcgatctgctggaggacagtggtaaggtctcgagatatcaataagatcggagttgttatataccaaaagccgacatcaaattcatgctcccttgagagaaaaaataatgaaccacctctgtgctctgagagtgatggatcacgtttcccttggtataaacctctcgatagttgcctctttcctgcagttccgagttcaggtgaagggaatagttgggccgtctcgtggcctgaaagacttaatattaagcactcggctacatctaacaattcttccattcagtttcctcaagaaaaaattgattctgatacaagttattggaaggaccttgtttcagaaatatatctcaacgaatttgcagttaattggtctagtgttcgcaatgttatggacatgaatgcgggttttggaggatttgcagcatcaattatcaatcgaccgttgtgggttatgaatgttgtacctgttgatcagccagatacattgcacatcattttcaacagaggtctgattggggtatatcatgactggtgtgaatcttttaacacatacccacgaacttatgatcttattcacatgagttatctcttagggccccttacgaaaaggtgccacatcattgaagttgcagctgaaattgacagaatacttagacctggtagatggtttgtgctgcaagacactatagacatgataagaaagatggaccctgttctcaggtctttgcattacaagactacaattgtcaaacatcaatttcttcttgccaccaagggtttctggcgccctggcagtataggttcttagtcatgatgattccggcttccacccaaaatggttggcaatgtgaataggctggaggaatgtgtgtagctatattggtgccaacaggtgaggagagggcatcaattaccattttaccagaactcacttgtttcccaagctcatctatctctttcccactgctatttgttgttcttcctcgaatgtattctggctatgaacattgtggagatttctgaactctgattacagctaccccgtttcccaa

SEQ ID NO: 34595 - DNA, 2163 bp, Zea Mays
aaaatttggaaggggaatggtcggagagagaaagcttcctccctcttccctggtctggtcgcttctcctgtagctgtaatttttgagagtccctctcaaactttgcttgcttgcgctctccatatatcctgtggatcggagaggatgctctgatctacctgtctgttcttcgatcgagtctgagagatttgggaggaggagggaaacaaagcgaaagagcccatcttttttgtctttttggttcggtttcgtggttgcttcttttggaccccgcggaggagcccaccgtttctacaaaaacccaatctttgctgccttctcagcggtcgagatcgataggtttccagatctgaggctccgtgttctggctgtgagatcggaggcgcagcaatccgagcacgcagctagtagggaaagtatccgagaaaagttgcagattttgctgggggcaacggagcgagaacaagttactgcagaaggaaagggcaaaggtgggggaggcgccggagatgagggatgctatcagctctgatggattatttgaaatcttgctggggtccggcatcaccggctgggcgtccccgcaaaggatcggatgccaccggccgccaggacgggctcctgtggtacaaggacggcgggcaggtcgtcgatggtgagttctccatggccgtggtccaggccaataacctattggaggaccatagccaggttgaatccgggccgcttagcacatcggagcctggactgcaaggcaccttcgtcggggtctacgatgggcacggtggcccggagacagcgcgttacatcaatgaccatctcttcaaccacttgaggagattcgcatctgagcacaagtgcatgtcagcggatgtgattcggaaggcattccgagcgactgaggagggtttcatttctgtggttagtaaccaatggtcattgagacctcaattagcagctgtaggctcttgctgtctagttggtgtggtttgcagcggaactctatatgttgcaaaccttggggactcccgtgctgttctggggagacttgtcaagggaactggggaggttttggcaatgcagctctcagcagaacacaatgcatcctatgaggaggttagacgagagctgcaggcatcacatcctgatgatccccatattgtggtcctaaaacacaatgtttggcgtgtaaagggtattatccagtacatgagtcacacaagataggaattggtgcatattctaggttaatccttttgtaagcggtctcggtctggtggcaattataactatgaggtcaactttgtatattttggataacaaggtcaattggagatgtgtatctgaagaaaccagaatttaatagagaacctttgcacagcaagtttcgtcttcaggaaacttttaggagaccacttcttagttctgatccagcaattactgtccaccaaatacagccaactgataagttcatcatttttgcatctgatggactctgggaacatcttagtaatcaggaagtggttgacatggtccaaagtagcccgcgtaatggaatcgcacgaaagttagtaaagtctgcagtgcaggaagcagcgaagaagagggagatgcggtattcagacctcaagaaagttgatcggggggtgaggcggcacttccacgacgatataactgtcattgtggtatttttcgattcaaacgccatgacaactgctgcctggagcagaccctcggtctctctccgagggggtgggtttccaatccattcaaacacccttgctccattctcggttcctacagagctaaacaactcctactgaaaccacgcggtatgtgaaggagccaggcaagaggataaaaaaaaagtaaaggaaaacggagaaggaaaaacagctgttgtgatcagttgtagtgtatttcaccgttcatgttcatttaaaacattttttagattctcaagtctcaacctggtgaccagtgcactgatagcaaggtataagattagattattcttagcttttttatcctcttttttttttctcgtccttaccctttagattcactcatgggatatccgatatcaggtgcttgtacattctttggttcaacttgtgataatagttcatcgcccccctcttttcgccatacagcgttgttccg

SEQ ID NO: 34596 - DNA, 1192 bp, Zea Mays
cagtacggctgtagtgtcgagggtgctgttctcggctcctttgataatgatctgttaccttctatagaattggttacaaaaatgatagaggatgttgagcttctagaagaaaaggctaaagtggccaaacatgaattgtccgttgctgggacaggcattctggcaaaagttgaggagctcagagaaatgataacttatgcgaaggaagcaaatgatatggtcttcccctctaacccacatgctggtaaggttttaggcgagaaagctattttaaccacagaggcacgtgagcttctatcacgacatcagaggctttcggatgagaggaataaatatctggtgataattgaagagatacaccaaattcttgctgaaagattggttgctgcacaacaagaaattgcagcagctgagaaagaaaatgctgaaaaggaggctgctgctcaggcagtactcgatgaacaggaaaaaatgatgaattctatcgtagaagaatcaagaaagctgcagaaagaagctgaggagaacctgaagctgaaggaattcttggttgagcgcggtcaaattgttgatatgctgcaaggtgagatggctgtgacatgtgaggacgtttcgttgctcaagcgagtggtagatgagcgcctaccgttgagcaagttgcagcgctcagctatgtcgagcctctcttcttcactgcattcttctcatcacaagagctggacttcctcggataaagccattagatctccagataagcacacccttgctgaacctgcaagcccagtggggaaagatctggatggcaacgagtgcaccgtggaagtgtcagatggcaacgacagtggtgaaggcattttgaagcgcgtggattccaaggaggatgtcgatggatgggagctttgctgaagatgttcaggaatagcggcgttgccagaggatgctgaagcataaactaacaataattgtgtataaacgcatactagcacggtgctaatctaatcgttttcacatgaatcgggaagtctcgctggctcaccacagttgtacgtgagatgagtccaactggcaactgcagcttgatgtggtatatataaaagtgaaggtttcagctcccttactgtccaaattttatgtcgtttctaattttgttctaggttaaatatctgacttttactatgtcttctaaaaatat

SEQ ID NO: 34597 - DNA, 802 bp, Zea Mays
ctcgccatcaaattggggaaagttgacacgaggtagatttcccgtgtcagaacgacttccctcgcgaccaaattccgaatccgaatgatgctccatatgagcagtggaatcaaaacgatggtggaattggttgcgagacatacccttgaccgggccgtgggtttggaacgtgacgtgtccaaacccgcgatcccggtgatcatgatccccgcggtagccattaggcccgtcgacggtgtgaatcccgacagatgtgcgcgcggccgttgacccttcaggacgcagcagaccgtgttgtggtccatcgttctccagaatcccgcgctccatgattttattggcgcgtttcaattccagcatcaagttcttgagacgcttctcgacctctggtttccacccttcaatctggccgtagtccatctccagggagataagacgtgcctccgtcttttgttccgactcctccatcctgcattcgagatcgtcgcagcgtcctagtaggacggtcctactatcgcagcgagcaaacgcgtctccatgtgcgacatttcgtcgagcaccttcttcatcgccacctccatgcccgcggctgtcgatgaacgtgtccgccgaaccggtggttgcgtaatgccctccaggattgcaacaagtctgataccagattgtcagcaaatgaactgatagaggaattgagcggagaagaattggagaaatcagggaagaagaagaacagaatgacaggcaggggaacgattctgttatttctcatttgctgccttcagccttttcgttcttagcgttt

SEQ ID NO: 34598 - DNA, 2364 bp, Zea Mays
atggatggatgcgattgtattgagccactttggcaggccgatgatctcttaatgaagtaccagtacatatctgacttctttatcgcacttgcatacttctcgatccctttggagctgatatactttgttcagaagtcagctttcttcccctaccgatgggtactcatacagtttggtgcgttcatcgttctgtgtggggcaacccaccttataaacatgtggactttcactacgcataccaagaccatagctgtggtgctgacagtggcaaaagtggcgacagccgttgtgtcatgcataacagctctgatgcttgttcatataatccctgatctgctgagcgtgaaattgagggagaggttcctgaaagcgaaggccgaggagcttgatagggagatggggataataaggacacaagaggagacgggaagacatgtgcacatgctcacgcacgagataagaagcacacttgacaggcatactattctgagaactacacttgttgaaatgagaagaactcttggtttagcagagtgtgctgtgtggatgccatcacgctctggaacaacccttcagctctcacatgcactccataccaatgctccgcttggatcagttgttcctatcaatcttccgattgtagctaccatttttaatagtaatcgtgctgagagaataccacatacttccccattagcttcagtaaaggctcagaaaagcaagtacgtcccaccagaggttgttgctgtccgtgttccgctgctgcagcttacaaattttcaaataaatggttggcccgagctatctgcaaaagcctttgcagtgttggttttgatgcttcctccagacagtgcacgaaaatggcgaccccatgaactggagcttgttgaagttgttgctgaccaggtggcagttgcactgtcccatgctgccattttggaagagtccatgcaagcccgtgatctgctattggagcagaatattgctctggacgcagcacgccgagaggcagaaatggctatatgtgctcggaatgattttcttgctgtcatgaatcatgaaatgcggactcctatgcgggcaatcatttctttatcatccctcctgttagaaacaaaacttactgcagaacagcgggtgatgattgagactatactgaagagtagcgatcttctagaaactctttcaaatgatgttttggatatatccaagcttggagacggcagccttgagctggaaattgcaccttttaatctacatgccacctttacagatgtggttgatttaattaaaccagtagctgcattaaaaaggctatcggtaatggttcatttggctccagaattgcccacctgcgcaattggtgatcggaagaggttgatgcagataatactaaatgttgctgggaactccgttaagtttacaaaggagggtcatatttcagtttcagcatctatcgctaggccggattctctgagggacccatacgctcttgacttgcatccagttctctccgatgggtctttttacttggctgtgcaggtaaaagacaccggctgtggaatcagcccacaagatatgcctcacaccttcacaagatttgcacaccagcaaaatgctacaaacaaattgcgtagtggcaacggattgggtctggccctttccagaagggaacatctggctggaaagcgaaggcgtagggaagggctgtaccgcaacgttctttgtgaagctaggactatctgatgcaaatctccggaggatggtgcctcctgtccagccaaaacatggaaatgcagatccagatgtatcatcaataatcaacggcgacatggcgattcttccgcgttgttaccagtcgatgatatgacaaggaactgcaggaggagcctgatcttgtgatatcatgatttgaaggtggattcacggggttaaggatgctgtgtgtagagattgctctccccgttttttttttttttttttttttgcagagccgtcgcgctctaggcaagcaggtgcgagtgcgatcgggcgaatccaaaatagcgggacgcctctactagggaattaacagcgcagggagagcggtgcggtgttttaagaaattataagttgtgagatgagtggcgtgtttgttagacgtcatttagggttttctagtgttgtactagtatagtcttggtagagagaagcagaaagaagctgatctgtacacgaggcaaatgaaatgctgatgactacttataaggcttctactgtttgtacagtattttttttgtctacataaattgcaacagtatagtatttttgtctctatgaattgaattgcaggtgtaacagttctttaatttaattcgaaacgaa

SEQ ID NO: 34599 - DNA, 3258 bp, Zea Mays
gctgccagactgcaacagccaccggcggtcggcacgacagcacggtccttccattgttgctcccagctccaacgcagcattactcatctccattctccagtccgataatccactcattacctcatcatcgtttccaaaagcaaagctttccacgcagattccaccattaaattgggcgaacttttttgaattaaaaactcaaatcctggaaaacgagatgcggtaggctggtagtaggaggactaatcatgtgggcgacgctacataaacccgtcgcgcacgccaacttgcgtctcctcctcacagtctccgccttctccggaccactccacttaggcaccgccagcgctgtcgcggcggcggttacgacccgacgctcgagttctagcaggggcgtcgcggccaccgcgatgccttcgtcgtctccgcctccgctgccaccagccgaggagacgaccgcctctgctgccgctctcgcccctgagggtggattctccctcaccgagccctcgttcctcgagtccctcatgccgaagaaggagatcggcgtcgaccgcttcctcgccgctcaccctgagtatgacgggcgcagcgcactcatcgctatcttcgattctggagtcgatccagctgctgctgggttacagactacttcagatggaaagcctaaaatccttgatgtacttgattgcactggtagtggtgatgttgacacgtccaaagtggtgaaagctgatgctgatggtgctattgttggtgcttcaggtgcccgtttggttataaacccctcatggaaaaacccttctcaagagtggcatgttggctgtaaattaatatatgaactgtttactgacacacttacatctcgattgaagaaagaaagaaagaagaaatgggacgaggaaaaccaggaatcaatttccgatgctctgaagcagctgaatgaatttgaaaagaagcatcctaagcctgatgacaccatgctgaagaaggcacatgaagacatgcaaagcagacttgattacctgaggaaacaagctgaaggttatgacgataaggggcctgtaattgacattgttacatggaatgatggtgatgtgtggagggttgctgtcgatacccagacccttgagggtaacaatgatggtggaaaactagcagattttgttcctctgacaaactacaggcttgaacgcaaatatgcaattttcagcaaattggatgcttgctcttttgtagcaaatgtttataatgatgggaaccttgtcagtatagtaactgactgctctccccatgctactcatgtcgcgggcattgcagctgcatttcatccagatgaacctctgctgaatggagttgcacctggagcacaattgatttcctgtaagattggagacactcgcttaggatctatggagacagggacggggctggtgagggccttgatagctgcagtagagcacaaatgtgatctgattaacatgagctatggagagcctacccttcttcctgactatggcagattcattgatctttctaatgaggttgtggacaaacatcgcattatatttattagtagcgccggaaacaatggaccggctttgaacactgtgggtgctccaggtgggactagtacaagcattattggtgttggtgcttatgtttcaccagccatggctgctggagctcactgtgttgtacaaccacctgcaaagggaatggagtacacatggtctagccgcgggcctactgctgatggggatcttggcgtttccattagtgcacctggtggtgcagttgctcctgtaccaacttggacgcttcaatctcgcatgctcatgaatggcacttccatgtcatctccttctgcctgtggtggggtagctcttcttgttagtggcatgaaggctgaaggcattccattaagcccttattctgtaagaaaagcaatagagaatacagccgcatctataagtaatgcacctgaggagaaactgaccacaggaaatgggcttttgcaagttgatagggcttttgaatatgcacagcaggctaagaagttgccacttgtttcttatagaatctcaatcaatcaagtgggaaagtcagttccaaaactaagaggaatatacctccgcgggggcaatgcatgctgccaaacaagtgagtggactgtgcaacttgacccaaaatttcatgagggcgcgagtaacttggagcaactggttccttttgaggagtgcctgcaactgcattctactgatacctctgtggttcaaattcctgagtatatactggtgacaaacaatggacgcagtttcaacattgttgtcaatcctgctaatatcagcagtggccttcactattttgaagtttatggcatagattacaaagcaccatggcgtgggcctattttccgtgtgccaattactgtaataaagcctattgctctattgggagagccaccactattgtcaatttcaaaccttcgttttcaatctggtcatattgaaaggaggttcataaatgtaccttttggagcttcatgggcggaagttactatgcgaacatcagcttttgatactcctagaagattctttttggacactgttcagatctgtccactgaagcgacctgttaaatgggaggctgttgttactttctcttctccatcttcaaagaatttcagttttcctgtagaaggtggcttaactttggagttgtccatagcccagttctggtctagtggaattgctagccatgaacctacctgtgttgattttgagattgtgctgcatggaatatccattgatcagaaagtaagtacccttgatggtgagtcacccttgcttatagttgctagatcacttctagcgtcagagaagcttgttcctgttggcaccctgaacaagatcaggataccttatcgacccgtggagtgtaatctttcttcacttcccactgaccgtgataaattgccctctggcaagcaaattattgccctgaccttaacttacaagttcaaattagaagacaatgctgaaataaagccccatgtgccactgcttaacaacagaatatatgacaataaatttgagtctcagttttatagaatatcagattcaaacaagcgtatttactcgtccggagacgtttaccctagttatgtcagactttccaaaggagaatacacgttgcaactgtacataagatccgtctacaaataaaatgctggcaggggggcatattatgagttca

SEQ ID NO: 34600 - DNA, 508 bp, Zea Mays
tcgacgcagccatgcaagatgcttcatggcgtgcacttttgcagtattgttcgttgttcagcggggtagctaacgacctcaacctaaagtactacccccgtcgttcgaccggcagtaccggaggtgtgattgtctcaccagttggtgagggaatcgtagattgagtagcatggtcaacctggtcgccgtgctcaacaccgagctggaccacacccttgacgaattaagcaaggctcgggtggagattgcggaactgcatgctgagcgcgcggagcgccgccatcaggaggatggttcccccgctcctgtcgggactcagcacccttaccgctcgccgccctgtggtcatcatgcttatggcacctattaggggcttcctcttccaaaggtccttaaaaatatgactaaccatttgcttttagcataatattgattattacagggagcttcagttcatgatggaagttttctcccctgtcgaaggtcttcaagacaaaggtatagcctg

SEQ ID NO: 34601 - DNA, 2946 bp, Zea Mays
atttgggcctctgcggcccgcttacgcacgttcttgccctgctttgctctctccaactccagcatcgccccaaacagcggagccagcaccaccaccaccgcggcggcgcgagcgtcactgccctgccctctcctcctcctgtcctactgctctaccgtcctctcccccccgcgccgctgccgcaaccaaaaccctaaaagtcgctttctatccacttgctccgccgcctccaccaccgggcgccatggcggacacagtgcagtaccgcctggagcggatgaccgacgaactggacgacctggagcgccggggcctcttcacgcgcggcgagctagctgacgtcgtccgcaaacgccgcgacttcgagtaccgcctccgccgccactccccgctccgccaggactttctcgactacatcgcctacgagctccgcctcgactccctccgcaacctccgcaagcgcgccatcatacgcgccgccgccgaagacgacgacgacgagcctcagcacgacgctcgcagcagcgacgacgagggaggccggaggaagaggaagaaggataaatccaagaagaagtggaagaagtccgtctccgacgtcgcgggcgtcctccgcgtcctcgacatctaccggatggccaccgtcaggttcaagggcgatctcgacctctggttccggtacctcgagttctgccgcgacaagcgacacggcaggatgaagcagatgtctcgttctggactatacactgacattctgctatgctcacaagaagatcggggaaacctgaaacctttctatgcctataatgtgctatattccagctacacatctagttctggcacaagccattcgcttccatcccaaggttcctgggctttggatctatgcagcagcatgggaattcgatcagaacctgaacgttgccgcggcacgtgcactgatgcagagcggtctcaggtcttgccctcagtcagaggatatgtggatcgagtatcttcgcatggagcttacctaccttaacaagctcaaggctcgaaaggttgctcttggagaggatgtcaagacgctgcaaaagaaagacaacgatgcgagccagtggaaagaggaaaacaaggaactgttcatgccactgaatgaacaggtcaaagatcctaaggagccaggctcggctggagatgccctggaggagaaggaagacctgttttggcgtcaagggttgttaatcattcagaccatatatcatggtgccgtggaagctcttccgtcaagcttaaccttgcggaagaaattcttggagatactaaacagtgttgacttggcacattctgatgagttaaaactggaggtcctggatgaccttaagagagatttctctcatagcgaggactactgggattggtttgctaggcttcagcttagcaacttgaacagttccagtaattcgaatagaaaggatgctatatcaaacaagttgaacagatcaattcaggtgtatgacgaagctatcaggaagctaccaaattccaaaatgtactcattgtatgcaaagttttggatggatgttatatatactgacagagaagattcagtcacattattccaggattctgaatttgatgcttcagagttcacttcatccatactgaaagtttatgaaaatgcagaatcatgtggatgtcttactgaggatcttgcttgccaatacatatcactttacttgaaactagaaagactggaggaagctaagactctcgcagaaaagctttgtgatggtcctctttcaaatgctgcaaatttgtggagcctgagatttactatggagataaattcaattgcaactgctcctggcagttcttccttgagcaaggagaacctgagctctctgcttgatctatttagcactgtactctccaagttgtctgtaactgaggctgagagactgtggcatatggccatgaagttgttttcccatgataaggtctgtttcgagaagctggtgaagtgtgcgatgctatcattaagtctggcaggtggcagtgattcaggagcatcagtttcttctgctatcgttggatggtatttgcaaagagatggtgtgaagcatgctaggaagatgtataagagattgcttgctttacctcggccaagcctcaagttcatgcaatactgcatagcgctggaggcgaaccttgcatcgctcggagacaacggcgccctcaaagatgctcggcggctatatgattcagcgctcgacctgtatccccaggaaagagaagtgtggcggagctactacgacctggagctgaagatgggaacatcggagtctgccaacgccgtgtactcgcgctctcgtaaggtgctgggtgactccactgccttgactgctccccggggctaggtcgcagcatgcaatgtattccaagatgcaatgtgattttttttgtttggatctgtgttttccaatcctctctgagtctgggtcagcaagcaattaagctgatgcatcgaaattttggctctaaatgggagacctacaatgtgctgctggggaacactgtatatcttgttcaaaaaacaagagtactgcagctgctggtggctgtctcctttgagaacacttgcctgtgtcccttttctttctttttcttttttgtttgagcagtagctgggctgttggtgatgctgttccttagtgttgaggtgctatggtgtaacagtgtcaattgcgacgtgaacaaattctgggatctcgaaccatttgttgagattttgaaagtgtactggtggtcataatttttgttgggacctcgaaccatttttttagattttgatgtgttccttttatttatttattttttgtatggttcatggatgagccacatttgcttttgtgtcagtcttgctgcagattcctggtattaataaattagatgaattatgatgat

SEQ ID NO: 34602 - DNA, 274 bp, Zea Mays
tcattggtgaaactttcaggtagacataatctccaactggaaagtacaagggtatccggtgtgtgtctgcgtaactcttctgacgagcttgagctttcttcaaattatgaattattcgttgaaccttctcttctgtctcctttaccatatcaggcctgaagaaatttctttcaccaggtttagaccagtttaacggagtgcgacatcgtcatccatataaggcttcgaagggtgccatcttaatgctttcttgatagctattattatatgagaa

SEQ ID NO: 34603 - DNA, 5642 bp, Zea Mays
tccccctcggcagacagcctcgcctcgcttgcttctattgctgtgctccaccacggagccctaggtggagctacgaaccccgtgatccccgacagtgtggcaccggagctcggcggcgacagcgggcacatccccctcatgccctaggtggagcaacgaaccccgtgagtccatgctcgtaccctcacccctgtcctcccgcgatgtccccactgtcctccaccctcacccgacgcaatgtcgatgccccggccgaggagtctccttcctcccctgtcccactcgcgtgaatcaacaggcgaggtcgtcctcaccctcggcctatggtggcagaccgtgctcaacattgccccaagaatgcgactctcctcgccgcactgctctatctcggggacctcgcctagcattgccccctgccccgcgtcgacgaggtggagtccttcctcgcccgcaccttccggatgatccaggtgctactcgaggctgtatgcattgtgtgggggaataagggatatgtagctgcttacattttgaagagatttgattataccttaagcacgattgcaactgaaactttggctgtgggtgatgggttctgctattttggtatgttatcattcatctctatgatagagcagattcagaatggtgagtttggcaggggttaattgtttcaatttgttagaatttttcaaacgaaagttgtctcaatttttggatcattcttggttttatgacgaatgcccaaactacagattatctaatggtcaaactgaatatttgttttatagcaaaaaaactatctagaaaattacctctttcatgtttttgttcagcggcggtccacgcggctaccaatagggatgatacaggttttgatattcttttatttattaattggttcaattggagaattacctcaacttattgggattaatgttctttgttctttgatgaccccttgctgagtgaaaaatacctgtgtatgttacaaaataaactacttgtatgttaaaaaaagtttctccctgccattacattgacatctcaaactcctcgcacctgttgccttttggaacatatacgttataacccacattttgcattgtgatttctctactaccaacaccaattttcttagaaggctatttagcagtaatttttgtactagctacaagaaacccattctatgcaataaatatccatattacgtaggtctgcagattacggcatatgctgcaatagcaaatgacacatttgtggcatattgctttcctttcaaagctttgagaatcatgtagtcatgcattagattcacatgcaccaaatttaagctaactggaaagtgggatcatatttttttatctcgtgcaaataactattaaactgctcaagtttctttatttggtaattaattaaaattttcaaccatgtcatattgcatatcaattgccaactttttctacacagatgcacatgctcaattatgataatgtcatatggtctgtcaaccatatgtggtcaatgcaaactaaattgttttcttctttatatgttttgatttgattttttgtatttgtcactgggattatatttttctctcaacggttttgctggttgctgtttcaattcaagtctgcactgctaaggtgaatttgagtgacgagattgatttggaagattatgtttgcagaccgggtaagatcagtgttgctgatgttgagttggtttcatggcgcagaccaagatttttatgcatttgttgttttctaactattgtattgtcagggtacttttgtcctgccctagccaaagcattctccattcatttccataatactaatgctcttattcattcttacaagtaatttgtctcgcggaatacattaagatttgcatgacgtctaatagaatatgtttattgtattagtatgttggaaggggtgaaaatgaatcttggtatcttagatctgggttgcttcctgtcatagaatttggttacaatgtatcttttggtggaaatcatttttttgctatttgtgttccaaattctgcatgttgggtgagttagccaagtttgtttcatctatttatgagttctgacattgaaatgtttaccatgaacctcctcgctgacacgtcgcctcgcccccgagctgacttcctgacgccaccctcgcacaagatcccgatgtggcaatggcgaccagcgacgggcgctcaacgccaccgcgccgcctgcgaacccatggtgagaagtgtggtatcgatctagagccgaaggacttccccaacaccccttcctccatcggcgtgacatcggccagctcatctgcgacgacgaggcatcttcgaccgacttctcgacaccccatcctccatcaacgcggctccagtaccccttcctccatcggcgcagcagcatccaattcatctacgacgacaaggcatcttcgagcaaccacgccctactacaagtggtgttagtccatctcagataagtggagtaatttgtttgtatctgtatcttctattttatttcttccctaatcctgattaatagcctaatcacgcgacaactaatacatgtcgatttctttccttagccggtgtcatgcgcatgtgagatctagggagaggaagaggaggaagggttgtggggaccgggggtgcaagatggcggattcacctgcaactacaagaaaagaaagagcgagagatttacagaaaccttcagagccacggaggaggaggaggagattaggaggatctctacggcgctgacggattagttaaggaacgaaatatcacatcgtgtccggtaaccagattcagatgtgggcaccatgtgtgggtgcaaggccaggccgaggcgaaagagattcgacgattgagaatacatcaaagaataaaaatgtggaactcggattttcagatgaagagcgtgaccaagaatttcctgattttccatcatttattccattcttacctcctctgagtgcagctaacctaaaggtctactatgccacacgtttcaccatcatagttgggataatggtgttcggtggttttcttgcaccaatcttaaacttggtctaggggcacatcttatgaagactccatccgcagcgttcatctgtcgacgtagttgagatgaattctctatgcctacttctagagtgatgttcaaagaggttgacgctccttcaccatccccagctttgtggaatgggccacaggtagccatttaggatgacaaagccacaagggtgtccttcatcaaggctatgctagaagcctcagacttgtgtatgaggaaaattcataaaaatggtacacagaagctgggaagaaagtggaagaggaatttagcacttgccctctgtcagtcctaatgatgagcgttaagaacaacaccaagtcgggcagcggcaacagaggggatggggccaatgacggaggcggagaggagaacccatcgatttggtggcgtaagtgggagctcatcgaggccggtgcgtttgggcaggtctaccgcatgacttatttgcccttctagggatcagcagatcccacacctattacatgatatgtccttctagaatagaatctgctctctatcttctaaaccggtactgccttcttcaatatcagccaccggccggtccacctcttcaataatcgtccttcatcgcccttcagttgtgagttgtgacatactatttatattcggatatgatctattacaaatatacatgcatattatagggtgtgcatctgtatacccatgttctttacaaggtccgtccttaggtgatatgagtagtaagtctaaacttgcttcttaccaagagttaggctgtatgtgtgtatgtatttttttagtacaatagtattcaaaatgtatgaggactctttctttttgattgttttgaacaatgggcgtatgaaccggtggaagaacaattcatttgatagttgtttgtgtccaaaatggaactaaatctaaaatttgtggagcaaaccactcaatccagatctctatttaatcaaacattttttttgttatgatgcagttccacacgtgaaatagccatatggatatgtaacaacataaatttgttcagtgggaaataagtttctataatacatttatgcacccaggtgacaagaaaaaaatattttgtcatttctataaaacatgatgcattttttctcaattcatagtgtgatgttattcctcttttgcctttagagaagcccataatacaaatggataagaagtcaccaaacatttctaaatcactggtcttcatccagtgacaacctttagtgtcgagctggtgtttgtgcttgagctttagtatgtctgcaacaagcctttaggaatgtcgatatgctcatatgcttagttgtgcatgagtatttttgttgcaaggtttagatgcagtgttctggtctttagtgcatgtattttatagaatataacacttctatattgtagaatgcaatctgatagtttacatagaaactgataaacttgattgatccttggcattatagtacaaaaagtgcaataccttgtgaattaattttgtacctcattgtcatttacgggttaactgtccatacattgtattacatgttttctacaacctgttcttatttctcaacgaacagtagcaatcattggtcaggacatgtagcttcatttgttaggacatgtagcttaatgctatcttgttgttttctactgttcataaacgcaggacctgagatctagaaggacacaacaggcaaggtggatgtattcgtagttgattatatgttaaaagcaaatttcggatgacattggtggagattgcttatctctaagacacatctactcattctttgaatggaaatcacatccacgttctagaaagtctatttttacttcaaaaaggggcgagggttgttcagtgctttgacatgtgtgcaactattcaagcacaatggttagatgatatccccattcattttagattattacattgtggtgttcgacttcttcagtcaagcagcaatcatgcaacatgccttactgtagttttttatcactgcacatgttgctggataaatttatagactggaggattatagaggactaacaagtgctactgggagattctcgagcaccattgaactaagagattccaaatagttctttggagtctattgttgatgttggcggggataatctagcagagatttgtcagattttttgtgcaacacggaggctacatgaggcagcaacgatcccattcttctcgcatgccactttacacaagctaaggatagcttctggtctcactcatggttgtggcagggaaagccgagtcagtagggtttgtcatgtagctggagttatctcagaccgcatattagatgcagtgatgatgtttacatttaccgtgcaagcaagatgacttatattatgccttaggacaataagtattgttttcactctaatgaaatacttggtaaaaagttgtctctgtagttgtatatttgactgtgaatatttgaacccactattataattgttgctaattgaggtcagatttcagaggccaaataattctggtatctgcaaagttggg

SEQ ID NO: 34604 - DNA, 3742 bp, Zea Mays
gtgcgcccccctcgccctcggccccctcccttatttcaaccccatcggccggccgcggccatcacacatgcacacccaaacccacacccacatgccagcccgccaagagcgaactgcttccccacctccccacgacgggagcctgcatggccatgacgcccgcaatgataataataacatccctctgaactcgcccgcgcccatcccaaaaccgaacacacagcacaagagaactctgctccgctccgccttccactgcattccgtagtacgtacctacctacctcctgtgcccgcgcgcagaaccgctactcccccgcctctgcctcagctctgaccgttcactgccgtgccccctcctgcccgccacggaaccttctacgcctccggaggaggactctcccgtcggtggcgccgccgcgccggccacaccggtcgtcgcgcctgaatgctgcgatcgtcctgcaggccgcactacgcctgaccgggccgacagccagctcgcgaagatgcacgccgggacgacgcgcggcgacggcggcacgcggggcctccagcgccgattcggctgcatggccggcattttccagatcttcgaccgccatcggctcatcgccggggccggccgccgcgccgcccggcaggcgcagaagaggctgcctccgccttcttccgctccgccaggcaaaactcaacatccaaagagcagcagcgatgttctagttcaaagttcaagtgcgtcgaagatcgttctggagaaaacattgagcaaatgcacgaccgagaacagcagcctttccatcgaatcgtcaagcgattcgtcttcctcctctccgtgcacgtccttctcctccctcgatggcaacaaatcagtccaacaggagcttccttacaccagcgaggagctctttgcgcagaggccactgaagagctcgccgagtctgagggaacctgacatgaacgccaagtctggccatcctaatgccggtttcagagacatagtgaaggactgcatcaaccgggactccggaggcctgacggtaaaaacttcggtgcacgaggcaaggagaaatgggcagcacaaggactcaccgaggccactgctgctgtccaaatcaatggatgggacctgtatcattgggatcgataggaccacaaatgttcctgcaaatgtcaatggatctagaaggtgtttgcaggagcagtcacgcttttcttgtgatgaccgaaggctcctgcgaccaactgaaacccaggaaagcaagaggtcttcctcgaggccaaaggagcttcctagattgtccttggacagtaggaaggagtctctgagtccaggctcacgtcagaaggacctcggttacaagagaactgatgatattcttctggatactttgaggcctcaagattcccctagccatagcagagctaacagtgtcattgccaagctaatggggttggaagaagcaacaaatgctacaggagtgctcactgccgatagctgtgaacccacaaggtcaccgagaccagctcagaccactcaatatgggcatccatcacgctcccccagaggcacttgccaggattcctgcagcatgcagctgaagaacgagtcctcagtactgaaaaccaagccttccccacgaattctcacagaagcagctccttggagacagcaggaaagaagtgtcaccaatatctgtcgagaagctgaagggaggccaaggattgcatctgtctatgctgatatagagagaagggttgggggcttcgactttttagagtgtaataacaaggacttcagggctctcagaatattgggtgcattgaatgtgagagatgctaagaacaagaatgacagcagtggcagaccaatggctactcacagaacaggatatgacctaaccacctctggaagcttccaggctcctattgtggtcatgaagcctgcaggaaccactgagaagcatggggtttcacttgcttctgttgcccccatagcaggcctcagaagcctcagaaagttgccagctagatattcatctttcactggcacaaatgaggccagcacaaatgagaatattcatcttcagatgtcaagagctcaattgaagtctgaagaaactgtcagcagtgccagctcaccaaggcctacaagctcatcgaaccccagaaatgtgctaaagaaggcagaacctgaaagaagatcccgtccacctgtttcaccaaaatctccaagcaagaagtccaatgaagctgtctccccaaaaggaagaacaagatcaaagccttctcaggtgaaaagccaccgtgatgaggtcttgcatagtacagggaacagaataagcttagctaagcaggttgacgtcagcgttatagattgtccaaagcctccgggtggcaactcaaccttcgttccaccaagcaatgctgctgcaacagcaagtcacaaggctccttcaattctggattcagaccaaaacattcattcactggacaacattccaagccctgtctctgtccttgatacatccttctatcataaaaggatctcagattcattcaaagatggtgagacacattcttcagaggaatgctggaacccaaacagcctgcctgacacaccacagtcaaaagcgagcagtgaagccaaccagattaaaccagaaaatttggaagttctgatccagaagcttgagcagctacagtcaatgaacgaagaagacgcaagtatcaaagaagtcatggcatcagtcactgcaaataaagatcaccagtatatctatgagatactgttggcatctggtcttttgcacaaagaacatagtatcacggcattacctgctcaactccaaacatcaaattatccaatcaatccggagctcttcctcattcttgagcaaacaaaaccagacttagttttcgcattccaagctgtcagtggaactaagaaaacttgtaagccttacacagggaagcttcaccgaagacttgtgtttgacctggtaaacgaaacaatagctcaaaagatgatcatctgcagatctggaagccagccagcaaagtttcttcaatcaaggaagttgagtgggtggcaactattcaaggatttgtgcactgaggttgacaggcaaataaaatgcaccggggaggaggagaatggaaacatgatattagatgaggatacagtcaatggaacgaaagactggatgagcttcgacactatgctacatggcatagtttgggagattgaacgatccatcttcaagggtcttatcgacgaggttatcggcggtgagactatagagaagatgcaatttgggcaaaggaaactgcagaggcagctttctttcagtagtataaactgaatatgcgtcgtagcagtcatttccatggaagcttataacaactagtaaatgtgacagtttctattttttctgaagactaaactgtacaagtataaatgatcctcaacactagtcttgctgcctgactattgcaattcgagatttgtgtgacatgactactgtttgactctactaccggtcaaggcgattgaagtgcacagtaccccgcgtgtgcatggtggacccattatatcaagtgtttataggaatgtcgggtagatgataacttgagataaagttctcgttttttgcatttattgttacggatgatgttgcggtcaaactgtatgccgcaaatgtaccaataagcactatattgtccatgcggctacaacggct

SEQ ID NO: 34605 - DNA, 1320 bp, Zea Mays
cgcaaaacacagcactagaaaatcgatgacctaaattccatagagagagcgagagaaaaaaatcccaatccatccaccctcgccgcgagatcgccgggcgccgccatgtcgactccagccgccgcctactacgccgccgccgcgcgcaagcaatacttttgctaccaatgcaaccgcaccgttctcatcgcggcctccgccgccgccgccggggagctctcgtgccccgagtgccacggcgacttcctcgaggaggtcaccgtccctgcccccaccttcatcccgctgcccttcccgttcccctttgcccccaccacgatccccgccgccagcaccaccccggcccccgccccagcagccggctccggtgggtccccttccttatcgtcctcgtcctcttccgccgcgacctccccttcccagcccaacgacatctcctccatcctcaactccttcctgggactaggcgaacaacccatcagggtcggcggctctgcctcgcgcgccgccgccggcacggccacccccgagaacgagcccgagcccttcgacccggtcatgttcttccagaattacatccatagcctcgttgagggaggcgccaacatccaggtcctcctcgacgacgccagcgtcaccctcggctccggacccggcctcgggcgtatcggcggggcaagctttggggattacttcgtcggcccaggcctcgaacaactcatcgagcagctcgccgagaacgaccccaaccgctatggcacgccgccggctgccaaatcggtcctctcctcgctccccgacgtcctcgtgactcatgccatggtcgcagctgcggagggcgctgagtgcgccgtctgcaaggaggatttctcgcctggagaggtggccaagcagatgccctgcaagcacatctaccacactgactgcattgtgccgtggcttgagcttcacaactcgtgccccatctgccgatttgagctgcctactgacgatcctgattacgaggggcggaagggcactaatcctcagccggctgttggtgtggctgctgctgcatctgggagctctactgctgctgagggacagatggaggagaggcaggagaatccaagggtggttgagaggaggttcaatgtgtcgctgccgtggccattcagtggactgggagggcaaacatcgcagcaggatgggaacagtggaggcagtggtagcaactcacaaggaaatgcacaggatggtgacccacccagcaacaagaattgatcacaaatcagctggaggcagaatggtggagcttctttaagggcaaggagggccatg

SEQ ID NO: 34606 - DNA, 2658 bp, Zea Mays
ctccctcaatataatgggtcatcactcctcccaaccccacaaaccacaaatcttcagccccacataacaaatcacgcaaagattcccctgccatcatcaccagaatttagcgcctccttccctcctcctccccacgaccaacaaaatttcactcttctccaccacgcacctgactcacacccccccgctgctttgactttgactacccatcctcactcccccctactccactctaaaccctgcgctaaaccttggctatcgatggggaactgcgccgcctaccgccttgccgccggcgggagcggcgacggcggggaccccgtggccgtgtgccgcgaccggaagcgcctcatcaaggcggcggccgaccgccggttcgcgctggccggcgcgcacgccgcttacgcggcggctctccgttccgtcgccgacgcactcgacgtcttcgtcgcgcgccacaccgcgcctgcgccgatcctcatcacgctccccacccccagcagctcgccctcggcttcccccaagccaacgcaggttcaagtgcaggggcttccctctctcgccacgccgccgccgccgcctccgcaggagggggaggaagaagaggaggcgccggcatcaccgcccgccgaggaagatggggacggcggcgtgcagacgccggagatggagtgcccgtactactacgcacccccggcggtgacgccgccaccgccaccgctccctgcggcgtcgccggtcggcggctgggacttctttaacccgttctacgggacggaggaggtggctgcggccatcagcgacgaggagatgcgagcggtcagggagcgagagggcatccccgaactggaggaggcggaggaagaggagggggcgaaggcggcggcggcggcggaaaccaagcccccaaaggcacagccctctcttggacttggagtcttgacgccccaagaggaggctagagatgcgtgcgagatggcggggaacaacggcgggctggaggtggccgtggcgccgcaggggcgcgagctgctcgcagcgctcaaggaggtggaggagctcttcgcggccgccgccgaggcaggcaaggaggtgtctgccatgctcgaagcagccacgcgcgtccccgacctcaaagaaaactcgtcaaaaataatccacgccatcacatggcatcgctctccatcatctgtatcctcatcctacaggagcgagctgggagcgagctcgaatagtttgtcatggacagacaagagtgaaactaggagtgatatattcgaagactatggtggaatgaagtcaggaagtcactcacagactttagggagactgtatgcttgggagaagaaactttatgaagaagttaagatcaaatccgacaaacctatgagaagaaatgtgttcagctgaggaaccaagatgccaaaggttcagagctgcgttgtgctgaaaaaaccaggacaactgttagagacctgtacacaagaatctgggtttctctacgagcagcggaatccatatctgatagaatacaaaagttacgggacgaggaactgcagccacaactcgtcgagctgttgcagggctttacaaaatcttggaaaataatggtggactcgcatgaaacccagaggcagattatgttcgaggtgaattcatttacatgccctgcttatggcaaattctgcaacgatgcacagcgtcatgcaactctgaagttggaggttgagctgaggaactggagatcctgctttactagctatttcaatgctcagaaagcgtatatcgaggctcttgaaggatgggtatccaagtttgttctgaccgacaccatccggtactcgcgggggatctcgtcgattgctccagatagagctggtgctccaactctagttgtgatgtgccatgactggtacactacaatgtccaagtttccgagcaagcgggtctcgttcaccatgaggaattttctcaggagcgtgagggtgctatggctgaagcaaggagaggagcagcagcagaaaaggaaggtggacagcctggcaaaggagctggacaagaagctgaccgcctacaaaagggcagagaacaggatcataggcaccaagcttctggagcacagtcctgagacagacgccaagcagcgcatggagcacctgtcggagaagaaagaggtgctgaacctcctaaagaggaggatcgaggcagagaaagggaagcatcatgcgtgcatgcgggacacgcacgacgtcactctcaacgggttcaagatcggcctcgccagcatcttcgagtcgctggctgagttctcgaaggattcggtgaagctctacgaagacctcctaggccgagcccatggcaaggattcagagaaggctcacatagtggtggatgatggtaatctgcatgtgttaggacctagctagctgcattggcccagtttttgggcccctagaatctttgtctgattttagcgtgtagagagtaccatgttgtttggtttggttggttggttgcttgaaggtagtagggtcattcttgtgggcgacctgctgtgcttgtaattatccttttagcttgatatcggtggggattcgatctattgtggtgctgtgctgtgctgctgctcgttccatgtgactgtcaggtatgtatgtg

SEQ ID NO: 34607 - DNA, 1075 bp, Zea Mays
agtgcaggtttgcatcgcaagcagcagacacagggcactagggcagtcacacacacagcagtcgccagcctagcatttgcaagtaagatcgacagacaggtcggcacgatctgctgctgctcgatttgctgaagagaccggcggccacgatccagaagaacacaagtcatcggctacggacgggagtacagtacagtacaggaccaattaagtacagtacaagcggcatcgatcgcgcctgccagacaccggagcagcagttcgcgtcctccctccggccgtccgggcagagcgatttgccttgtcggctcgccgcgaaataaatgggcgtacacgtttgcgcgtgtcgtatcgtaccgtaccggcgtaccgcggcaacggcaagcttcgtgccgctagctgccggctgtctctagcgcgggccgccgctaaagaccctttgcgccagtggacagcaaacggaaccccccatctcccgtcccgtcctggacgaaacagacgccagccagatgcgcaggaacttaaaataaacaacgcgagcagagcagcgacgataaacaaaagccaaaggcgtccgctagatgtctggtggcctccgatcctgcacgacgacatccattcgcgctgccccaattaaccagccagacaccagctaacaagatccgtgcgtcagcatacatgcatataacgagaagctttaattaattaaagtgacatatactcgatctccatctacatcggatgattcgtccgtcgtccgtcgggtggcgatggcgatcgtgtcgtgcagtccaacaaggctcgaggccgaggtgggttaaactgccgtacgtcggccaaggccatggcttcctacgagaccttcaccggccggccgacccccccttcctggctcgttgcttgccgttaaagaaacccgcgcgcggtggccagccaatgcgagtgctcgcgggaggatttttcgtaggcccgtctgacgacgactgacagcgacccgcccggtgttaatgagagccgatcgacgctgcatatactaataatcttcgtgggcggggaccggagcagagtattctgc

SEQ ID NO: 34608 - DNA, 329 bp, Zea Mays
cgaatctagtctaattgattgggtctatatttcatactcctatttaaaagtcaaacgtttgatgtgacttaggctaaactttagcagaagcaaccaaacacacccttaaatacacgccgttcatgagaggtcagcagggcagtgcaataaattcgatgcgcagtgagtcagtggaggccctttcgcgaagaggaccctcgacgtggtgcacgaacccgaagccttggatcgcttcgataagaagggcctggagtatgtttttttcttaaagtgtaaagtgtgctgctgtggactttgctattcagtccaggtttttttgggtgcggccg

SEQ ID NO: 34609 - DNA, 3430 bp, Zea Mays
cggcagagagcacagtagccaagcgagtggaggagagttggagactcatcactggagagcatccgaagccgcccagtgctcgcacaaccgctcccgattcccaacccctccgtccgcccaaggggcgccgcaccatctccagcctccaggcctcgatccctaccggaccccgtggccctgctgtgttatctggctggagatccggccggagtggcattcctgctctcgcttattttcttcttgggagatggcatgactctgcaagtaagaaggcaagggcaagtgtgcttgcacagcgagctgcagaagaagcctatagagaggaaacgatggcgtgcccagacattattccgccaggcccttccttgagaactatgccctatttcaaacctgcgccttcgttaagacaggaataccatgagtgtgcaacttgccatgcccctgcaaagactcgttgctccagatgcaagtctgttagatactgctctgggaagtgtcaaatagtacactggaggcaaggacataaggaaacatgccaaaaatggcttggtagtggttctagcagctttggtggatctagcactgaggctactgaacagatgccgttcttggctaacttgaattcacctcttccaggtggtgacattcacttgcgtgacatgaacttcgatactttatcagaaccatcctttcccacaactgatggttacaatctagatactgacccatttccggcagatagaagcaacatgaatagatcaaatcaaggtattcatatgagcgaaaatggtgctgttggtgtatcttttgaaaagaataattataatgctgctgatgaaatacactcttcggagattttatctggaaacaaggtgtcaaacaactattttggttcagatgcaatgagtggtaatggggatgcaacttatcctgccaaaagtaatgcacagcagcctagcagttgtgctcctgacgtgagaaaacaatcaaaagcaagcatcacagtttatcagcctgacatgagtgtctatttaacttctgacatggtcagttcttgtgagggatcatatgtttctgccggtgagccactgcaaaggagcttgtcatctggaagaactattgggaaagtaactgtggtgaataaaaggccttcttacccatcaagtaaggtggtctcagcacaaaagtcacaggataaggtgtctacatcatatcaaaatgatgcccatgagaagaatccttgcaacaaaaatgaccaaagatctacccccacatgtgaatcaagtcaatcaacaagcagcaatctactgaagtctggaacatccaaggttgaagttttaaagaagccttcaaaatttctcaaaaccagccttgtggcattgatcaatgataataagaggaacaaggtattgttcccatatgaagatattgtcaagttttttcagtatgaagcacggggtgtttcccctagaggtcttttcaattgtggaaacagctgctatgctaatgctgttcttcaatgtctcatgtgcacaaagccactgatgatctaccttcttctgagattgcattctaaagattgttgttcaaaaaattggtgccttatgtgtgaacttgagcaatatgcttcaactttacgtgaaagtggtggacccttatctccaagtagaatcctttctaatctgaggaatattggatgtcgcttgggtggtggaactcaggaagatgcccatgagtttctaaggcatcttgtgatgtctatgcaagcagcttgcttggatgggctgggtggtgagaagcacgttgaaccaagtttgcaggaaacaacactgatacaacagatgtttggtggccgtcttaaatccaaggttaagtgcctcagatgctatcacgagtctgaaagatatgagaatataatggatcttactttggagattcatggctgggtagagtccttgcaagatgctttgacacagttcactgctcctgaagatttagatggtgataatatgtataaatgtggaaggtgttctgcctatgttaaagctaggaagcaactgagcgtgcatgaggtgccaaacattttaacagttgttcttaaaagatttcagtcaggaaaatatggcaagatcaacaaatgtgttactttccctgatatgttggacatggttcccttcgtgactgggtctggtgacaatccccctctttatttcttgtacgccgtggttgtacatgtcgatacagaaaatgcatcattctctgggcactatatatcatacgtcaaagatatgcagggtacatggttgagaattgatgattcagaggtccaggttgtatcagtgaatcaggttatgtcagaaggtgcatacatgcttttctacttgaggtcttttccccgaccaccaaggatatacatcgagaaggggctgccggttacatccgcaaagcggcacacgtcgaaatcttccaagggctctaaacacgatcgcaagcagacagagttactctttcctgcaaacgatcaggcatatggcgtctatgatttcagacccgatggcgaaggctatgcccaagatcagcatgcagagctgaggtccagagctttccatcacgccgacgatgcctttgcagactcggttagcgcggacttctcggaagcgacatcaagtgaatggtcgctgtttaccagctccgacgagtcctcgttcaccaccgagagcacaagggattcgttcagcgtcgtggactacggagacaacgccggcctggatccgatttcctccatattcgggccaagctatgctccggagcacggtgctcccggcagtttcgtctcgcgcacaaggttctcaccttccagtccacagacaaggtacttctcggagagcacaggctttgtctcggactcttccatgccggcccacccccacggcattgtacatagaggaaggtatccggatagtagggcgtgcgcctcttctgcggaaccgcttgcgtcggcggcgcatcagcggagcgggtatggccggtacccccttagtcgagatggttttgttcaaacatctggtttttgccaaatgtaatcggctcacatttcattagctgtagctggtgcatcggcagttgcggttcttagcactgccgttaatgctgcctcatgttcttttatttcagatgaggcttattgaatttttagctacatgtcgtttctaggggtagctcgattcgatgtagcgaaaaaaagttagattatgtctatatgcaggtgaaattttagagcatggtgacaagctctgtggcaaccgttttccaatgctaatctcgtaaccctggctgctgcttctggtcttagattaatgtatgtcccaagtgattattccccagcttgttactttctcggaacgttcatgcatttcttagagagaactta

SEQ ID NO: 34610 - DNA, 1936 bp, Zea Mays
tatacatactttaatagagtaaatacttatcagttatcggatcacggatacccatttctagtccccatcagaaaaaagctgaaacaagactcggcttccacctgtcaatcaaaaaaaaaaaactccacattggacagcatccaggccccactgtccaggcacccggatccagccctctctcccttctccacttccgtttccggattcttgcgtttccaagtccgatacaaaccagcgccgcgccgcgcgagcacgtcgggcgacgttgcggcaggcgagatccgagaacactcctccctcgcgcccccgcacccgcatggccgccgctggccgcagatagggaggcgcaggcgggggcgtgcagatccagatccggtgggcggcgaggacgagatcgccccctaccaccatggcgggcgccgtgtcggcgctcttcctgctggacattaagggccgcgtcctcgtctggcgcgactatcgtggtgatgtctccgcgctccaggccgagcgcttcttcaccaagctcctcgacaaggagggcgactcggaagtccactcgcctgtggtctacgacgacgccggcgtcacgtacatgttcatccagcacaacaatgtcttcctcctcaccgctgctcgccagaactgcaacgcggccagcatcctcctcttcctccaccgtgtcgtagatgtgtttaagcactacttcgaggaactggaagaggagtcgctcagagataacttcgtcgttgtgtatgagttgctggatgagatgatggatttcgggtacccacaatacacggaggcgaagatcctaagtgagttcatcaagacagatgcgtacaggatggaggtcacacagcgtccacccatggccgtgacaaatgctgtgtcatggaggagcgaggggatccgttacaagaagaatgaagtcttcttggatgtagtagagagtgttaacattctagttaacagcaatgggcagattgtgagatcagatgtggttggggcactgaagatgcgaacatatttgagtggaatgcctgagtgcaaactcggcttgaatgatagggttcttttggaggctcaaggcagagcaactaaaggaaaagcgatagaccttgatgatatcaaatttcatcagtgtgtacgtttagctagattcgagaatgatagaactatatcgttcatacctcctgatggatcttttgatctaatgacatacaggcttagcactcaggtaaaacctcttatctgggtcgaagcacagattgagaaacattctagaagccgtatagaactcatggtgaaggcaaggagtcagttcaaggaaagaagcacagcaacaaatgttgaaattgaagtgcctgttccttcagatgccacaaacccaaatataagaacttcaatgggttctgctgcatatgctcctgagagagatgcaatggtctggaaagtaaaatcattccctggtggcaaggaatacatgtgcagagcagaatttagtcttcctagcataacagcggaagaaggggccccagaaaagaaggcaccaatacgagtgaaatttgagataccatatttcaccgtatcaggtattcaggtccgttatctgaagataattgaaaagagtggttaccaggcactcccctgggttagatatatcacgatggctggcgaatatgagctgagacttatatgagttttctcttttctggctgatggaagacatttatgaagctgcaagatacatatttgctcgagacagcaaccgtatgacatttgaatgttagcctggacgtcttctgccgaccacacaaggttgaaacaattgtgccctttactgtaaatgtcgtcgtcttgtatccaggcaaaagaaaggaaacctaccgagacctattatgacatcaataatttcaacttttttttgtttcaatta

SEQ ID NO: 34611 - DNA, 4055 bp, Zea Mays
cgccacgttagcaaccagcgcgtctgccacaggtcgtggctcgcttctcccctgcttttccgcatcgccgcagcgccgacgacgactgggtgcgcagcgcggcgccgccgttctacgccgggcgcccaagtcctcgacgggaccttctctggcgacgagcgccccaccagaggccgaaccctgaagctcgtgagaggatgctttcgctaaggtcttctgcctgtaaaattcaaggcccagagcgtcttcaggctccgttgatcgagaaggcctggcgttccctatgcaacactcaggctgcctgcaagagctatttaagacctggtttatctgcaaaagcgagagactgtgatagaggtcatgctcgtacctatggagaaggctcatacaacaccaacaaaatgtctactgtgccaggaaacaggattctttccatggaaagcacaggccaacccagtgaaagagtttctctgcagaacaacagcagccatcaaacagttggcatctgctcctctatgagaagtcaccagaacaaccatgttgtgcaggaagatatgagagcaacaaatcaatacaattttgcaagaacaaacgctgcattacaccaatctatggctgctgataacatgtgctcttatgataaatttgatgccatggatgatgatattctagcgactattgacgtggaccaaatagttatggaacattatcaagcaacaaatgcacccagaggatcagcatcccataacatgtcaactccaccaggaaacaagtgtagcgtcaatggcatggatgaggctaatttaccacgagaactatctgaattatgtaaccatcaatgcaagctagctttttgcagagaggcaatgactcatctgcaggagatgaaggatgagctgcttgcagtagccaatgagcttcttgatgatgatggtgaactcaatcctcaacattcacaagaacttcataaaagacgattgcatcttaaaaaactggttcagctacttgaggaccatatgacaaggtcagcccaagatgaggagagacaaatatcacactctatggcatccacaacatctacacagcagcatctgccacctatgaccccaggaagcacttttacaatggatagcaatagattccaatctcaggtttacgttggaaatggacctagggatagtgatttatgctattctcctgccccatattcctgttcagataatttaagcacaccattaaattctgtatggaagagctataccccaaaggttatcgatattaactacactgaaggatctggtgatagaaagtggagtagtacaaatttcccatggactaaggaacttgaggccaagaacagaaataagtttggaaaccattctttccgccccaaccaacgagaaataatcaatgccacaatgagtgggcatgatgtttttgttttgatgccaactggtggtgggaaaagtttgacatatcagcttccagcacttataagttctggcttaacattagtagtttgccctcttgtctcactgatccaagaccagatcatgcacttgtcacaggctaatattcctgcaacttatttgagtggcaacttggactggtctgaacagcaagagataatgaaagatttaatgtcatgccgctacaagttgctatacgtcactccagagaaaatagctaagagtggtgctttatcgagactattggacaatttaaattcacaagggcacctttctagaattgttattgatgaagctcattgtgtaagccagtggggtcatgacttccgtcctgattacaagagcttaggtgttctaaaacaaaacttccccaagacaccagtcctggccttgactgcaacagcaactgctagggttaaggaagatgtcgtgcaagctttagcccttgaaaactgcattgttttcaaacaaagttttaatcgtgcaaatctgaggtactacttaagacccaagacaaagaaatgcgttgaggacattgatttatttatccgcacaaatcattctaaagaatgtggcattatatattgcctttcaagaatggattgtgaaaaagtggcagaaaaactaagggactgtgggcacaaagtatcacactaccatggtagcatggatcctatggatagaacacatatacagaagctttggagcaaggataagatcaacataatctgtgctacagttgcatttgggatgggtatcaataaacctgatgttcgctttgttattcatcattcactgcccaagtcaattgaaggatatcatcaggagtgtggacgtgcgggtagagatgggcaaccttcatcttgtgtgctatattaccagtattctgactatattcgggtccgacatatgattacacaaggagttacggagcaaacaggagcaccacgtgatttatcttcacatgagcaagcactgaagacacataaggacaatctcctgaggatggtcagttactgtgaaaatgacgtggactgcagacgcctacttcaactgatccactttggagagaagtttgacccttcgctttgtgcaagaacatgtgataattgcttgaaagagtcaggatgggtcgaaaaagatgttaccaacattgccaggcaattggttgagctagtcacaaggacagggcactcacattcatctacttacattcttgaagtttacagagggtctatgagccaaaatgtcaagaagcagcgtcatgatgctttagctcttcatggagctgggaggcatctagctaaaggtgaggcagcaaggataatgcgacatttagtaactgaggaaatacttaatgaggatgtgaaaaagagcgatatgtatggatcaatatcatctgtcctcaaggtaaatcatttgaaagctagtggtcttctctctggcaagcacaacatcgtcctgaagtttcctgcttctgacaaggcctccaagatgaggaatcttgatgcctcgttgcttccgcaaaccaacaagaatgttcagcagcaaagtgaagtcgatgtgaagcttgcatcaatgctctatgaagctttacttagccttagagaacagataatggaggagtgtaacgaaggattcaatgcgtatcacatattcaaaacagacacgttgaaggaaatgagtatccgagtaccgagaacaaaagaagagcttttggatataaacggcctcggcaagacaaaggtcaagaagtacggggaccgcttgcttgcaaccatcgaggacttcctcagcaaacacccaaatccaaggagaaacagcggcggaggtggcggcggcaacgagcactccgatgcggcaaagaagcgaaggggctccaccgccatctctgcagcgagttacggcgactatgacttcgacgaacgcacgggccagcagtccaagaagcgcgcggccaagacgcgaactgtctctgcccacggcccccgctgcacggacgccgatctcgatgggcctgaggtggtggaggtggacggcgagctgcgcagcgtccggaagcccgtggcgtatggcaatggcagggttcttcccaagtgggcacccctctaacttattccaggaatttgggtacgtcaagtagagtagagtaccgctagggaataggaatgtaggcttgcacatatgtaatctcccaggttggctcgtgcacatgcagcgatgcagtgatgtcaagggttttctgtgatgcagttgtacattggaactgtggcgtcgaatgtacgtccagctggtacacgcgtcaaggacatacgagaccaggagcaagagttccgttgcttgcttccgtgggcagcatcgcgatcgcagtgtcggccacctgttgcccgaaacatcttggatgcaggtacatcttcgcacgcgtgtaccatcaagcgaccaaacttgaattaacatcatcgccatcatcatccgatggctactgtagtaatgtatgcatgtatgctgacgttggactgaccttaaacatttctcttgcatccagttgtcctaggctgtatataggtctagcaagtcttaagggtc

SEQ ID NO: 34612 - DNA, 2912 bp, Zea Mays
cccatccctccctgatctctcccatccccttctcctgggctggctggccagtgacggaccagccctctcccacctcgcacgcccctgtggctcctgaccttcccaccaccggagttaatgccgcctggcctggccgtctcgctggcgcggcgtgggacgtggtagcagtaccgcgcgtcgcggttgggccaatgggacgggcgtaagtgcgtaagcgaggacgcgaggtgaggtgtggagattgaggggtgggagctgttgtggcgcgtgtctccctgtcgcccgcagcttctttttattcctcccgtccggttccgttccggggaattgattctggggagccggcgcggccgcggctgctttgatcccttgccgcctgcctggcctgggctctcgtaccgcaaccgcaatttggcggcgtgcgtgttccttgcctagattggcgtgatccagctctgctccaaccgtagaagtgcgcgcacttgctgctagctaagaagcatctgcagtgatcgttccaggctcgtgaggaaactcatttgctcgaatcatgtccgactttgtcgggagcagatataccaagcaagaagatttccatgttttgttgagcaagaaagatcctggagaaccacctgaacataagcacgtcctgtggatggcacactggaccaaagcaagcagcaacaatggcagcagcaatcctttggagggtaccaccaagggcactactacgaaagatagcgagaccttgccttatgaattcacggaatctacggttgctaaaaggctcatggtaggagtaagccatggaagcgcctccatgcagcatgaccgacaattcaattctagtgtgtggggtatggcacgccatatttccaacgaattgggaccgaagaatagtgaacatgttgatgggtcttttgaaaaatttgtgaagaaggatgctgtgaacttgagagcaagggcagttgtgtcagaaacatactctgttcacaagctttcagagttaccgttggattttcagcaccttgggaactccgacgatccaagtccagattggagccactttccaatgttcgaaattaatcgaaagattgacagtattctcaaccgcaaacgaagaaggctttgcatctcacttagaagatcctgctggcctcaattcagatccttcagggccaaagttaaaaggacagttattggataccgtgtcatgttcttgcagcaaggacgacaccaattcagcagattgtctaatagacgagcagcatacaagccactattttgcaaactcaaagcatgaactgccctctgtatctaacgaaaagaagttcaagtttgcaggaaacaaccacaatcgaattcttgcaagtgcgtcccataaacatgaaagtgttgcagaggcaatgttctgtgcaccagtacttggtagtgagcttcagaatgaacctataactatttccaacatcggcaagaaggatggtgaaaacttccatgagatgtataattgtaatagcaaggctgttccttgttctttgttagctcatgagcaccatcgtcatctgaaaacacagagaacggaatctgcaggaaatttgaaagtctgcacgttacctgatcaacaaactgcaaatgaattggcagacaagagtaatggtgacctgctgacatatggaccaaagccaaagaagggctcttgcaaccgaagaagcctctatttattcgaaaagttaacgattccttccaaatcacaaagtgcatatcctaaaaattctgcgtcttcaggaaaatctagcggctttggagtttgtatgtacggcaccaatattggaagccagttattcggagcacagaatcaatcttcatctaagactgaaacattgcacagcgatgctcttattgggtccaaatcctcagcaggacaacggttgcccagccccagccccagccccagccccagacgaagcgaaaagcgagcagctagcagctccgtcgtccaacaccaagcagggaggagaatcagcatacagtaaagaagatggatctcataatctcaacgaaggccacgatgtttcgtccaaagcagctatcggtagcaagcaaccatgcatgcctggagcaggaatcacgaacctggatctcatactctcccagatgagcaggatgagaaaccagattcccagtggcggtgtaactcagccaccaataggcgccgagccaagtgatagatggctcaagcgcctgcagctcggcgtaccagaccctgacgtccttggttccaagaccaagaggccaaaagtcggagacagtcctccgccacccaggcaaataaaccggtcctttgacgtggcactcccttgcaacccaggaaaacaggaggagcagagcttgaatggaggggggaaagtgcagggaagagcccccccgattccagagaagagcgtcaatcgctggatagggagatggtgccagggcggcactcctgttttccgtgaaggcccaggccagggaaggcaggcaacgaaacctgctggccggttgtccgaggagcttgaaggacagttctttccaagcactgcggcgatggcgatgatggggcgcgcgatgcacaagctccggccgtgcgagcagcagcagaaggggccattcgtggtgtggaagatagattgacctttttgggtgtgatatacttgtttctttaaaaaaaataaaatgtaaggcaactatgcattttgcctggctgtggctcatggtttattgctttctggtagtggaagtagctaggtgtagtgcctactgattgtgtaatgctttgctgtaccaaaagtgtaatactatactgtttactgtgtcgttcgttatggtgatgtacaccatggagtaatcgaatgggacagacgaatgaactggaa

SEQ ID NO: 34613 - DNA, 2349 bp, Zea Mays
aaataaatttccacaaccgaaacctgcagtcgggtcatctcgtccacgaaacgtacggacttcgggcatcggccccaacgccagcggcaccgcacccgcaccaccaagctcgtcggcgacatgaatccgcccgcagcagccgcgtccaccggcgcaggaggccacgccgcggcgcctgcggcagccccggagtacgcgcactacccgaggctctcgccagaggaggtggccccgcccccgcccccgccttatcacgccgccaccgccgcgccgtccgcctacggaggcaacccctacatctactcccccgccggcggcgccgccacctccccgaagaatacgatggactccgtgaaggacgtgctcggcaagatgggaaagaggtttggcgaggcggcccgcaagaccgagaccatcaccggcaatttctggcagcactgtgagcttttcgatttcgttgccgtattttcacgaaatcgggttccgaagttgtttctgtgtgtttttcatcaatttgctaatcgtgttgtgcattttcatgtacattttgttattgtaatatgaaattaggttgtcgtcaagctgttacttagccacaaccacaatgaaattgaactagaatcccatcttcatgggctcagacaaaaagaggggcaactaatttaatcgacacagaattcagcttatttcattggcgtgcactaaattcggcatttctggtgggcattgacagggattaggattcattatgctgcttcttttataactataaaagttttattccatatatttcactatattgatgatgtttgatgtggcttttctaggtaccatgtatctagacacagtgtatatctaagcacatagaaaaatctatgtgtagccttgtttctttaagtcaaatgggaatgggagcactagattatagccttgtttcgttaagtccatacaatgtggagaaactgatcaggtcttcctgattctttaaacagtgaaaactggaccaagcattactgatgcagcaatgagcaggatctcacaggtcaccaaagtcattgcagaaggtggatatgacaaaattttccatcaaacttttgaggtcgcccctggtgaaaagctcaagaagccatatgcatgttatctgtcaacctcggctggtcctgttatgggtgtgctttacctgtccaatgtaaaactggcattttgtagtgataacccacttgcataccaggttggagacaaaactgagtggagttactacaaggtggtcatcccccttgctcaactgcgatcaattaattcatcaacaagcagaacaaatgcagcagagaaatacattcaggtggtttctgttgataaccatgagttttggtttatgggcttcgtttactatgacagtgcggtgaagaatctgcaggaagcacttcaggaggctcagaatttacgtgcttagtgatgttcatggattggaactagcatgtcttatacattacagttgtgatatactgttttcccgtcagtttcgactgtttgtccagatttagtttgcgtaggtatcagctgtttctgtgttttgtactgacttaaaccgatgttcaatatgtgacgtgcatcctttcatggttgttctctgctatgatgagcccatttgcttcgagcagtaacaatgggtgtgcttcttctgagttttaaatccgaccacagtaagattggcgaagtggaacgcacttcacaaatcaattcggatttgggattgtgatatggattcaaattattgatttatccatgctcagtgatttctataggtcttgagcagcgcgtgtttgtatacttcgtgctttgacaaatcccagtttagttggccccgctttaaggtttacactgacttgggggctggtcaggcaaccatttacaactttaggttatttgtgtctgacaattcctctgactgacctgtgcagattttcgaactgtgacagtgcatcttgatcccgtcgtgtctgccctgtgcagcctggtgcccaggatgtgttatttgggcatattttgcttcatgtagtaacagttaactcacaaacatcagtggaaatatctgaacgagtagcttatccataactccttgtttttcagctacatcctgtatccatgcatgatccctttacctaccagcgtttgctttgacaaagataaacttgtggctgtggtcaacattcactattttaaaactaaggctagtttggcagcccaaaaagccacagattttccggcctttttcctggaaagaaagcccacacggatacttttcttgcgtttattcatctgcctgtttagaagcccatcatccgacgg

SEQ ID NO: 34614 - DNA, 2988 bp, Zea Mays
cagcccaactctctcgcagccaatcccgccgctccgccgcccgcacccaatccgtttctctcacccccgccactcgccagcaacgcggacacgccctccgccgctcttcctctgcaccccagtcctctcccacaaccacttccggcggccacgccctcggcttctccgtacttgctgctcgcccgtcccaccaccataattttccaccagcgattgtaaatttgtgggaggcacattcgccgaggatggctgtaaccctacttcgagggatgagaacgccgataccattcagatcgaactccggcttcttctccactgtcctacggcctcggttgtcccgcttcacgactagggcggagagtgcgcaggccacagaacccaaagcggcgcccaggtcaattcagctggcgaccaaggaggcggctgagcagaaaacacaaggcttcgaagccatcatcgggattgagacccatgtccagctctcgaccgtcacgaaggcgttctgctcctgcccttacagctatggttcccagcccaacagcactatctgccccacctgcatgggccacccggggacgctgccggttctgaatgagaaggtggtcgagtgcgccgtgaagctggggctcgccctcaactgcgagatctcaatgacgtccaagtttgatcgcaagcagtatttctacccggacctccccaaggggtaccagatttcccagtttgacatccccattgccaagaagggttgtgtcgatttggaccttccagtggagtttggtggtgggcataggaaatttggggtcacaagggttcacatggaagaagatgctggcaagctgcttcattctgaatccagcagctactctcaggtcttccttgtctactaatgattgcttaatttctgtgtactactgtaagatattgtgatattcggatctgcttgtcatgtctttctggcataacagtttcgtaaccacaagatcagttttgacatttaccacggtgcattagaaaacttatagattagtgaatagaaccctagaaaaatattaaagattgtatatcagggaccttaagtgggcatttggatctgaggcaagggggatcctagctttacagcgaaaggattgaagttttataggacatcaaaattcaaaagacttattttggggcaatataatctgcaatcacgagcaaaagcttgctctgtgaagagagccaaatcagtttggcaccaaaagaaaagtagcgctgcagtgaaaaaaaagtctggcaactgctattcagaattatggccaaacattaatccttttctattgctggttgtagaacagatgggggagctaggggaaatccagagggaatgaaaagaattacacagcgtctcatcacataaaagtacagcagcttcagttattgatcagtggttgctactttggctggttaggttgacctaaacagggctggcgtacctttgctcgaaattgtctcagagccagacatgagaacagggatagaagctgctgagtatggtgctgaactgcaaaggattgttaggtacctgggagtgagtaatggtaatatgcaagaaggttcccttcgttgtgatgtgaacgtttctgttcgaccagttggacaatcagaatttggtacaaaggtggaaataaagaatatgaactcattttctgcgataaatagggcaatcgattatgagatctcccggcagattctgctccataaagaaggccaggctgatcaaattgtacaagaaacccgcctgtgggatgaatcttctcagaaaacttttacaatgcgaaaaaaggagggacttgccgactatagatattttccagaacctgatcttcctgaagtagttatcactagtgactatattaatgaaatcagcaagtcaatgccggagcttccagaagcaaagcgtaggcgttatgagaatatgggactcagcatgcaagatgttctgttccttgctaatgatgataatattggtcatttctttgattctactcttgagcatggtgctgatgcaaagctggctgccaactggatcatgggtgacatcgctgcttatctcaaagatgaaaaagtatccattgatgaaattaaattaacacctctagagctttctgaactgatagcatcaattaagaatggaactataagtgggaagatcggcaaggagatactggccgagctcattgccaaaggcggaacagttaaggctgtgatagaagagaaagatttggttcagatagcagatccagcagcaattgaggcaatggtagataaagtaattgctgataatccaaagcaacttgagcagtaccgtgctggaaaaactaagctacaaggattttttgctggccaggtgatgaaagcatcgaaggggaaggccaacccagttttgttgaataaaattcttggagagaagctaaatgccaaataattatttttacccccatactgaatctcaggcgtccatgaagaatgggacttcaaattcatagaatgagattaatgtgaacgacgtagaagttttgtccacaatacagatattattgtactaagctgatactttaaaagggcgtgttcattatattttatgcgatagcttgccctaatcatttgtgcagtttccatggattgtgtactgacttcgctgtttattttttttcgctctctgcaacccacaatatttataacaattttcattaaaccaaaaatgtattctctgttctaaactataattcgttttagactaaatatacattcattaattaatacaataatttgtatgaacgtctacattcattatcaattatggggaaaaaaaaactagaaaggactatattttggggaggaattattgaacagcagcaatgacctgacctataagaaagagtgtttggtttgaagaatttgaagaataagttagtctattatctacttatctcttactttttaatttcg

SEQ ID NO: 34615 - DNA, 1959 bp, Zea Mays
ctggatagttttgcccctgaccaaaagtgtcgacgctcatctgctcgtgggtgaaatcacctggccctgtctctattttctcatcctctcgtccgactcatcttgtactgcggcggtggcgcccggcttccctcgacgaactccaccgacggcgaccggctccctcgtcctccaccggtcgcgcccggccctctacctccatcgatcgcgcccgaccctctgcctccaccgtcgtcgctcgctcaggttttgcacttggattacttgaacaaatcagacaagaagtggctagatagaatacaactggaatgattctatgtacggctttgacgatgatctttcattgcttgctatctgtacagatgcatgcaaagggttagaaaatgcaataaagcttgttttccctcaggttgaccaaagagaatgatttaggcatctcatgcataattttgtgaaaaggtttggaggtgacatatcctctaagatgtaccctacacctagggcatataggccagaagtttcatagtactttttcaatcaagttgtagaagcctcccaagatgtaaagaaatggctagatgcttaccacaagctgaattggaggaggagtcagtttaaccctaccatcaagtgtgattatgtcaccaacaatctagctgaagtattcaacaactggattaaagattggaatgaccttcctgttgcggagcttgcagacaagtgtagcgagatgataatggtgttgtgggaaacggaggagacatgggggaaagcttactggcaagatcttacctgctgttttgcagcagttgaaagcaaggactagaggcctaggacatctataagtgacaaaggcagttgaggacagcacaaacattcataataggcatgtggtgaagtcatatttgcattagtgtacataccttgagtggcagcacactgacaaaccttgcccacatgcattggccttgattacagcagaaggattttgtgcatgaatactactcagtccaaaggttcaaaaaagtatacaagagaataattaaaccactaccaaataggtctcaatggccacaagtggaacaaccctatgtggttggtgcaccacttgacaagataggaagaggaaggtataaaaaaactaagaattaagagttgtttggaaggtgggaacaacaaaggaaaaaggtagctaaagaaaaaggcaaggaaactcacaaggatgcagtcctagaggctgacatggaggctacaaaccaatctaagaagggaaaaaagaagatgatgtgaggcaaaagaaagtgcaaaagatgtggagagttaaatcatagcgaaactagctacaagtgcccgttaaatggaacaaagaaaagaaagagaaggcctcacattaataaaacaaagtatggggagaataccaagatccccaaaagccgacttgaagaaggtgtccaaggtgaaggtgttatccaaggtgaagctgttgtctaagatcatggtgttgtccaaattgaagctgttgttcaagttggtccaagtggaagtttctcttccagtgcaaagcccaattatacgaacaagggagtctattttacaggacaacttgataagtcagcttgctatgctactaggagatggttagattgaaatccagtcacctcctaataatacaactcctaagaagtttctagtgaagaagctcacagcaagctgaagagaacgtgacaagattctaagaaactactgttttatgtgttacccaagatttaaataagctagtgttagaagtgaacattttatgctatcagatgaactatatttggatagagatagtagttattttgatgtgtgatgttatcttaaacaagtgtcaggtttggatgtgttttgttatctgaaacaaatgttcagaagctgaaaatgttgtctctattagtgtacacatgttaccagtttctg

SEQ ID NO: 34616 - DNA, 1918 bp, Zea Mays
cccgatccagagcattccccagtcctcaccccacgtccccacccttgtcgccctttcgcttccgtctcgtttggacctccatccgcggccgccgccgccgcgctgagtttgggccgggctctgttaatctgggcgactttgattttctctgctcccgctgccacggccgtcaggagtgaagcgatgctggagaaagaccggatatcctacttctacgacggagatgttggcaatgtctactttgggccaaatcaccccatgaagccacatcgtctctgtatgacacatcaccttgttctttcatatggacttcatcaaaagatggagatatatagaccacacaaagcatatccaatagagcttgcccaattccattctgctgattatgtggaattcttgcaccggataactcctgattcccagcacctatatgcaagtgaactaactagatgtatggatgctggagttttctctttccaaactattcttcaggactgctaatttcacaatgaaatacatgccatacaatcttggagaagactgtccggtctttgataatttgtttgagttctgccaaatctatgcgggaggaactttagatgctgctcgcagattaaatcataaaatatgtgacattgccattaattgggctggtgggctacatcatgccaaaaagtgtgaggcttcaggcttctgttacattaatgatctagtattaggaattctggagcttctcaagtaccatgccagggttctttatattgacattgatgtccatcatggagatggagttgaagaagccttttatttcactgacagggtaatgactgtgagtttccacaagtatggtgacctgttctttcctggaacaggtgatattaaagatataggagaaagggaaggaaaatattatgccatcaacattccacttaaagatgggatagatgacactagctttactcggctttttaaaacaattattgccaaagttgttgagacatatctgcctggtgctattgttcttcaatgtggggctgattcattggcgagggatcgtttaggctgcttcaatctctctattgaaggtcatgctgaatgtgtaaagtttgtcaagaaattcaatattccccttctggtaactggaggtggtggatacaccaaggagaatgtagcacggtgttgggctgttgaaactggggtccttttagacacagaactcccaaatgagattccaaaaaatgaatatattgagtactttgctccagattatacattgaaagttccaaatttgaacatggacaatttgaacagtaagacctatctcagttcaatcaaagtgcaagtgatggagagtttgcggtacatacagcatgctcctggtgttcaaatgcaagaggttcctcccgatttttatatcccggactttgatgaagatgaattggatcctgatgaacgtgttgaccagcacactcaagacaagcagattcaccgtgatgatgagtactatgaaggtgacaatgacaacgatcacgacgacggcacacgctaatctgcttcttctgaggccctggtgtaaatggaaacctgagattcttcactgttgtgtgtagttcagcagccttgagatgtaatagtttgtcagttgacagcagggatctaatttagcaggtcaaagtggtttagacttttataagggattctgacccctcctgaattacacattgtagtacaagtctgcatatttttaagcatgcaaaaattcaaatttctcagtggtattagtatctcaagaaaatacaaattcctcgctcagtaacattgctgatatgtggtgaatttgattatatctagaaccccaaggcctagtttgagtattctagtattgaccttaatctacatgtattgaactggattggat

SEQ ID NO: 34617 - DNA, 2274 bp, Zea Mays
tttctctcgagcaatcctcttcccaaaagtctcgagaagcttgagcaggttctaatgcttggcctagaaaagggacttccaatggtgctgcctaatccagaattccagattatgtcactgtcgaagcttgagatcttcgtgtcatgtctgggtttggaggctcgtcggcaaccggacaggaaaacagcaaggcggaagggcattgctcgatcgctggtccgatgagtggcactgtcagggagcgtgacaggggcgacaaatctagacctccacgtcggtaagatgttgtggcaaaatgtcagtgagctcacattttgaggagctgagggtcaatgtcagcgagctcactgttgaggagctgagggtccctgagtacctgcagttcaaggaacaacttatggaagaaggctttaaggttgaggctgggagaacttaccatcggacagttctagagatacttgaccaattggaaaaaatttggcttacattgatggatgaatatgatttatatgaagttcctggtatctatcggcttcatggtatatctctactactcttaagaagataccagataataacaaggcaaatagatggttactgtggcagtcaaaagtttgaagccagatgcgcttcaaggatgatcaaaggttacttgtatatgaatttcatggcacggggaagtcttgaaaatcatcttttcagaaggactcttcccctaccttggtccaacaggatgaagattgctctaggtgccgcgaaaggactagccttcctccatggaggtcccaaacctgttatttacaaggattttaagacattgaatgttcttcttgatgtggagtacaacgcaaaactatctgatttcggtttagcaaaagctggtcatcagggtgaaaaaactcatgtatctactcgggttgttggcacctatggttatgttgcaccagagtatgtaatgacaggtatcagggataaacttttgacttcagtagctacctatagcagaaattatgtaccttgtttatctgttgcatgttggttctttacactgttttctgagcttgtagttattctcgtgttcactccatattggatagtaaattggcttaacatttttgtccgaagacataaaactaaggtgccattacaaatgttcttctttcaagtgaaactgtgtttttcgtttttacatgcagtaaaggttgtaaggctgtagacttatataatgaatcttgcgctccacttctttgggacatgatttaacatttcttaacatttctcactctataacgctttcagatcacttttcatatgttttttagatgcactttttttttggagactaagccctaagggcaacaatggagatgaccagcgtcttggtttatcaagaggaagttaatccctctcaactgaaactcccatcaaatttggggcgtagtgtgtcgattcagttgtaactattatatgtcattttgggttagcaaactgtatctactaatttctcagacttatgccttttgagctagaaacttgtgtaagaattttttgcactcagtgacatgctggatagtgcgagtagcagattacaatagtgacggatgaacattgtattttactttacatgatggatttttttgatgtgtaaggcttttaaggcatgtaaaaattcttaacttttaaaagatgctaacacgaatataaaattgcaatcattattcttgaatttcaatgtatcttatcataacatgttcactccgtagcaacgtacgggcatttacctagtatatatatatatacgcacgtggtgcagtcgaagttgagggtgagcgggaacggcagcggcgcgccgcactgcgcggggaggtcgcggatggcgtcggcgttgagcggctggtaattggccgccgcctgcttgacgcactcgcacgcctgccgccgctccgccgggccggacggcatggccctgatccgcttcacgccggcgcagcactcggcggccggggccgcctccttgcccgtcacgtagccgacgcaggggcgcaggcttgcgtccacgtccgcgcagttcacgtccgccctaaccgccgccgccgccagcaggaccaacgccactgctgccaccgctgttgttgcggcgccgcccttcttcttcatcatcgccatcgatcgatctgtgtctctctctctcccgaacttgacttgctgctgctggagctcgatcttagcttgttgctgctgcgttcatggagcggctcgagcgctggggtttta

SEQ ID NO: 34618 - DNA, 1161 bp, Zea Mays
ggccactccaccatcatcagcaattcagggagcccgccggcccgccccgccccgcctcgttacccgcccacccaccgctgcttctgcccgactgctccatggaggggaccacgcaacccaccgcgggggcgcgggaaaagctgctccccacctccgccgccgcctctctgccgccctacctcgacccgcaccccgccgactcctcctcctacgcggtcctcctcgtccccgtccgccgccgcctgcgccgcggcggccgctgcatcgccccctgcctcaccgccctcctcctcgcgctcgcgggcttcctcctctggccggccgacccggacatctccctcgcccgcttccacctggggcacgtctccgtcgtggcgcgccccgccgtcgccgtcaccatatccgccgcgctcaaggtccgcgtccgcaacccggacctcttcgcgctcgactacacccgcctcgacgtcgccatcggctaccgcggcaagccgcttggcctggtaacgtccggcggcggacgggtccaggcgcgcgctgtctcgtacgtcgacgccaacctgcagctcgacggcatacgcgtcgtcgaggacgcgatctacctgctcaaggacctcgcgcggggatccgtgccctttgacgccctcgccgaggtcgagggtcaccttcacttcttcttcctcagtatcccggtcaaggtccatacgatgtctaatgcattatagagagaaaccaatacaggacggtgcagcacaaaaattgtgaggaaagaagatctacacaatcttcttgcattgatctagataccattcatctgtcagacatggggagaatatcttgcgtggttcatgttaatccacacaaccaaactatagtacatcaggactgctaccccgagtgaaatgcttacggcgtggaaggatgtgtgctatcttgcctcgcgaatgaatcgtttggttcgtttctaagcttcgcttggagccgttgtaaaagtaagaaacaactaaactctactggataatgtgcctattgtaaagccgttaacacgtcatgttaatatcaatcagtttccctacaatgagaaaattgatatttcgcattggtgttacgtacggtgatgtttgagttcactgcagagtctgcgatatttgtcacacggag

SEQ ID NO: 34619 - DNA, 1630 bp, Zea Mays
cgggcgcacacgggcacacggcggttaggggccgcggggtacaagtgtaaaccaggagtgggggctttcgccgcgcgcgcatggtgctccgcgaaagccgagcggccggacaagtgaagcgcggccacgatcgaccggccccggccccccatcgtcgcatcccatccatcccatttcccccacgagccctaggcgcgtccacggcggcacggaaccggagatggaggagagcgacgcggcggagggggtggcggtgcagctgatcgacggcgagggcgagttcgcggccgagggggcggagcggttcatggcggccgccggcgtcgccgggtgcgggctctcctacgccgtcgtctccatcatggggccacagagcagcggaaagagtaccttgttgaatcaattatttggtaccaattttagggagatggatgcattcagaggaaggagtcaaactactaaaggtatctggatagcacgctgtgttggtgttgagccttgtactgttgtattggatcttgagggtaccgatggaagagagagaggagaggatgacactgcatttgagaagcaaagttcgttatttgctcttgcaatttcagatatagttctaattaacatgtggtgccatgatattggccgtgagcaagctgccaataaaccactcctaaagacagtatttcagactccacttgaacatctagaaccagttctaagggaggatatacaaaagatatggaactctgttgccaagccagaggcacacaaagacacccctatcaatgaattcttcaatgtgcaagttactgcattgtccagttttgaggaaaaagaggaccagtttagggaacaggttcaacaacttaggcagagattttcaaattcaattgcaccaggaggtcttgcaggtgatagaagaggagtagttcctgcttcaggttttttgtttagttcacaacagatttggaaagttatccgagagaacaaggatcttgatcttcctgctcacaaggtaatggttgctacagttcgatgtgatgaaattgcaaacgagaagtttggatgcataacctcagacacagaatggttggatgtggagagtgctgtccaatctggtccagtacctggttttggaaaaaaacttggcaatatcgtcgacgttcacttgcaagagtatgacaaagaagctgtctattttgatgaagctgtaaggaaaggaaaacgacagcatttggagtccagaatactgaatcttgtccaacctgcattccagaaaatgttgactcatctgcgtgtgaaggctctagaaaaatttaaaactggtcttaattcatctttggagagtggaaaaggattcgcagtatctgctcgagacaatactgaatgctctctcaaagaatttgaacaaggctgtgcagatgctataatcaagcaagcgaactgggactgctctaaaatgctagagaaagttcggcgtgatattgaagatcatgcactttcaattcgtgaaagcaagctatccgaaatgacaagacacgctaaggttatgtatggcaagctgaaagagattttaatcactagcttagcaatgcataattttcttctagatttatttgcatatctgatatta

SEQ ID NO: 34620 - DNA, 2446 bp, Zea Mays
ctcaaagcccgcctccggtttccgtcccccatcctcctccgccccccagccgccgcatccaatggagtcctcgctcctcctctctaccccgcgcccgctcaagcccttccatccgcatcacttccccaccgctcgtcgtcgcgacgcgtccttccgcgggaagccccctccgccgccgcccctgccaccgctcggacgcggcagccgccggttgggtcgggcggtgccgcgcgcctcgagcgaggcgttcggcgacggattccgcagccaggacaggcctcccggggttagcagcgggggtgttcgccggaggacctaccgcgaggcgcagggcgaggcggccgtgccacccgtggccgcggccgcgagagcagtcgcgccctacgtcgccccggtcggggcagtactcatgctgagctttgtcatatggaaggtggttcagaatatgattccagggaagaaaaaggatcatggttctggaaaacatgcgccttctggtatcatgtggtccttcgctgctggctccaatttggcaacatctaccctcagtgctgaaaaggagtcgcggaaaaatctgaacaagttctacaaagaacttcgaactttgaaaactgttaacatggctggtaactcaagggactaaagtttgaatacattgtctggaaatgttgggctaaagctccaacattgtgagtgataactacatctcaatttgcttgacaggtcgtcagtttggagatgagggcctgttttttctagcagaaagcttagcctatgacaagagtgcagaagaggtggacttttctggcaatgggataacagctgtggggatagaagcctttgatggagttcttcagataaacacaactttgaaaactctcaatttatctggaaatgacatcggggatgaaggagctaagtgtctttcagatatattggttgaaaatgtgggtatccagaaactcctcctgaacagtatcaatattggggacgagggtgccaaggcactttcgaacatgctgaaaaagaataaatcaatacgtattctacagttcagcaataatgcaattgaatacagtggttttgcaagtattgcagaagcccttttagagaataatacgatacggagcttgtatctcaagttagtcactcacaacctgtggcaactatggtggtccccttggtgcatgcagcctagctcaaggaattctagggaataagtctttaagggaaattcacttgcatggtaatgggattgggaatgagggaatacgtgagttgatgtctgcattatctgctcacaaagggaagatcacagttgtggatattggcaacaacaacattagcccggaaggtttacatcctgtagccgagttcctcaaaaggacaaagtccttacagtggttcagtctctacatgaacgatattagtgatgagggagctgaaaaggttgctgaggctctgaaagataacaaaacaatttctaccatagacttgggtggcaataacattcactccaaagctgttagtgcagtagcggaaactttgaaggataatgcagtgctgacaacactggatttgagctacaatccaattggatcagacggagtaaaggctttgtgcgatgtcctcaagttccatgggaagatccaaacccttaagctcggctggtgccagataggcatggaaggtgcagagtgtattgccgactgtctcaagtacaacacaacgttatcgacattggatctgcgggcaaacgggcttggaaacgatggtgctatatgcttggcgcgaagtttcaagataatcaacgaatcgttgacgtcccttgacctgggtttcaatgagattcgagacgacggagcattcgcattggcacaggcgctcaaggctaacgaggatctggcggtcacgtcattaaatctcgcaaacaacttcttcacgaaattcggacaggtcgctctttctgaggcgcgggaccatgtgtacgagatgaccgaacgggagatagacatttatttttaggggggtaccggttcccctgtgcacacagttagcacaggacatgaccgatgcttgtttgtcgagtaggttgaagaataaggtcgcgcggtagagcgatggtttatcctttgtataggaaaattttggtgggttagttaaatatttttagttactatgtaggttagccattcgatcaggtgtctatatgcaagttttgctggaaacgtcggtgtcgttttgaaccattcgtattattggttgaaaatggaatggatatgacgggcatcacatgcaaactgattcttttttgtggaggacttcactgatgtggtggtgtgtgttcctcggaagttgaaatgtattctcatgccatccatgtgggatggtgttggtaacctcagacctgtcgtaggctgttgtgaatgtcacacaaagatttcgc

SEQ ID NO: 34621 - DNA, 4215 bp, Zea Mays
cttttcatgccccttgcacaaggagcaaaataccttacctgagtcgctccgatcacaagcgtcgggcgaccaccttcctcctccgcggaatcctgctgtatctggtgcctagcgctggtcgtcgagaggacgggcggggaggcgtccgccggcgagggactgagcggtggagacctcggtgggcaggcgcctacgagcccccggctgacacggtcgaagctgctgcggacggccgggctccaagcgcaccctcggtgtccgcgtcgccctccgttctcttctttgactcctgagtttcagtggacgttggcggcgtttgagacccggcggcggcgtatccgccggccactgcacatcccccgcggcgcgccactcctatggtgtttctgatcaaatggagcaagcctgcaatggcgcactgccggctcctccaccgctacgtctcgtccgccgccgccagagccgcagcgccgatccctgcccggcacgtgccccggtcgcccggcacgtccgcgcaaagcgcccgcatacgggagctcggccgcctcggccgcttgcacgaggccagggaggtgttcgactcgatgcccttccgcgacatcatcgcctggaactccatgatcttcgcctactgcaacaacgggatgcccgacgccgggaggtcgctcgctgacgcgatctccggcgggaacctgcgcacgggcaccatcctgctgtcgggctacgcgcgcgccgggcgcgtgcgcgacgctcggagggtgttcgatggaatgggcgtgcggaacaccgtggcgtggaatgccatggttacctgctacgtccagaacggggacatcaccctcgcgcgcaagctgttcgatgcaatgccgagcagggacgtctcgtcatggaacacgatgctcaccgggtactgccatagccaactgatggaggaggcaaggaatctgtttgaacgaatgccagaacgcaacggggtttcttggacagtgatgatttctgggtatgttctaattgagcagcatggcagggcttgggacatgtttcgcacaatgctatgtgaaggaatgacaccagagcaaccaaaccttgtttctgtgctttcagctgtacgccatcttggtaaacctggcattctagagagtatccacgttcttgtgcataagactggctttgagagggatgttgttgtcggcactgctatacttaatggctacactaaggatgtgaatatgcttgacagtgcagtaaagttctttgaaggtatggcagctaggaatgagtacacatggtcaaccataatcgctgcactatctcaggctggacgaatagatgatgcttttgctgtttaccaaagagatcctctaaagtctgttcctagtaggacttcaatgctcacaggccttgctcgatatggaaggatcgatgatgcaaagattctatttgaccagattcatgaacctaatgttgtatcctggaatgccatgattactgggtacatgcagaatgaaatggttgatgaagcagaagatctttttaacaggatgccctttagaaacacaatatcttgggctgggatgattgcagggtatgcgcgtaatgggaggagtgaacaagctttggtttcactccaagctctccataggaaaggaatgttacctagcctgtctagtttgactagtagcttctttgcttgttcaaacatcgaagctcttgagacaggaaagcaagttcattcacttgcagtaaaggctggctgtcagtttaatagctatgtttgtaatgcactgattactctgtacggtaagtacagaagcatagggtctgtgagacaaatctttgatcggatgacagttaaagatacagtgtcttataactcttttatgtccgcgcttgtacagaataatctgtttgatgaagcaagagatgtattcaacaatatgccgagtccagatgttgtatcttggactacgataatatctgcatgcgcacaagctgaccaggggaatgaggcagtagagattttcagaagtatgctgcatgagcgtgagctacccaatccacctatattaacgatacttcttggtctcagtggaaatcttggtgctccccaacttggacagcaaattcacacaatcgctattaaacttggaatggattcaggacttgtagtggctaatgctcttgtctcgatgtatttcaagtgtagttctgcagattcccttaaggtttttgattcaatggaggaacgggacatttttacatggaataccatcattaccggctatgctcaacatggccttggaagagaagctatcagaatgtatcaactaatggtatctgcaggagtgttgcctaatgaggtcacttttgtgggccttttacatgcatgtagccattctggtttggtagatgaagggcaccagttcttcaagtctatgagcagtgattatggattaactcctctgctagagcactatgcttgcatggtcgacctacttgggcgagctggtgatgtgcaaggagctgaacattttatttatgatatgcctattgagccagattcagtgatctggagtgcgcttctcggggcatgcaagattcacaagaatgtagaaattggtaggagagcagctgagaaacttttctctatcgagccatcaaatgctgggaattatgtcatgttgtcaaatatatactcctcccaagggatgtgggacgaagttgcaaaggtacggaaacttatgaaagaacgaggtgtgaacaaggatcctggttgtagctggatgcagataaagaacaaaatgcactcatttgtcactggagatgaggaacatgagcaaattcaaaacatatatgctaccctttgggagttatacactttgctaaaggccacagggtatgtacctgacacggactttgttctccatgacatagatgaagagcagaaagagagctcgcttctgtaccatagcgagaagcttgctgttgcttatggccttcttgttacacccaagggcatgcccatacagataatgaagaaccttagaatatgtggtgactgtcacactttcatcaagtttgtatcctctgtcaccaagagagaaattgatgttagggatgggaatcgattccatcatttcaggaatggaagctgttcatgcggtgatttttggtgataaactatcagagcatgagcaggtcttcttcatgctatcccctcaaacacagtgtctgatggagccgaccctatggagctgcatgtttatgattttaaaggacctggtgtggccttatcgatgtacaatagcgatgagtttattaggcctttcgctgaatcctccatggatatggctctttcaaaaaagttgtctctttatctcagcaccaagaatacaatcctcaagaagtatgacgacaggtcacaattggaccatggtgctccattttgcttactgtgatatgtgcagcgaagcgatggcgatggtgtttttgatgttcaggacagaatcaatggccgcaccttatgtgattgtgatagcatagttgtttgcgaggtaattacaaagctgcaggctgccgcctggaggcagtgggaggccctgggcgaccgaagggtgcatgatattctagtttcagatcaatgctgagtgcagggagaggcaatgtcttacctcttggatgttcatctctatattagtccatccataggtatgcagctttggaccgtcgatgttaaatcttgtctcaccagcgactacttctgatggtgtggctacctgagcagcttgtaccgattctgccttagcttgccgatcaacgctgtccaccaggacagagctgaaaacttgaaatggcaagaccagaaccctgaagttgaagtgttggcaagaaactcagataggtggatgaacgttgtgagccacctagctaagagcttgaagacgacagatggtaggtgttagaaatggaaggccatgcggctcccatgttatggaaaaaaaacccaatcatgaattttggaaagctcaagaacctttgttgaaggagataaggcggatccgttcaaggtcaacaatcgtgatgagaaattacagaaaagaggaagaatattgtcgatgaaaaaaagtgctcaaagtaggtgatgtaagtaaaggtgacagactctaaattttacactataagatttaaagacccatttatagttatttttaaaca

SEQ ID NO: 34622 - DNA, 1753 bp, Zea Mays
tcttaactcttgaattttgacaaactactatagatattaaaagctgcctctgaaaccggcagtcgtttcttacaccatagtcatagaaaagctcatatgttacatgacccaggggaaacaggaaaaactctttccaacaaagtttaacctgtttttattaccaagctggtctatcttacacctaccttactaccttgatctacttcactacgctcccagttgcctactatatcttctctggctacgccatctgccagatgcttgttgccattcttccaaggaacccttagtccgctgatgcaggagtaggataaaaggcaacatggagtcgatgcactgcttgctgcagatggttgacaagccgttgtgctacttgaaattccattggatgagcacgattcaattctttgatcgcctgatcctgatggcttatgaagcttatggtttccttaaggtcttctctaacagcaacagcatacaagcgaatttcttcttgttgctgactcaaaacttttgatttagaatgagcattagttagctgatgctcaagctccttaatgcgagtctgataagcttggtgttgcgtctgaagttctgtcacctgatgctctactccaataatctgttccgcttgaacctttatttcctcaagtcgttcttgtgcctgggtacaagccctattcttggccatttccatcatcttaaatgctgcataacttccagtgtacaactgctgccacttttgacgactgtgccctcgagtaagttgcaactctagcacgaccatcaaaactcgagcagatgccgattcaacagaatcctgcccaataggaatgctttccattaatcgggcctggtgatgatacacaaatgggtcacttaaggcaactacagggaacaacctcatagatgtggcttgtatttcttcccatttctggtaacaaatggttgttagcgcctctaaggcagctacctgagcaccctcccaaggagtcattccttcagcatggaacatccaatatggccaagatgggtttctagcacgttctggaatacgcactactacctcataccatggttgtcctctaagaaccgtgcgtggccactggtacttgggtgcttcggtatatccgacttcttgaagtagtcgccacaggaccactggaacaccaaaatctcgtagaaactctccaactcccgtaggggcttcttgttgattcatctatagagaagggcaacggatacactctattcactaaagatgtatgaacaaggtagatgattcatacactaaaatagctacgcagggggtttaacttaaagttgtatgacatgatgcatgtgtaattacagaatcaacctgggttgattcacaccttctatacattgcactcttcctatctggtctttaaaataaactcttcagaatttcttagataagaagggaaaagattttgtagataagactttagaaaatcttttgaagatgcctaataatatctgcagagaagggctacgctccgataccagctgtgacggaacctcccaagtaattaggcccacctacagttgtccttgtctaaccgacatcagacaccctgcagatgttcctaagtcacttgacaagctctgtatctttccttacctcaccaggaacgtctcacccgtcttgcagacattacagaacatcggagataaagaaatgcggaagcaattacataaacttacatttattaagaaagtaagattaagg

SEQ ID NO: 34623 - DNA, 4494 bp, Zea Mays
cccatattagcttttcctatatattctaccaagtcctaaagactaatcactctttcttgaatccaagcatactcatctgggatcatagactggggtatttgctcgtccagagcgcttatcgttcatccaacccagccatatttgctctctacctgtgaagaaatgaagctttgggactgggacgatgattggaagtgcatacaaaaatttggtagggaacacactgattccatacttcaagtggcatttagcccaaatgacagttttgccagtgtttcaagtgatcacacaataaagctttggtgcctgaaatctcccacatcagagtgtactctgcacggccattcggacaaagtgaattgcttggatttcgtcacacatgatggtcagcaatatttgattagtggatctcaagactgtactgccaaggcatgggccttgaaggaaaaggaatgcgtccagacaatggatgttttcatgtcgccagttgtttctgtcatttcccttccggacactccatatataactacaggttcagcagatggcactattcatttgtggagttctgctaatttcaggcttgagagaatacttagccttggtttatgtggccctgtttgggatctacgtttgattgggccaacgaggatcgtgattcaaccgaacaactatgaaatatcagtcatcatggatattgacacaggttctgaggctagctcgtcagctccctcaaatgagctgatccaggttgaccccaaagagttgcgcttcccggttgcccaagaggtgtcaagcacactagagatccgtaacgttacagatcaccatgtggcattctgtatgtggtcattgaaccatacagcaaattacattccagtgccgaacatagaagttctatcaccacagtcaatgcggcaagttgttataacaagaattgcacgacgagagcctgtgccagcagaccccgtcgacgacatagtctatgtgaagggcactaccgtggttcagggtacaacgagcgcagatgtcacttatgacatgttcgatggaacaaggacaggccaaattctgcaaccggccatggagctgaatgttgttctcgtagctgactccgagatcatacacaaagcaaggttaccatgggccttagatgtgcatccaacaatgccatggataatgatggctcaaggagattaccaaattcgtatatggaactataagacacggatagagaaacctattgctatcaaggggagagaagttacttcggctaaatttataatgcacaagcaatggattctggcgggctgttctagtggacttgtctatgtgtaccgttatgaaccagaaaagaaaaaatcagtagagaaaatccgagttctacaaggacactcaaatgctatcaattccttggctgttcattcaactaagccatgcgtgctgtcagcatccaaagatggcaaaattttgatctgggactatgaaaatgagtgggagttaatgaaaacatttgatgtcaaaagtcctgtgcagcatgttgcgtttagcccaaaggactccaatatgttcgccagtgcccaggacaaaacagtaaagatatgggattggcattctggtaactgcaagtctacattgtctgggcattcagatttggtgttatgtctggattacttcagtcagggtgatcagctatacttgatcactggttcacgagacaaaactgccaagatatgggattgcaagacgaggagttgtgttcggacattggaagggcatacagatgttgttaatgttgcatgttgccatccagatcttctaatactaattacaggttcattgaacgggtcagttcgtctgtgggatttgaatcgctcaactacgttccgatatgagctcatatttgaccttggagaagtatatgctatagcaagtttgaagggtacaaggattgtgattggacacgaaataggattagcactggtagacatagacctagagggcaagaaggatggatatgtgaagagcaatgtcgcaattatggattcaaaaaatgacacagatcaaaatatgaaagagttaagcccaacagcttcctcaagtgaggtgcaaaaggtgtcaagcattatagcattggagactctatacaaaatgaagtcatcagaatcgtctatagatgtccatccaacagagacatggatggtcattacatccgacaaatatgttcatatatgggactaccatacaagggaagtgaaacagatgatggatactaagggagcgaaagtcagattggctaaatttatagcccgcaagcaatgggttattgcgggtgctactagtggattcatcttcgtctatgattatgactcaaaaaaggaaataatacacgttttgtgtaaccacacagaacccatcaagtctttggctattcacggaactgagccccttgtgctgtcagcatccgtggatggcaaaattttgctgtgggactatgcaaatgactggcatttgattaaaacatttgatgcgagaagtcaacgtttggtgcaagtcgcgtttaatccaaaggacaccaatatgtttgctagtgctcagggcaaaacagtaaagatttgggatcgccagcatgatgaatgccaatacaaattagatgggcattcacatcagatcgagtgttttgattactttagtggtggtgattttgataagctatatatagtcaccggctctcaagataaaactgccaagatctgggactgcgagaatgcgggctgtgtccagacactggaaggacatgcaggtcccgttagagctgtctgttaccatcagaatctctcgttattaattacagggtgctctgacggatcaattcatctatggaactccactaccttcagaagccgaccgtgtggtagaggattcgaatacgttcgaagacgaaccacaggactcgcttgagcaaggcttgagcataaactgaactttgctgacttcggattactgagttctgtagcttgtttgaaaggatcgaaaaggattgcaatcagaagcagggaaggattagcacttgtagacatagacatagaggacaagaaggatagcgatgtggagagcatcacgactactgcttccatgaacgacacaggtccaattacagaagagaacggagtggcagcagaccatatctctgatgaccacctggcgcagggcgtagtatatgtacatacagagattataggcaaagtcaattcagcatgcaccatagacgtccatccgacaaagccatggatggtcatcactcaagctaacaagtttgttcatgtttgggactaccatacaaaggtagtggaatggacgattcagattaagggagcgaaagttagttcagctaaatttatagccagccaggattggattgtggcgggtactacccgtggattcctccacgtgtacgattgcgaatcgaggaaggaaatacgccgtctttgtgaacacccgaaatctatcacgtcattggctgttgacgatgatgcccttgagctggtgctgtcagcgtccatcgatggcaagattttgatctggagctactggcactactatcacgcacgtagacgtagtacctggcatttggaaaaaacatttgacgcgggaagccagtgtctgaagcaagtcgcgtttattgctccaagtgtccatcgcagcagcagcactatcatcgctactgctcgagacggaacagtaaagggcttgttcggttagctctcaatccatgtggattgagtgggattggatttgggatcccgatcgttctgacggatgccgtgagttcacattggctgcggattcaggtcagattgttgaatgtttcgattggtttagtcgtggtactgatatatacttggtcaccggttctcgagacaacactgccaagatctgggacatagaggatgggagttgtgtccgaacactggaaggacacgcagatcatgttaccgttgtctgttaccatccggatctttcaatgctcattacaggttcaagggacggctcgattcgtctgtggaactccactaccttcaggtttgagcatgagctgaactttgacctcgggtctctgagttctttagcttgtatcaagggatcaacaaggattgcaatcggatatgaaagaggtctagtactggcagacatttgcactcaggaacatagagcatgatctataaagcggcataataccttgagagcgacagaataaaatctaaacattgataaagcggcaaaaatccctggcaaacatttgctgatgcgatgggattgcatccaaacatttttcttggtaagctaatagactgcaataagtttttccatggacttgggaggtgtcgatctgcggatatgcttttgtatggtttaaacatatcatcggatagaaatttatactactatattaaaaatttaatatggacatctcgtgctactatgactttatccttc

SEQ ID NO: 34624 - DNA, 1480 bp, Zea Mays
caagccgactgaccgaaccgttgaattgcaatttccgctagaaagccgacgagacaatttcttccgttcgtttcagatcgggcggtggtcctgaccaaggcgctgccggccactggcctctcgcaaccggcgaccgcatctcgaagtagagggtgctggccgccgctctcggaagcgctctggaaggacacggccatggcgatgcgggccgctgcgcgtcaagccatactctctccaccgcttgggccccgcagtcctcgccccttcctctgtggttgttccttgtctatcgctcctcggttggagccgtgccgagcggcgagctccaccaccgcgccggccgccggaaagcatctccctccattgttcagcgtcgcgccgatgatggactggacggacaaccactatcggacgctcgcgcggcttatctcgcggcatgcctggctttatactgagatggtcgtcgccgagaccatcgtgcatcagaaggataacctggtttctagcatttccggaggaacaacatcctattgtgctgcagattggtggaagtaaccttgaaaatttagcaaaagcaacagaactggcaaatgattattcatatgatgagatcaacctaaactgtggctgtccaagcggcaaagttgctggtcatggttgctttggtgctcgcttaatgtttgatccagagtttgtaggagatgccatgtcaactatcgcagctaattgtgatgtcccagttagtgttaaatgcagaattggtgttgacgatcgtgattcttatgaagaactatgtgaatttgtagataaagttatctcaaaatctccaaccaggcatttcattattcatgctcggaaggcattgcttagtggtctcagtcccgcagagaatcggaagattcctccattgaagttagtgcatccatgagacaaggtgcacacggagttatggttggccgggctgcttataacaatccatggaacatgctaggacatgtggatggggaaatctatggcaagcaaacaagatacatttctcgtcgccagatacttgagaactaccaagcttatggtgattcaataattgaccagtatggccccagcaggccaaatgtgagacaacttgtcaagccactgttaaacttattccactcagaacctggcaacagcctatggaaacgcaaagctgactctgcattgcgtcattgcaaggagtgctacacatcctttctgtaagaaaaaaaactcggccggggagggaaagaccaccatctcggtattatattaagaaaagaccgaaacaatggtcccggccgagaaaatccccgaaccctgacccatcactaacgggccggcatcaactgtccactctacaacagcccaaccggcaggacatcgtaacccgagagtagatgggacacagcgagaagattttttgaaccaagcctggaaatacgctctcgagggaaatcaaacctag

SEQ ID NO: 34625 - DNA, 1811 bp, Zea Mays
cgtactccctccctccaaccacgcccggccaaacttgccatggcgctaccgtcgtcctcgacccccaccgcgtcggctccggcctccctcggcgagcggtggccgccgctggagtctacccccgcagttttcaaccagttcgtgtggtcgctaggtgtcccggaggacgacgtggagttccacgacgtgtacgggctcgacgccgacgcgttggatatggttccccagcctgtgctcgccgttgttctctgcttccccgatccaccacaggatgcaagttacccttcagaacaactcttaatttctggagaaaaggaaacacaggaccaggtttactttataaaacagatcgaatcattgggaaatgcttgtggaactattgctctactccatgctgttggaaatgcatcttccaaagtcaatttagtggagaattcatgcttggacttgttcttcaaatcaactgctaccatggacccatatgagcgtgctgtgtttctggagaaggatgatacaatggcaagggctcacttacttgctgccaatgatggtgccaccgagctcagtgatcttatagaagagcactacgtttgttttgtgtatgtcaatggaacactttatgagcttgatggaatgaaggatggacctataaagcacggaccctgttctttctataagtttgctgcaggatgttgttcctgttattaaggccatcatgtgcaatatccccaactcaatcaacttcaatcttatggtgctgtcaaggaaagaaaaataatggtggtgctattccttgagctggtaagcggtggaatgcaaaacgcaagggttcaagggaaggggattaaacggatgcctgtttggactgcagctgcgtcactaataagttagatgacccgcttatgtggggattcaagggttttccaacttcggatgcaaagcttggaaggtgggtgctgacagcagaagatatatgcttcaagaatgtagtcatgtcctacatgtttcgacttgggaaatgcataccaatcacgagagggggtgggatttatcaagaacacatgaatgaagcccttgacgtgcttagaaatggaggctggctgcatacattccctgaaggaaaaatagcccaagaagatcagccgattagaagattgaagtggggaacggccagtcttattgtccgagcacctataactccaatagttttgccaattgttcactctggtttcgaaaaggtcatgccagaaaactcgttctttggacggcgaccaccggtgccactctgcagtaagaagatagacatcattgttggagagccaatagagtttgacttgccaagcttgaagcaagaagcatcaacggtaccccatgactcatcctctgaacggaaggggtggccggccattacaccagatgggctggacgaggccgcccagagatggctttaccagaagatgtcagacaaggtccagtctgtgatggagagactgcggaaaacagttaccaaccttaagcagcgttgatcttcatctatcaggcaataccttgttgaactgctgattaggattctttaaccagcttgagttggtggatacagaaatggacaagtggtcgtcacacaagttcgtcaaagtattggtaataatagaattagagctcagattgtttcattttttagtctttttttagttattgttttgaaaggtttcttcattatttacaatcaactgttcaggttgcctgccagttttactgaggcatgaataaaaaaaggcttttgatattcagttgcaaaatcaccatccatt

SEQ ID NO: 34626 - DNA, 1787 bp, Zea Mays
atttatcttcactgccttatcctcctaggatttttttagcctccaccgctcacgccatttcttgattcctgctctcaatcttcagccgtccgtcgttagcctggctcactggccgctgctacccttctctgttgctcgtccggcccctgctcggatctgttgcgagctcttctctggtgctcgcgcagccgcgaccttgccgagctccgtccctgctcctccggccaccggatcaccatcgcagcgcgcgtggttttgaagttctgcgcattcgtcgtgccgcgctgtgtgccagtgttctcttccggcagatctcgccgtcgaccatattcaacagcttgcccctcaccgagctcgtggtcgtgctgctatgcctcgctcccctctgtgttcgatgaaaaacattaggaatcgatgacctcgcctcgtcctcgcaattgtggttggcttgtgtcgtcgtctgccccaccgtggtgctcgccaaaacacttgaacccgagtttcgtcgccgtccatgcgaatatcatgctggttcgatcttggtaagcagagtagttattcatgttatttaaattgatgaatggattggttgtatatgttaatcgtgatgggtgatgaattttaggcttgggtactatttacgagaaaaatattgttagacatatatatgatgctcgggcgagtcattgacatgtaaaataggcttaatgatttattcgactagtcggtaagttctatatgtattgttgtgtcaatttagtataattaagaaaattgataccttgctagtagtcgttatattctataattggtggttgatcaagtgttgtgatcgaatgttactagctacccaaagtatttagaagagagtagcatcgccatatcgatctttagtgaaatctaagaatttcgtagtagtcagtgtatatagtactctagctatttaagttgttgagaaattagctttatcgaacgctatgttaattgaaaatgttgtatttgtaagaataaatattgtgatgttcgatttagttaagtcggtaattcaggttaattaagacacacggtttaaagagttaattagattgttcctataactattttgaggtcgttggtatttaataatagcgagtctaggttttattagacttctgaaatatattttactaagtgtgataatgtgggttaaataatttattcttgctagatttcggaattagatccgattaaaaagcaggaacgtgagtgttgcacttagtgtgtatgatttgctgtttcgtgatgtttgctttagattcggttaatctagagaagtgtgattattgcgcttggtcatatggtgatagctagcgtttgcttatgaaatgtcgtgatgccttcccattaagtgtttaattttttactgagaaaattgtaatattatcttgcgatatttgttttgatattcatacatgtgcatcatgcatcccatgaggtacgttaattgatcacgtgatgtggaagacgagccgagtcgaccccaagatgtcgtaaagcacgacctgctccgaaaggtgatgctgatggacgaacctgaagatggataatctgaacaattgccaaaacaaaggctggtcgtcaagtggtcgccacctaacaaacactaacctagtgttattccaggcaagccccggtgcaagcaaccccttccttgtgtttttacatgatttttacacactttaagtctagcgaaatgtgcattaggtttataggagtttcttggaaaccctttgatgcattggctacct

SEQ ID NO: 34627 - DNA, 3602 bp, Zea Mays
attaaaaactcaggcgatgccgcgggacgatcggatagggaagctacagcgaagaagacgcccctccaacttgccgcattgcgcacggcggtactcccaagatctgatccgagcaaggcgcccttcagtctttcaggaagcttaccagcttggtgccgtcaacggctcacagcttctgcctttctttggcggcatcgcccaagctcaaggtttgggttgggtgggcgagactgctgctgccttcaagaccccaaaagagaagatagtatttgaacacttcctagtgagttatgatggagatgattctgtctgagttcacaaaacatgttatcagctcacttgtcaatttagcaagtaatgaaatagccaaagttttgtgcatcagaaacgagattagcaaactggcaagaaaacttgagagtatgagagctatcattacagatgcagaacaggcagttgtgcaaaacgaaactactagggattggctgaagaggtcacgagaaattatttatgaggctgaagacataaatgaccgatataatattgaaaaggagaagttccaaatatcacagccgcaggaatgcaatccttcatcaatctttaagtgctgcagagatgttggtattgactgcatagtcgcaagtgatatacatgaactgcatcagaaacttgacagcatcattgaagagggtaagagactgcatgtacggccggcgagtgaggatcaaataagattagatcaaacaagatcatatcttgacattccacttctagggcctgatattgttggcatggaaaacgactgtgaaaatctcattgaactactaataaagggagatgatattccccctcaaaaaaagcgagatgatattcctattcgtcctttccttgctattataggaacaattggaattggcaagactactcttgctagaaaggtataccacaagacagaaacgttttttcagattagggtatgggttcatgtctccaaagacttgcggcatatgacaatgtggtcaggtgagagattgagtaaaggagatactgcagaccagctggaagagctgcgccaaatgttacgagacaataaatatctgctggtcattgatgatgtctggggagagaatgtttgggaagggttgctaaaggaacaagcgcattatggcagccttggcagtagagtccttataacaacccggaatgagcatgttgcgaggaggacaggagcagttcatattcaccatatgaagggtttgaatgaggatgatggttggtggctacttcgtacaatggctttccttgatgagagcactggaaacatgcaagatattggtaggcgaattgtgcaaaagtgcaatggtcttccaatggcaataaggaggattggatgccatctaagggaagtggaacttaaagaagatgactgggagagaatctactccagtgatttctgtggcctttcttcgacgataagaaatgctatcaataagagctaccttgagttgccatataatctgaaaaggtgctttctttattgctcattgtatccagagggatctgtgattgatcggcagtgtatcacccagcagtggattgcggaggggtttattgtgacccagcaggacgcatctgttgaaaaggaagctaaagaatgctatgacaaattgttgggtaggggccttcttttgcaagaaaatcgaacttatggtgcagagagaacgaagatgcctcatctcttcagatcatttgcacttctccagtcacaagatgaatactttattggcaatcctcaagacataggtgatgctttgaggccgtaccgcttaactattacaactggaggtgcagaggcgatcagaaattgtattagaaagttgaagagcttgaggacaataatcctgtgtgggagttcactaaatgacaggaccctggattctatttttcagaagtacacacatctaagagttctagatcttggaggagatacacagattgaccgtgttgcaaggagtttgggatccatgatgcaccttagatatcttagctttgcaaacacccaagttagtgagattccatctgacattgagaaacttaggatgttgcagttcttaattctaaaaaattgcactcgtcttaatgctctcccagaatcccttggccgcctaacaaacttgagaacacttgacatctcaggatgtggactaaatcgagtgaaatttggattctccatgatgaaagagctcagatgtctgcagggttttcttgtaagctcaagaggttcagaaaatagaaatggttggtcatttcaagagctggggtccttgtataagctgacaagcctcaagattcttaggctagagaaaacatcaattgtggaagatgcagtacaatcagcactacaggcaaaacatgatctcaaagagcttgaactatgctgcagcactgatgatggaacggcagaaattagtagagcagcaaaaattaaagatgtgtttgaagcactcaagccaggaccttctattgtctctctcaagctagaaaactattatggtcatggattcccatcttggctagatccattccatctccgagatctagagcagttgaccattgatggctgtttgcattgccaatatctcccatctctgggtgagatgaagaatctaaaattcctagcaataaatggttccaatttgtcaactcacattggacatgaaattcgtgggacgctagatgatggggtggcatttccgaagctggagcagctggttatcagtaagatgagcaacctgaagtcatggcagggcctcaaagaaatagatatgccttcactcatgaatttcaggatcattggatgccccaagctggactcacttccttcctggctcaagcattgtacggcattgagaagtttgcatatagatcatgctgacaacctggaatcaattgagaacatacctgcacttaaagaacttgaagtttgtgagaacagcaagctgaaggtgatctcgaaccttagaagacttgaagatctgaaagtggtggcttgcttgcttttggatgttgtgcaggatgtcccctcattgtgcaccgtgcattcaaatgaaaagaattcaaccaagcttccgcagtggctacagccagaaaaacctttcatgctcaggagattggagattgttggaactgaggagctacttgataactgctcctctgcaacggccccatactggcatattatccaaaatgctgatcacgtatatgcaaatctgccagatggctccttctacttctcatatgccaaaagcagtagctacttccacagaagcgcaaggagccttgcacggtcccctttactgagcccagctagcttcagtgtgccgattcttccacaagatgaagtagtttcgactgatgaaatcagaaacatcagcgagccaattggtcaatcctcaagtcggtcatggatgaggatacttttcacagttctccttcttcttgttgctcgtatcttttcattgtcaagcgagtattgatcacggatgagttctgtgtttgggcaccctaaatgttgattactatgctattgccattctgaattc

SEQ ID NO: 34628 - DNA, 2273 bp, Zea Mays
tcccccgcggaaggacgacgacgcaactggcagtcaccgacgcgacgcgggtcgtctcctcagccctcctgttcagcctcctcgccagcgatggcttcgggcgccgacgccgcggcgctggtgacctccggcgccgacgagtgggcagcggcgtgtccgccgctgcggcggaacctgcagctgctcgcgcctgacgaggttgagctagcaaaaatgctgttgaatgagggccagattcacctatttgaacactggcctgaaccaggcattgatgacgacaagaaaagaggcttctttgatcaggttcgccggcttaattcaagctatcctggaggtctggtatcttacatcaagaatgccaaaaaacttcttgcagattcaaaggcaggaaaaaacccatatgatggtttcaccccttctgtgccttcaggggaaattttgaacttcggcgatgacaattttgtttcactggaagcagctgggataaaagaagcccacaatgctgcatttgttcttgtagctggagggcttggtgaaaggcttggttacaaaggaattaaggtagcacttccccgggaaacaacaactggaaaatgtttcattcaacattatatagagtctatcctggttttacaagaggccagctgcaaaacggttgatgatgggtgccaaaaaaagattccatttgtcattatgacttctgatgatacaaatgcactaactatcaagcttttggagtcaaactcttactttggaatggaaccatctcaagtgaaattgctaaagcaggaaaaagtagcttgtctagctgacaatgatgcaaggcttgcattagacccaagtgacaagtacaaaattcagacaaagccacatgggcatggagatgttcattctcttctttattcaagtggcttgcttgagcaatggaagagtgaagggcggaagtgggttctctttttccaggatacaaatggattgcttttcaatgcaattccgtctgctttaggtgtcagtgccaccaagggttacaatgtaaattctctcgcagttcctaggaaggctaaggaagcaattggaggaattaccaaacttactcatgttgatggtagaacaatggtcatcaatgtagagtacaatcagcttgatccactccttcgtgcaactggttatcctgatggagatacaaattctgagacaggctattctccataccctggaaatataaaccaggtatactgattcgaccaagacatcatttaaatcatccactcgtctagagtgcatgatgcaagactatccaaagacgttgccaccctcaacaaaagttggattcacggtgatggatacatggcttgcttatgctcctgtgaagaataatcctgaagacgcggctaaagttccaaaaggcaatccttatcatagtgcaacctcaggagagatggcaatttacagggcaaacagccttattttgagaaaggctggtgcgcagatagctgaccctgtcgttgataccttcaacgggcaagaggtagaggtctggccacgcgtaacctggagtccacggtggggtctcaccttccagagcgtcaaggagaaagtgcatggcagctgttcagtttctcagaggtcagctttggtcatcgatggccggagtgtcttcctcgacggactttcattggacggcacccttattgtcaatgctgtggatggtgcagaggttaaagttactggtcatgtagaaaataagggctggactatccggcatgtggactacaaggacacctcggagaaggaagaggtcaggatccgtgggttcaagttcaacaagtctgagcagctagaggtgaactacaccgagccaggaaagcatagcttgagtgcgtgaaaagaaaacattcttgacctgactagcttcgtaccaaaatggaaatagctcacatctgggtcgcctcccagattctgggagggaggccaatgccagcgtagctgaaaccgttcttctccttcccccacgtacaacaaggagcaaagtgcttcaccaagcactcaacattctttatgtatatcttgtacagaactcctcttcagtgcaatcagagttcattgtttgtttgggatctgatgtttatgttacaattttttattttagaaaacttggcactgaatcaagtaataagtgtggtagtgtgtagaagtatagtaacgggctataagcctacttatgtggcattttttgtctgtgtggatgagagacattaaaaagtggaggtggg

SEQ ID NO: 34629 - DNA, 509 bp, Zea Mays
tcattttccctcaacctaaaccatctcgcgcgggaggccgcagcgggcgcggacacgagggacatcgacacgatgttctagacgggggcgaagatggtcggccgcaggtgttgcgacgacgcgaggaccatgctggtggtgagagcggacgcaaccgacggtgatgggatgggcgtcggtgacagtgctgcgtgggggaagggcctgcgcatccgatggcggcgggattggcgccggcgcgaacgtcgcacacggggagaaggccaacgcatctagcggcgacatgcagacgtggacgccataacaggatgaaaagcggatgccaccgtggaggtggagaccgaggaggttgcgtatggaattagccatgaaaggcgaccaccgacgggaggcagatggcagcgacgaccctagtcgtctccctagtaacaacatattataatgtaccatttataataacttagatatctatttacgctaatttttaataagtacttatgttatataaa

SEQ ID NO: 34630 - DNA, 2474 bp, Zea Mays
cttctatgcacttgcagttttgccaggcagttttggcatgatatccttttgccattgagataaggatatcttttgctgagtggtggcgaaaggtgcataaaaaggtgcacaagaccaaaagaaaaggcttcaatagcctcataattttgggggcgtggtgcttatggcttcttcgaaacaaggctatttttgatggagtaaacccttcctttgagctctgttaaaagtttgtttttagatgagctgagttgctgggatatggctggtgctaaacagctaccaagtcttggcctagttgctgctattagtagggtctaggctgtttttcaatttggtctagttttatgcttgcccactggtcattgtactttggtcctctttggacctttttcctctcttaatataatgatgcgcagctctcctgcgcgtccgagaaaaaaaagataaagcacaccctagaggattgtcttcattgttagtcaaaacttcaaacaaggtggcaaatttcctgaattttcgtagatttacaactttaattatcaaattgaaattgaaattttgtctccaagctcccaggttttccagtcatcacacaattgaggacatgtttgttgttcttcataaagggtgttatgtaatttttaaattagagtaaatattccagattggatgatgatatgttttactatttatgtagttcctaataaatacacatattcatctgattcttaaggtagtcagttatatttcgtgatcttacattaatcttgatatctatttgtagcaaaagttggttcttaccatcaaaagtgttaggagaatgaaaccctaactctaatgcgggttaggaatatattaatataactgagtatgtaggccaaggcccattataggagagaaatacatagttacgctaacacccccctgcagtcggtgttagggagatttgttcctttgtttttgtgcacgggaaaaatcgggacatggtaaaaagtggagcggccaaaaaaaatctgaaaccagcagccagattgctggaaacagagaaaatcataaatagctgtaacgttgttaccttttgatggtaaatatctaaaaccgattcttttgatggtatatatctaaaaatgtgttcttttgatggtaaggatccaatttcccccaatgttgtaatagttgggcctagctttttgttgcattgcctgattcacatgcatgactcgtaacataatgttatgtcattgtgactgtgaatccttgattgcaatgctacttgtttagttttcacggcattcacgcgttcattttacattattgccaagttactgcttccatgcaggtggttagttgatgaagttcgagaaagtgcccctaaggaattggatttcttgaatgaagccaaaaacagcgaaagatgtttgaataactttagaaagctgtctcctcagattgctggtagcatatatgcccccaaggtttattggaatctcagcacatctagaattctcaccatggagtttatggatgccaaggaggtaactgatgttagtggcattaaatcaattggagttcaccctgttgatgtttcaaacctagatggaaaaggccacagctggttcttcttgaccacggcctctacaaagagcttgattataatactaggataagctacgcttctctttggaaggcacttgtttttgctgatgcaaaagcaattaaggagaacagtgccaaactgggtgctggggaggatcttcatgcactctttgctggtgttctcactatgagaccatggaaaagggtgattgacccatctcctgatcatcttgtactaggaaaaaatactgattattcagaattacagaattacgcctccttatattttactgagatctccgagctactgaggagattaccaagggttatattgttgatgcttaaaacaaatgactgtttacgtgcagtcagtcatgccctggttgggggcagttccttggagtcgtttatgattattggacgggtatcttctgaagctgtgctggatgctaaaaggatgaacaggaggtcctttctcgatggattgaagatatggctggaggaagccctgctggaagctcgattctttactttgaagctgatgctatgtgttatgcaacttaggaagttgttgcctggctaaaagcagttaggcgtatcagcagcctttttgaccggtagaactgcggagttgacatctagttccatatattttcttgagggcgaaacttgacattttgcttagaagattgcctttcttttcgtatacataattcttctgtcgatcattttctcaccatgagtggccatttttcatggtcgatacttgataccttcattgggtgaatacaagtatacaaactgctgacgtggacaaatgtaagagcaaaactgttttctttttggaagggaatcaacattgacgtgtagcaaatttc

SEQ ID NO: 34631 - DNA, 1929 bp, Zea Mays
cgtcgcttgcatctccccgccgccgccacgcgcccacgcttccttccgaacaaagctgtcgtgctgcctttcttgccgtccaactcaggcagccgtcctagtcctcgttggtcctcatctgctgcccttctacggtggaggagagaagaggagaggagcggagcggagatccagccgctttccggctgctttcttcttctaattgcggagcaagttccgtcaatactgcttgtggtgttgcgccaatttaagttcctgctgtccgcaaaaggagagcttccgcagctcctatggcaaagcctcccaatagcattggccgtagcagcatgccaagatcgaatgagggtttgaggctcatattttcggcagttataggtatcatgctgggttacctgtttgggatctccttccctacagtcaacataaccaagcttcacttcccttcgagtatcatatcctatattgaagacaggaactctggcatcacaacccagacattgttgaaccatgcttgggcatctgcaaacaatcgtaaaaagaatagctctgaatctaacactgatgaaattcccaagatttatgttcctacaaacccaaaaggtgctgagagacttccaccaggcattgtagtgtctgaaacagatctttatccccgaagactatggggtgatcctagtgaggaccttactagcgagccgaggtatcttgttacatttactgttggtattgggcaaaaggcaaatattgatgcagcagtcaaaaagttttcagacaaattcactattatgctgttccattatgatggtcggactactgagtgggatgaatttgagtggtctaaaagagcaatccatgtgagtgtcaggaagcaaacaaaatggtggtacgcaaaacgatttttgcatcccgacgttgttgccagatatgattacattttcatctgggatgaggatctaggtgtagaacatttcaatgcagagaagtacattgagcttgttcgaaagcatgggttggaaatctctcagcctggtttacaacctgataaaggactaacatggcaaatgactaaacggcgtggtgaccaagaagttcacaaagtaactgaggagagaccaggctggtgcactgatccacatctaccaccatgtgcagcatttgttgaaattatggcaacggtgttctctagaaatgcatggcgctgtgtatggcatatgattcagaatgacttggtccatggatggggtcttgactttgctcttaggaaatgtgtggagccggctcatgagaagattggagttgttgatgctcaatggattgttcatcaagcagttccttcacttgggaaccagggcaagtcagataatggaagagcaccatgggaaggggtaaggtaagagcacgctgcagaaaagaatgggggatatttcagacaaggctggctgatgcagagaaggcttattacttggagagaggcatcacgcccccgaattcaacagtagtttagatgaatacatgctcctcacatgccacggcaaggtttctgttgcgggaatctgctgcaaactggcatgttcatcgaagctgctgcaacccagggctacattaggggtcccacgaatcgccatgattgatcttagtgtcattcactttgttttaatgtcatttttttggttagtgagactagatgggatgtaagtaggagatataacagggactgtgatgacacccatttgtgtattgatgacctgatgcaatatggatgctgatagtccgtttctcagtaatcagtatgtaaattgtttgctgtataccagctgtgtgcaactgggtcaaatgatgtgttgtgctagtccatatgaagaaatatcaaggctagtttgggagcaaggaaactgaggggactaaaattttcttcctattcaaaattgg

SEQ ID NO: 34632 - DNA, 1900 bp, Zea Mays
aataagtttacacaaactaataatcgaaatgataatataataggtgtatacaaattattaaactaacaacccaatatccaaaacgaatcagttggaaatcataccttggtctacgaagtgaaccaactcaaatctttgaatccagcaaattttgacgaagtttggaaatgggatgaaatgagctgctctcggccagccgcgcgggcgtttttataggaatttgtagctcggcgccaagatctgtggcgccgagctacgaggccgggccacaactagccgttggtgcctcgtcacagctcggcgccataggctgtggcgccgagctacggcaccacgtcagcgccaggtcagccctgcacgcaactagccgttgctgccacgtcatagctcggcgccataggctgtggcgccgagctgtgttagctcggcgccatggcctatggcgccgagctaagggtccaaaactgagtttaaaatttttttaggtctaaacgtgattttacttctgtttaagggctaaaatacaaaaaattcggtactgctggctactacaacttgtcccaatcccttccacctgatgctaccaagtgcgagcatcaagtacgcagtaaattaaatgcccctcatccatacgacagttggaaggtagccagaagcccaaatacaaccctcctttgttttccatggcaactcagctagcagcggctcaggcgcccagcaaatgcgttgatcctctcataattccttcttcagacgcacgctctggaaaatactactgcaggaggtatttctagatgcgaatcttcatgatgccaagcgttgacgagagccccatctgtgctccttggagacatggactggacatctgtttggtagagcctttcgtttccagacagcgcgcgcagtactaaagacgggaggactgacgttgggagcacatgtctagcctgcgccatgatgtatgacgccgggctagatcacgtcagctaccaacatgtatcgagagacgccagatcatcagctgactaagtatctcagcgtcataatccatggcgccgagccgtgttacctcagcgccatgatttatgacgctgaataaagggtccaaaaacactattaagttgtttaaggcttcaaacgtgaattttgtttaaaatatggactaaattgtaaaaaattcggttacttcgaaggttaacaaccagatgttgtacgaagtaaacaaatgaaataacaaacaaacagcacagtaaggtgaactacatgcaagagcccatgcatatcactattcaactctactattaaaaaccattatctagtgaaattaaagatgcgcattttggcattgaaattaacaaattgtatgatcaacagtcgatgccctttgggtcaacatagagtcaatcgccaagaaacagtaccgagaatcgatgatcacgacaagggacctacgcagagagatatgtattacgaatatcgcaaatcgcgggcaccctagcgatccgataatataccacgcatcaacgactgtagcgatcgctacgagggggcgggtgtagcagctctaatctatctcggtgtagcggggaaggggaagaagatgaggaagggggtaaccgtcggcgtgctgacttgtcccttgatcttgaggttgatgtgggcgtcgccctccgcgggcttcttgtcctcctctccgctctagagattctcgtcgacggctccgaacgcagctgtaggggttggtttcccggcgatcgatcggtggaggaggcgcgacgggcgacgcggggttgtggaagggttgcgatgcgcccacggactcgaggcctcttgtaggacggttgcccatgagcagattagatacgaggtttgcatccggatcctccctgctcgggcctcc

SEQ ID NO: 34633 - DNA, 1624 bp, Zea Mays
gtttggaagcccatcgtacgatgtaatttcgtcaggggaacccttttttggccggaaacaatcctggcctcaagaggccagacaattctcccgactcgcctccgacggacgccagccgcaacgccgcgaaccccatcctcgggagcctctcctccgacggtcgatggcccggctccctgacgccatcctcgcaacgccaaccccagcctcgagaccgtcatctccgacgccatccccaagtgcctccgccgctgctccacatcctcttcccctctacaaggtgattctgatatcatcaagactacaccaggtgagcagtaaaagagtggtggcagtacatcctctctagagttgttactcagttttgaaaaaaggatgatttggaacaatgtgtatgagaaaggcttatttgatgtgatgcatgatcacaaagataatccaaaattcaaaggtcaaaatggttggaatcgtgatggatggaatagtatcactacgaagttcaatggaaagttccctctagctcatttctctaaacaacaaccacaagagaaggagagagagcttaaaggatactacaaggcaataagggattcaagaaaaaaaaagcggggctggttggaatgacactctatgcatggtactggccaaaccagaagtttggccatggctgattcgtgctcacccaaaagtatcaaagtttcgcaacaagccattccctcttttttacagtttagaagggctatatgaaggtagtgtggctatcggagagttaaatttcacatcaactgcttttgatcttcctccaccttcagctccatctaggagtgtgtctggacaaagtccaaatcccttgagtactaattcacttgatttggatggacaagaaaccacaagtgtgttcaatctgtctactaatgctcactctgtcccagtcagtactaatgaacccaccgaagctcagtttgtcccatctaatcaagaatcaagccaaagagaaggtgccagtgggagaaagcgtaagcaaagccatgttggattagccttgaaagttatgtggagtttaaaaagatcaattttctattagcaagtgtcaggctgaattgaaagaaatggatggattaacagtcgtggacaaatcatatgctttggagcttttcgtatctacgacaaacagagagattttcttaacaacaacagagcatgatgttagagaaatttggctcaagcacaaaattaggttgcttcatggcagtgatgcatggcctggacaattgatatgaggaaatttgagtgcaaagtgaaagcaactcatggagccgacatggagaagaaaaatgcaacgacagtctacatgaagcttgtgaaaaaagagttaaatctcaaagttcataataaagagacttgtattacagttttatgttatattgtttatctttttgtgatggatggatgtattacagttttagtttgttgttgcttcagtttgctgcccatacttcagtttgcttgacaaactattgtgatgatggataaagcgtgatgtgatgacggccaaccagtttactacttcagtttgctttcagtttactatgcttcagtttactgtttactaagcagatttggc

SEQ ID NO: 34634 - DNA, 2415 bp, Zea Mays
ccagaccatcacacactacgcacggacgacatcgaggaaccctagactagagcacattgcacgggcgacggcgcgccaccggtgactggcgtcccctcctcggtcctcactccccagcatggcgacgccctgccgcagcaggggcttcgagcgtgtggagctgcggtgtcccagggagctggacccacggccgagctggacgctcggcgatgtgctcgctgagcttgacgcgctggatgccacccgccgcgctgcgccacccacgcccctgaagcagccgccggattgggctaacggtggtggtgagaaggcctttgtgatgcgggttgatgacgacgacgaagacgacacagaagatgaagacgatggtacaagtggtgggaagtcccgggctctggtggccaaaggagcaaggttctcgtgtaatgatcttgcatcaagtgattcagaggatgaattagatggtcaggttgccccataccacttaatggagaaaagggacctagcgaagagcattcttcttgagctggaacacgagcatcatctaaaagttcaagaagaagttagaagtaagctagcttcattggaggtatgccaccaaaatgaaattcggagaacgatctctgcatttgcccgacttcagaaatatgcagaatcaagaaaggagatagacagaagacttgatgtacacttccagagaagaataagtactcgataaacacttatctatggtccaaagggatcatgaacaaaaatcccagattgttgaacgccgaataagagatgatgcagctcttgaagaagctaaaagaaaagagcaagctgtcaaggaagaaaagttaaggcaggaaagagcccagcaagaagcagaggctagacagaaggaagctgcaaaattagcagctgaagcacgaaaaacagcatttgaggctgctaaaaaggaagcagcagaaaaggaagcagcagaaaaggaggctgctaaattgagagatgcagcagcttctcaacctagtccgaattcccagaataatactgcagaaggcattaaagtttttggcgataaatacgcactagaagcagagtcacggaggcatgcattagtacagaatcaagtgccagaaaacattcatcacagcaaggaattcagcaaatatgaccgacaaattgccaaatccataagtaaacttatgccaactactgacagtgtcagaacaagggctagtgagcttgttaaagctttaaatggacaggattgtccccgtccaatctcttgttgtctatttgctaacaagattatttccattgtcaagagtagaaatacaaaggacaagacctttggaaatttggcctttgcgtgtggatatgtcatgctattagttacaaatcaggtaccagacgcaatggattatcttttagctgagttcaacagagtttgcatatacacggttccaaagcatatgcatgctttgaatgcacaagcacgaaatagagattattacagactgataggttaccaggaagaaaatggacagctcgagagcactgaaagttatctaacatacgtcgttgcatatgttaaactctacgcagcaatgattcagacggaaatcaaaggtgttcgtcatcctcatggtttagctgagggatggaagtggcttgccatgttcctcaattctctcccagctactacagccactgcatgtgcccttcacgctttcctcaagatggctggttttgcacttcacaagaaatatgggtcacagttcatgaaaatcctggatgtaatatcacggtgctttttaccagctttgaaggaacaaggcaacaagatgcaggctgaggctgtcaacaatctacagaattacctgaacgacaagatctacctggaggaaccagaagggcagtacctcgtccagcaactactatccaaggagttgttcatgtaaagatcaaaacaccagatcggtatgagacatcgtgtgtgatcgtctgaagggcggtacctcgtccaagctaccactatcgcaagaggggcctcatgtagagatgaaagcaccagatcgatatggagctgttcgtgtttcagaaacacgatcgagcctttcaaatctcacgaacattatttatgggacagtcccccagatcatttcccccctctgcacgggatcctgacgatgtatttgtttatgtgacttgtatccggccaaggacaggtatgataggttgaggttttatgtttgttgtagttgtacatgtactactagaatcgtgaccagaacaaaataatactcgaccacttcggcgtgggcccagcggtggccaaagtcaaggtcaacttgacacgcgacactttgtctactctgtttgcaatgaaatctaatgtttgtgcttcaaacaaaatagttttaatataaa

SEQ ID NO: 34635 - DNA, 991 bp, Zea Mays
agcacgttgagggacaccaggctgtcgagtttaggcggcattgttccaggtttactttgttcagttcaatttgtctagattttacatattcatgaatagccctttattattggtgcaactaatattcagtcgctaaaatatcaatggcctaccaaatttcgcaaaaaaggatgagcactacacgaaccattcctgtactttgtaagccttccctcctaaaagcttcagaatcttaacatgttacagttagttcttagaagattttatgtgcatcataattctaaaactttagccagtttacacctgttatttagtctactccttgaaaaaagtttttccctttgatctaaacatgaatgcttccttttactccaacatcacagcaaaaaaaaatcaaaagcattgcacttcttactactgatacccctatgtcactactaccatacaggaaaataagagtacgatagaagaacttgaagcgcattcactggtctcttatttaaagtccataaagcaaagttccaaaaaaacaaaaagaaacattgagttgccttcacccggcttctcttgagaaaatacaaggcgttaagaaattctttagaaaggcatattattactacatatagagctaggagtagatcttcatccgaacccctccaacgacgactaggtcggcgttttctctccctgctgtttcagagactgaatttagtcgagtgggttcacctgcagttccggtatgcaaactacacgaatgatgcctacaacaagagtgggaacgaatccttgtggctgcagctgataaaccagagagcatagacttaacctttgtgctcttctcgacaggcttctttgctgttagactttaaccaattcatctcatgtcccaagttcaattttatgtaatgaggattgcatggtattttttggcaatttatctttaatgaactataatgtatagctgaagttggttgcagtttgaaacaatgcg

SEQ ID NO: 34636 - DNA, 4618 bp, Zea Mays
cacaaattcaggtaaattttacaactcaatcacattgtataaaagtgttattttttcttaatttcgtttcaaacattttatacttactgtgtattatatattaacttatacataatatttatgtatatttaaaatcttagatacgaatttgatatcgcgcatagtatgtgaaaaaaccaataaaaaatgaccataacggtagggtgcaacgcgaaatgacaagcacctccactccaactgaatttacccccttccacggcacctccagtccacttcgtcttcctctcttccccagttcagatctactccattgccaccttcctctcccggccgcttctcatgacgtctccgagcgaaaaccctaaccctaatcctaatacaccatttgagatcgggaagcttttcaggccaacgaatcccatgcccaacgccacccccaaccccatcttccccggcgtcgctggaggcccggcgccatccggcccctactcctaccctccggtgaccccgcccttccaccgcggaccctacatccactacccgcaggacccccacgccatgacccgcccagttgtctccttccccatgccaaacccaaacctcaaccccaacccgaacgctaaccccaacgccgtcgccccgggccccaaccccggcgcgcgcctcatgcagctgctcgggaactccgggccgacacaattcgagaccgccgtctccatgcccccgcccacatcggaattcgcacaactgcagttgctcccagcgatgccatccgcgccgccggccaggatgctgagcagcaccagcagcaaggtgcccaggggggcggttacttggcaccggggaacgagcggtgcacgatgttgactcgaggctgcccggggaagcgcagccaccgcagctggaggtaacaccgattaccaagtacacatcggatcccgggctcgtgctgggcagacagatcgctgtgaaccggacgtacatcgtgtatggcctcaagctcggtaacatccgtgtgctgaacatcaacaccgcactccgttcactcctccgtggtcacacacagagggtgacagacatggctttctttgctgaggatgtccatcgtttggcaagtgcgagcgtagatgggcggatatttgtgtggaggatagatgaagggcccgatgaggaaaacaaaccacaaattactggaaagattgaaatcgccatccagattgtaggtgaagctgaagcttaccatccaaggatatgttggcactcacataagcaagagattctttttgttgggattgggaactgtgtcttaagaatagacacaactaaagtgggtagaggaaaagactttactgtggaaggacctgtaaaatgtcatcttgaaaagcttattgatggtgtccgcttagttggtaagcatgatggtggtgtgactgatttgtccatatctcaatggatgagcacccgcctggcttccggatccaaggatggcacggttaaaatctgggatgatcgcaagcaagtgccattatctatttttaagccccatgatggtcaagcggtttattcagttgcttttcttacagcgcctgaacgaccaaatcatattaatctaataactgcgggtcctgttaaccgagaagttaaaatttgggcttctactaatgaagatggctggttgttgccaagtgattctgagacttggaagtgcactcagactttggaacttgttagctctctggaacctagagttgaagaggcatttttcaaccaggttgcagtgctgcatcaagctagcctgattttgcttgcgaatgctaaaaagaattctatttatgccgtgcatgttgagtatggcccagatcctgcctctactcgattagactatatagctgatttcacagttgcaatgcctattttaagcctaactggaacacacgaaagccaacctgatggtgaacaagttgttcaagtctattgtgttcaaactatggccattcagcaatatggtctagagttatcactctgttcgcctcctacagctgatagtactgggtttggtagagatcctgctatttcccgtgtttatgaggcagctctggaaatggcaggaacagagccatctataggaactagttgcacagactcttactctgtcactgctttgagtaaacaaccaaatgttgaccagtctgcagagcttgatctgaaaccatcagctccaccgcttgcatactcagaaggtgatagttccatgcctcttccatttacagctcttgcacctaagattgaggttcctggatcaggaccagcacctggaactcgtgatatagagcaatcagcttttaactatacgaatacgacaaacagaaacatggagcgtgatgctctgaaaagacaagataccccgatgcccattagaaaggatatcttaggaaaagatgagccaagagatggtcaaagtaatgttccaatgcttccaaatccccatatggtgtttcaagttggagggaatgctacacgcttggttactccatctgaaataatatcgggtactctctcatctgctgaaaacaatgatgtttctgaatctggtggggaaaatcgagatgtttccagcggaagttcttgggttgcagaagtggaaccaaagcatattgatgagagtaaaccagatcaaaacttgggacttgaagcagtcaaggaaactcagattgtttgtgagaacatggcgaaaacttccatggagcaaactgttgaaatgatcactaagcgctcagttacaactgataagcacagtgtggaagaatcacagtcatcatctgatcgaccagcatcagatcagacttgtggcactgatgaaaatgttctgaagaagtttgtggaaatgcctgagaaaattgattactctgcttccagggagcaaccatctttgtttacaaaagagaaagttttgcaccctcaaacatctggtcagccatctcctcctgtgagtgctttcaattcaactgagccacatgagcctttgagctctacatacctacctgtcagctccttcccagaagatgctgccacacaaggaatgctgcaacagctcttggatcaccagaaggacatggaaaagcagctgagtactgtggttcctgtgtccatcgcaaaggagggcaaaagacttgagacattattagggcgcactgtagagaaatcattcaaggctaatattgatgcgttttgggttcgtctccaggaggaaaacactaagcgtgaaaaggctgatagagagcgaatgcagcaactgtgtactctcattacaagctcaataaataaggacttaccttctaatctggagaagtcacttaagaaagaaatttcttcactcgggcctgttgttgctcgcgcaattacacctgttgttgagaagtccataacctctgttgtttctgattcagttcagaaaggggtgggtgacaaggtgtgcaatcagctggagaagtctattactggaaaacttgaagctacgcttgccaagcaaatccaaatgcagttccatacatctggaagacaggctcttcaggatgctttgcgtactagctttgaatcattgcttgttccagcatttgagcaagcatgcaagacaatgtttgagcaagtagatggtgcatttcaaaagggaatgtctgagcactccaatgctattcagcagcaagttgaggctgcacatactccgttagcgctaactctaaaagaaaccatcaattctgcttcatcaatcacccagagtttttcatcggagttacttgatggcaatcgcaagctattggcacttgttacttctgggaatgccaaggcacataataccagtgctttgcagcccattaatggtcctatgggtggtccccaagaggttgaggctccgttagatccgatgagagagctgagcagactgatatctgaacgcaagtttgacgaagcatttacaatggctcttcaaaggagtgatgtttccatagtgtcgtggctgtgctcccagcagctagcaattgacattcacaatgagacatcacggaaggttcaatggatgacagatgttgccatggcaatcaacccagcagaccagatcatcgcggtgcatgtgcgaccaatctttgagcaagtctacagccaattggcccaccaacggacactccccaccacgaccgcatcagatggcaccagtatccgtgtgatcatgcatgtaattaactcggttctgcttagctacaagtgattgcagctatgcaactgtgggaagtatggcctatttgatatcttgtatagagaaattttgaatggcaaatagaacacaacccacgagagtatacttggaagagggtggaggttactctctagtgtaaattttgcctttgaaattaaaatatttgtagtaattgggcatcctctaattttctaggtcatgttcatttgtcgtatgatcaatgggtcttgtatttcagtcataacttgtagctcggacagtttggaaccaacagcagctgcttggtgttggttggtccacacaaaattttgaagtcccatgtggacattgtttctggtggcaactgcaaaattggtgttattctaa

SEQ ID NO: 34637 - DNA, 450 bp, Zea Mays
tggagattcacaggtatgtatcctggcatgcagattcaccggtatgtatcccatcatctctattctatgcaatggtttgttgaacttttttttattcagggatgcaaatggatctacattattgaagggatttaggaaaccatcaccgaacaacaacctattagagtgtactcaacatgcttacgatatctgcactgtggaccagggctctcttctgaagcaactagcaaataagagtatcagtggtggtgtagctgctgttctagctgaaagggacaaggaagagatggagatggacatagcaaagctagaagttggctccatggaaacatctgtaatatgtaggagtgacggtcctctaattctagcatacttgaggaagcctcgacaaacctgaagtttgaacgtatgacagatgacatcttggttacttttgtggatggacatctt

SEQ ID NO: 34638 - DNA, 1790 bp, Zea Mays
aggaccgccctcttcgctgcacccaatcccttgtcctgtcctcgaaccgtccgccgccgcgttcaacatgggcgacccgccgacgctcaagaggcccaagctcgagaaggccgacgacgactccacctactgcccccgcccgtcctccaatggcgccgcgcccgtacgcacaccaggcgccaccgccgccataggggcggcgccgggtgacgacgtggaggaggaggatgacatcgcggaggaggcggtcatcgccctgatcgcgcaccgcgagcgcgacgtcgagcgctgcaagctcaagttgctccactaccagtctctcctggacaccgcggagatgaagctggaggaggcgcactcgaggctcgccaggttccgagatcgcaagccgccgccaactcggtcggaacccaagccaccgacgccgccaatccagagggaacacaagccatccccgccgccgatccagagggatctcaagccatcgccgcagccgctaatccagaaggctccttcgcccgcgccgcagccgtcggcgaggccgcagcttgtcatccctgggaccagcaaccgaccgaccccgcgccctgagcccatgcctgggttgaagagggccgccgccccgtcatcgtcttcatcaccggcgccaccagagcggtcaaggaaagaggagaagaagcccaagataaagatggaacagaaggagcatcagaacttgattccgagtgttgggaaatcatctgcgactgtgcttagatttcaaggcggaaatttggtctcgagccaacacaggaggaagcttaggtgtcttgagctatgccctgctaatgatcagcttgttgttaccagtgcgctggacggattggttactttatggcaagtggagactagaggaccttctctctcatttcgtggcaaaacggatttcttttccccaaagcatagatggcctgaagatatagcttggcatccagatggtgagacaatttttgctgtatacactgctgataatggtgattctcaggtttcaatgacaaaccttatatcaggacaaggctccaggtagacagctgcgcttgtttgatgtcaggcttaggcaatctgaggttcatgcatttggttggaaacaagagagcagtgagtctcagtcggctctaattaaccagtcatggtctccagatggatggtacatgtcgtctggttcagcagatcctgtgatccacatcttcgacatcaggcatcatggccagaatccttgccagtctgttcaggcacaccagaagcgggtgttcaaagctgtttggcaccgaacgttgccatatctgacctccatatcatcggacctcaacattgggatccacaaatattcatgaaacgttttgggctgattttggcgcttggcaaattttttgttgtggattaggaaccatgaagacctgtgaaattttcaggactttgcatcaatcgaagatacagcaaattcagcatgctttcgctggacctgcttcaccattgactttctctgtgggagaaccatgcagctcagcagctgaagagccccacggttggatgtttgcgcgagctgacccaaacttttccaccttttgagctgctgctggagtggtatggtaggccattcatccgaacactgtttggctcgatgtgttgccctggttatttctgggaaggaaacagtcaactatacacattatatccaacatattcagcaatgtgtttcttgcaagcaaacgccatctgtgagagtgaacggtaacactttcgtacttctc

SEQ ID NO: 34639 - DNA, 9703 bp, Zea Mays
tctttttttttttttttgcaaagcacctctcttgttccttcgtcctcgtgtctcgctcctcgcccattccgcgctctaaacaataggcctgccatcgctcgcggaagtctccattcctgcgcgcgaatctccctcccctcccaagcgatccccattgtcgaggcccgattcggatcacctaggttttctcttcgcgaccgggcaggcggtggcgaggatgcggcgctaggctcggctctgtggtgatgaacatcgtgcggggagtcgccgaccttctccgcaaggcgccgccacctccccccgcaccggacgctggtgcggcgcctaccgcctccttctccgccggtgacttcgacgacgcgcccaccccgcgcgtcgtcttcagtggtagtctggaggagggagctctgaatgcactctggaagaattacgagaatgcgcttgataaggtcgagaaggaaaaatctcttcaaatttttgtcttgcaatttgtagagacattcagagattgggatccaaacccaattgagcaattggttgatcaagaattgggaaacaatgaaacagttgtaggatgctcttgcgggcatccttctgaggtcattcttattttgattcaggagatttctctaattacatcaacttttactgaaagtggcaacagtcctgtatctcctacaaatcattattcagggcaacaaaataacctgggtttaagctcacaaatattgcaagttctggagtgtttggaaattctgactcgctccttgcataactgtagagtattcagctactatggtggtgtacagaagattacttctctactaaaagctgctgttgctcagctcaaaaacttgaactgtttgctggctgcagaagaccaatctgcagatgaagcagtgaaaaattctagggtgatgctaaatatacttgtatgcataatcaccataatttcaaacttcatgaagttggacataactgttggaaggattccccatattaccgataccacaaagcataccccatcatgcaaccatttggctgcagtcacgtctagctctcctgatagaaccatttctgatacacttcgacattggcagcagaaagcaactgttcttgtgatggaagccagatgtgtcaactggttagtagaactattacacaccgttcaaaggttgaatttgaaagagcaatgcattgacctctcactccattttattactttgtgcattctgcgatcgactgtttctggtactcgtgctcagaatcatctcagaagcattggtgggctggaaattctattggatggacttggacttccttctagtaaattttcagttccgaggcaatcttctatctcaaaaaatgaaagggatgaaatacttctgctccagatacagtatttgcaaactctgagtgaggcagtatttggcaacgtcaacaatttgcaaattttatttgaaaatggacgggtacacaaatttgcaaactgcatttgttggcctgcatttatgattcagatgttccattggcaaaatgacagtaccaaagcttcacttacactagattctgtctctggtccaacttattctcttgatagaactgaatggattgactactctataaaattgagcaatgccttttgttcttttgttcttccttcggaggatatcggatactgttccgatgaaatagctgtcagccaaattgtattatccatcccactggcatacctggagcaatctgtgagatggatcataaggattcttatgactgtctttctatgtatcagagcgtgtaccaaggaaactgagctgccacaccacatcaagatttttgcaaagaccctacaatattatgtgattcgtatgttcaaaagagttcttatttcaacaccagctctactcccagcttttcgagaggaaggtgtatgggacctgttattctcagggaattttttctactttggttcatctatagaagacacttgttttcatactgttacggatattcaaaatggtaatgttagcagtaaccgaatatctattcattctgaaagcttgtatcgtaccgatgttaaaattcttcaagtggaagctatttccttcttggagtttgctgcaacactccatgaaaacacatataacatgccagaatgctcagcactgctagatgcacttgagcattgcatttctgatcctttgctagtcagcactcttctcaaaagcttccgtgttattctacaactcgcgacagaacatactctagcttcatttgaatcattggatgtaattacaagagtccttaaggctgcttgccgtcaggcacaagagctacggaacttcagcaattttctttgttctaatgtcagcatcagtcaagatagttctcaatttaaaaatattgaaggcagaactgaggacactcttatatgtacagagttagctttgagcctctttatggaatatgtcactatatcgatagatggaaggattctcgttttacacaatgctgattgtattgattgtttatttgacttgttccatgaacagaacattcgagaacatgtgctggagcaagttcttgccttatttaggttgccttcatcgtcagcagaagatcatacagcaaagttgcagttatgttcaaagtatttagagaacttagcacgggcaaatgaaaaagaaaaggtcaacacagagttattaattgatcttctggtcaacatgagagagatcataatgatggatcacatgtactatcaaaatctattccgcgacgaagggtgctttctgcatattatttcattattgaatggaaatttcaataaggtgactgatgagcggcttgtccttaacgtccttcagaccttaactttattacttgaagggaatgatgcatctaagaatgaagatgctgttgtattacttctaaatattttgcagaagagcagcacgtcacttcagcactatgggcttgtaatcttacagcagttgctcaaacaatccattacaaatagaacatcttgtttcagagccggcttgctaagttttcttcttgattggttttcggtagaggaaagggatgatacagttattgcaatcacagagttaatacaaatacttggtgcacacagtatatgtggcaaggacatcaggaaaatctttgcccttttgcgctgtgagaagattggtgccaaacacaagcacacatctttgcttctgacaagtctcagtcacatgctgaaggaaaaggggccagaagctttctttgagttcagtggccatgattctggtatagatataaaatcaccctttctatggccttacaatagagggatatctttttcttgctggttaagggttgaaaacttcccagacagtgtctatctatcaaaaacatcagtgtgttctgttaccactcaagctcccaccaaagcaatggagattcctttctattactcatacaattgggagggctttctccggaggaagccagttgaggtgttatgtagatggggagctagtatcatccgagaagtgtgggctagtgaaggtcgtagtttgttcagtgtgtcatcagcactcgataatgccgacaaaaatacatttcaagcaacaattatgggggggacaaagttatgctcacgacacttgcctcaggatattatttactgtgttggtggtgtctccgtatttttcccactcttcactcaattttttgatgctgcaagtgatattgagaaatgttgccatacatctgttgtcaatgataaattggtggctgaggtcattgagctagttgctactgttctggatggaaatgtgtcaaatcagcaacagatgtatcttctttctgggttatctattctaggcttcttgcttcaatcagctaccccacagctcttaaccaccaaaactctttctgcactgaagtatatgtttgacattctgaggaactgcagcatgtcaaaagtcctcctcaaagatgctatctcacaaatttatttgaatccacaaatatgggtatatgcaagctatgaagtacaaagagatctctatatgtttgtgataaactattttgaaacagatggaaggcttttaccacttctatgtggacttccttgggttattgatattgtgtgccgatattactgggaaaaggcagattctaggcatgttgttgcttccaagcctttgtttcattcagttaccaaacaagttattggagagagacctgaggtagttgaaattcgcaagcttcgtcttctcctcctgagtttagcagaaatgagcttaaagataaaagtttctcctgatgacataagagcgcttgtagcttttattgagaggagtcaagacatagcatgtatcagcgatgtactggacatgatcatccgtgctctttcacagggagaagttttttcatcatttgttgggaacgtaaattaccttggtggttgttgcattttcattaatcttctcaagagggaatttgagccagtccgtttgttggggcttcagctccttggaaaacttttgactgggattccatctgagaagaaagaaacgaaactatttgccctacccttagggcagtctagacccatctctgaaaacttaacaaaagaaataacagcggcacctcagtttttcttgaatacaatgtctgaaaggctattcaaatttccactatcagataacttatgtgcagcacttttcagtgttcttagtggaaccagtgcacaacaggttccccaggaaaattctgagcctgatccatcaagggatagaaattgcaatattttaagcttgccacccttttcccttcctcagattttgatatgcatctttagatttatgcattcttgtaaagattcctcagcacgcacaagaatcttaaatcttcttcttggtttgctggattcaaactcttcaaacatcgaggcattaatggagcacagttggaactcttggcttgaaacatccacaaaacttgaggtattcaaggactacaaatcagtttctaaaggcgaccctgacgatgtgaaggcagatgaaataagtcttgttaggaacttgtattctttggtcctttcatactacctgcgctttgttagaggtggctggcatcaacttgatgatactgctaattattttctcttaaaaactgaccagggacaactatcatgttctgatttgcttagggacatacttgatgatattgctgggagcctgcttcacaaatctgtggaagataatattttccttttacagccttgctgtgataatgttttacattttttgaaccttatacaggagctgcttatcagtcaaatgggaattaggctattgtttctctctcccagtatttcggaggaatcttcacatgataacatatggaaagaagatattaagtcaacagtaaatgatattttaaataccgagagccatggtcaatttacaagattttctgatgtaaatgaagtcagtgatgattggtggagtttctttgacaaggtgtggagtattatacgtaatttgaacggaaaaggaccaagcaaatttataccaaaggatccaaatgttgaggttgcatctttggggcaaagggcgcgtggactggtggagtctatgaatgtccctgctgccgaaaaggtagctgttgtatctggaggcggaggtattggtactgcattaggtataaaagtgaacagatttgctgagaaagcgacaacgtcgagggaagagataatcccaagaattttcttccaccttgtgattctgtacctctgcaaagctggattggagaatgcatccaagtgtgttatacagttcatgtcgttgcttccgattcttcttatttcagaagatgaccaaagcaaaaataagttgcactttttgatatggtctctactaattgtaagatctcagtatgggcaacttgacgatagcgctcgtttccatgttttctcgcacttgattcttgaaactattatatatgggaagtccatgttggtcactaatatcttagagagagatgattcggtggacgtcaacaacaaggagactggattcatccttagctttatacagaagaatcgtgttcttgctgcggctgctaatgaggttaagcacatgaaggctgttcaggctgatcgtttaaagaagctgcaggatcttcgcatgaagcttaacgagtgttctgctacggagataaagctagcgcaggccattgaagatgagatacatttaactattactgctgtgctttcagcggatgacaatagaaagacagcttgtcaacttgctttccgcgaggatcagcaaattatcagggataagtggatacatatttcccgtgctctgatggatgagagaggaccatggtctgctaacccttttccaaatgatgttgtgactcactggaaacttgacaagacagaggatagatggaggcggcggttcaagttcaaacgtaattacaaatttgatgaacgattatgtcagccttcacagtcaaggaatgaaagtacagcaactttagctgaccagctgtacattagtgccaaaattactcagaaaatgaagcaattccttgttaaaggagtgcggggaatcacagaggatagtagttacgaacaatttgaagacactaatgacgcgagtgaatcttcccagagtaatccttcagagagccaaaaccttaataatgctgcagatacctctgatcatcatgcttctgcacattataagaaagagccatcatctactaatggagataatgattatacaaaggtgctatgttcagttcgttgtgtttttgttaccccaaagcgaaaattagcaggacaactggatatcacacgaactgtcatgcatttttcttttgaatttttggttgaaggaactggaggatcatctgtttttagcaagtttaaagacaaaaaagattcagactgcaagaacgagctgggaggtgtggacagacttgacggatgccgagacagtatgattgaaaccaatggtgttttgatgcaaaaccagtctaacaagatcaaacgtcacaaaaggtggaacataactaagataaaaggagttcattggacacgctacctactgcaatatactgcaatggagatcttctttgatgattcaactgcacctatatttttaaacttttcttcccaaaaggatactaaaaatgctgggactttgttagtttctcttaggaatgaagctttgttccctaaaggaagtaccaaagacaaaaataatatcatttcattcgtggacaggcgagttggacttgaaatggctgagaatgccagggaaagatggaaaaggagggaaatcagtaactttgagtatcttgtgattttaaatacccttgctggaagatcttacaatgacttaactcagtatcctatatttccatgggtattggctgattacacctctgaaaagcttgatttcaacaagtcatcgactttcagggatctttcaaaaccagttggtgcgttggatgaaaaccgcttcaaggtttttgaagatagatatcttagtttctgtgaccctgatataccaagtttttattacggatctcactactctagcatgggaatcgttcttcattacatgcttaggcttgagccatttacaactctgcatctaaattttcagggtggcaagtttgaccatgcagatcgtttgttccaaagcattgagagcgcttacataaatagcttatcaaatacaagatggggaacctataggcgatgttgctctccctccatgggcaaagggatcgcctgaagaattcatccacatcaacagagaagcccttgaaagtgaatatgtgagctctaatctgcataactggattgacctcatatttggttacaagcagcgtggacaaccagctgttgaggcagcaaacatattttactacgtgacatatgaaggtgcagttgatctggaaaatatggatgacatgttacataaatctgctattgaggatcagatagcaaattttggacagacaccaatccagattttccggacgaagcatccaagaagagggcctcccatcccaattgctcatccactgtattttgcaccacagtcgctaacattaacatcaagtgtttgtagtacggccagccacatgtgtgctatactatttataagtttgttggagaacactgttgtattgatgaatgagggactcatattgtcagtaaagctgtggttgacaacacacctgcagtcaggtggaaatttcacatattccggaccacaggaacattcctttggaattggttcagatgttatctctcctcgtaaaattggcactttccttgctgaaaacgttaagtttggaagacaattcttagcaacgatgcaaaatagtcgtgataattatttgattttatgtggaaactgggagaacagttttcaaataatttctcttagtgatggaagaattatgcagagcatcaggcaacacaaggatgttgttagctgtgttgcagtttcgtctgacgggaacgtggttgcaactggtagttatgacacaactgttatgatctggcatgcatttcgtggaagaccaattgataagaaaatcaggggtgccaattttgaactttcagaaaaggaacaagttatagtggaaaggcctgttcatatcttatgtgggcatgatgacatcataacatgcttatttgttagcacggaacttgacattgtaatcagtggttcaaaagatgggacttgtatttttcatacactgcgtgaagggagatatgttcggtccatccagcatccttctggtgttggtttatcaaaattggtagcatcgcagcatgggagggtggtattgtattctgagaatgacctctctttgcacatgtactccatcaatggacggcatattgcttcttcagctacccttggacgtctcaattgcatagaacttagttgttctggcgatttcattgtttgcgctggtgagcttggacagatagtcttacgctcaatgcattctcttggtattgtttggaggtacgatggaaatggcaagacaattacttccctagctgtgacccctgaggagtgcatcctagcaggaaccaagaatggcagcctcttggtgttttcaacagaaacttctcttcttcgaagggggagcatgcaacgaaataaaataaaaccctccacatctggttaagtcattggctgcaagatatccaacgaatgtaaaacaaatgactgcttcatgctgaggtcattaccagcttatagaactgttctcacgaccatgtagtctgtacataatgaaacacacttttgtcatttgttttcactaccaaaagtgaagctggcattcaggaatgagggttgtcaagatattcagctggtgataatccttgagcacccaatctgacgaaggaacactggttagccctagatccaagcatcttcacttagccttcacttggtaggcattgacatctatcacaatgttattgtagcatttgacttcgttggtgttctgtgcgacagtttgtgtttgtgtagtatttatattagattccagtgcttttgtaaatgtgccatttttgtgatctaaagtgttagaaagcatcttcatatatcatatgccctcatctatctattgataatggcgttctgtattttcc

SEQ ID NO: 34640 - DNA, 2781 bp, Zea Mays
gtcttgtttccattttgccaattgccgcggcttaccttccattttggtgaaaccagagtatgttgtagtattgctaaggaacgggaggcacaaggatgaggctgcaaaggagctacatgtttttttaggcgatgacaatgatgcatttgtatcctggttgtgggatcatctgtcctcaaatttgcacctttatgttcaacctaaagctgcctcttctaaggatgacactagaagcagtcacaatgctgccagaggattgcctgttcacagtgtgataagcagcacacaagttaatcatgaacctgaagctgaaacccagaagacagtgataactcataaaaaaaaagattggggtcatcgaaaaagagattggggaacaatcggtcgaggtcaatcagaaacagttcctcttagaagcgttgtcgacaatgtttctcttgcaaaggagaaggatcttcatgagtcacatgcagatgaaaaggcttttcataaatcacattctagtgcaacacacccagttaatggtgcaccacgtcggcttcttcagtttgctgttcgtgatgctgtcagaactgtgcccccagttacttctggttcagaatcagcttccaagcgactttgttctgtagtgtctacattggcttcagattccacacttgatattactcatattaggttacagaaaacaaattcagatttgagaataccagttgccacagcagcactaagagctgcagctgaggctgctgaagatgctctcaaggatagcttttgtggaagtgtttttagtagattgggcagaatgcccacaataaattctagtgaacaatcacctgatcgtagatcacaagatcttgaaggcaaagaatatgagaatatagataacatacaagctgaaaatcaagttgaattttatggaagaaatcaacatggtggcagtgatgtttacatgcgtgatcggagaacagaggaagccacaggttctctttctaatattgatgagtatggtcacaacagttctgttaggtataatggattgggttctctccgaagtgcattgcctgctagtggaggtaaagagtcattagtactggggtacgtaagaggagcttctgaagtacgaagcggaagattgatagctcaggggccacctgctggttcaggaccaagatcatctgaaaagatcctaaatgtttctggtaacactaagacacagaagcttcgaactcatgtaactagggatgcccttgcatttgaccctcaagtgccaatggagaaggtttctggtgcaaggaagtcgataggtcaggggccacatgctggttcaggaccaagaccatctgaaaggattctaaatgtttctggtaacactaacacacagaagcttccaactcatgtaactagggatgaccttgcatttgaccctcaagtgccaatggagaaggttgctgatgcaaggaaatcacatgtgaagattgcacatgctaacgatatgtccatgacaactgataagtccaaagatttgatacagtcaagttcaatgctggaggcacaaaaggctacatcaggtgctgctggatcaaatactacaggtcaacccgaaggtggctctgattctagaactgtctttgttagcaacgtacattttggtgcaacaaaagatgctctttctcgacacttcaataagtttggagcgatcttgaagacccatattgtgaccgatggtgtcactgctcagcgtatattgagttcttgcacaaagaatcagcagagcaggcgttaaccctgaacggggcatcatttatgttacgcattttgaaggtcgttcggaaaaactccactgaagcaacccgatcgcctggcttgcttcgtgtttcgcggggatcaccatttgcttcaaggctcattagaactgcatacccaaggccaacgtttcctggtgcaatccgtggacgactgccactcaggggtgttgcccagagcttacagtggaagcgcagtgccacagattcctcaaatgctgtaaaaccaagtcaggctgcaccttcagctcctgggaatcagttggtcaccccgaccccacgaagcttcacctacacacgcacggagccaaaaccaaatgacggtgcgatggcttgactgctcagctgcagcatgccgcagctcctgatgaatctcgcagaaagagttcgtgatactgttacgtggttcattcagctgcttttggtaaatatttaagtagctgcagatgttagtttgtagcaggctggtttttgtggaccaaaacctttgagcgatattctgtgaggttttctgtgctgtttttcaccgtcagcacatattctgtgctggctggctgttcggagttcgtggatggagagtaaaatatatataaaaaaagtggtagtaaaggaaaacacggacgcgataaaaacgttgcaacatttgttattattttttgatggattatttagcctccacggtttccttgtcaaggggggtgatctgtgagattgatcataatatccaaactaccggatggtcttgctgtctcagttttgtaaatagaaaaaccttcacctgtggggtatggttgcctactgcacgtctgcacattagcaagtgatggtgcgtgtttcgactcaaatgtttttttgcatcctgtcttgtgtagaaaaagaaaactgaagacctgtctgttctgggtgtctgctgtatctattttctcagagagaagtgcattttatcttggaatcagcgggactcacgggtggctgaagt

SEQ ID NO: 34641 - DNA, 3865 bp, Zea Mays
gtccccacgtttgcctcttctcgacttctcctgtagggctgttcgtgttttttctgctttcgcctttttcccagcatttttttcctctcctgcgcctcgccaccgcttcctcttgtcgcccgcctctctcatcgaccctaggcgcgccgcctcgccgccgccgatcccgcagccgtcgatcctggccgctccgatagccggtcagtccgtccccatcatcccctcgctatcgatcgcctccgacttgcgtggttttccggcgcttgcacggccgcgacgcgactactcttggagtcatagttcgtggattgtcaatcgaaagttgattccaagcatggaaagtctaccaaatggttcagtaaacaatgcggagcataaccaggaaaacaagaagtccatggatgctagtgtgcctgaagaagtacaagatgtttttatttacagagaagatgttgtgagcttgaagtccaaggaggatgtccgtggattagttttagaggtagctggggaatatgattctgaaggtagcatcactgatgatgatattgatactgaggaacatgaagataaaactgttcgtggagcagaaaatggtgctgctgatggtgataatgctagtaatggagctgaagttgaaagccagagttctttgccggataacaaagttcgagtgttatggcttgatgatagtgaaaaaacagaagacattgatgaggtagttgttgttgatagaagtttccttcatggtgatttagttgcctctgcctcagatccaactggtcagatggggcttgttttggatgtcaatcttgtggttgatttgcaaggtgtgaatggcgatatgataaagggtgtttcttccaaggatttgagacgaatcagggaattcaatgtgggtgattatgttgtctctgggctatggcttggtcgagttgatgaagtgctcgatagtgttaatgtgctttttgacgatggctctgtctgtaaagtcaatagagcagatcctatgtgcttaaagccagtatttggcccaatgcatccagatacagattgtcctttttatccaggacagcgtgtgaaggcagtgtcatcatctgttttcaaaacatcaaggtggcttaatggattgtggagagcaagtcgtcttgaaggtactgtcacaaaagtggaaagtgtttctgttatagtctattggattgcatctgcacactttgcttcagatcagcaacctgttcctccagagaagcagaacccaaaggaccttactcttctgtcttgtttctcttatgcaaactggcaattaactgactggtgtcttcctcaccgatacactttatgtactaatgataccgtgattaattctgataagcatacaggtcagatctgtacatgcccagaaagctcagttccactgtctgatattccagaatctcaagctgatgttcagactgaacaagatcaaatgactgatacagatgcaggtcataggcaaatagatgttgattctactgcagatggattgagtatgtcggacggagataattcatgcatagccaaagaatcagaaactagtgtatcaagcattctaaaggagccacaggacaatgcaacatctaggaaaaagcttaggaaagtgtccctaaaaaaacataaaagaacgaaaaaaagagacgacagctttgagcgagctctactcattgcaaatacttgtaccaaagttgatgtaatctggcaggacgggacaaaggaatgtggggtagccgcaacatcgttgattcctatccacaatccaaatgaccatgagttcttccctgagcagtatgttgtggacaaggtcacaaatgatgttgatgattcttctgaaccaaggcgtgtgggtcttgttagaagtgttagtgctaaggaccgaacagtaactgtatcatggtttaagccttcgctacatccagaggagacaaagaatatcgtgtgtaatgaaattgtgagtgcatatgaactggatggccatccggattatgattattgctatggagatattgtcgttcgcttgccgcctgtctcacctgtaattgaatcaaccaataacaaggatcaaatggaactagataggacggtcgatgcctcggaaggatttgctgcctcaaatgatgcaccctctaatactagtgcaagtgaacaacttttgcagaaggaatcctgctcgcagtttacaagcctctcatgggctggaaatatagttggctttcaagacggtgagattgaagtcatttggggtgatgggtcgatttcaaaggttgggcctcatgaaatatatgttgttggccgtgaagatgatgatgcctcactagatgacggaacagcctctgatggtgctagctgggagactgttgatgacaatgaaatggatgtacttgatgattctgcaaaggatgattcacaaagcatacctgagaatagcattgaaagggaagatggttcattcagctcccagaatggaagttctgttgcaactggtcccctttcagttgcttttgggtttgtgacccgactagcgagtgatctcttcgctcgaggtagaaggcatttagatagatcgtcaaactcggatgctatggatgaagttgagtctcaccagtctaatgaagtttcagaaactagtgatgacattgataagattaatgagaataatgtggaatcgccagaggatgctgcagtaatagaaaacgattcttctgtcgagaagtctgtagatgtggtcatggctgataatcttgtagatttggaatgtttcaaacactttgatattctgcaatgtcctccagaccaccattaccttgaaaacatagcccagggcacgggtggaagaaagtgggtaaaaaaagtacagcaggaatggagcatacttgagaagaacctaccagactatatttatgtcagagtctttgaggatcgcatggatctcttgagagccgtgattgttggagcaagtggaacaccctaccaagatggcctgttcttctttgatttctaccttccacctgagtatccgcaagttcctccgtcagcatactaccattctggtggtttgcgtgtaaatccaaacctgtatgtggatggaaaggtttgcttaagtctcttaaatacttggaccggcagagggaacgaagtgtgggacccatcatcatcaagtattctacaagtactggtttcacttcagggattggttctcaatgaaaaaccctattttaatgaggctgggtacgagaagcaagttggtactgttgaaggggagaagaatgcagtgccgtataatgagaatacgtacctgctgagcgtgaaatccatgctgtatatattgagacggcctcctttgcattttgaggattttgtgaagagccatttccgcaagcgtggccactacatccttaaagcctgtgaggcatatttgcaaggaaatgttgttggcactctcactgacgacgcatgcaccaccaacagaagcacggagcactcgagctctgtcggcttcaagcttgcactagcaaagattttaccaaggttgattacagccctgaaggagcatggagctgattgcgaccaatacgagcaccttggcaaaacagaccccgttagagagagctgatcattgagtgacttgtacttggatcttttgccttttatatctgttcttttttcgggtttcagaaaagatggtgacttaataccaccaggctgttttcgtataaatgtacattcaaagtttgttgtttccgtcaaacatttggaaaatatggccccaaatgatttattcgatacatggaaccgagctaccctgtgcagttgatgtttccgttgaacttgcagg

SEQ ID NO: 34642 - DNA, 887 bp, Zea Mays
cctgaccacacggcgtccttctcttgagcagctggttgttgctcgttctcgcttgggggctgtgtgccgtctcacagcttgacgcctccaccgatcctccacaagggggttgaagaggactggaagggattgatgaaggggtacaagtcaaaatctgcccttaagcagttccaacagatgctcgcaggacacactgagagattttaagtgtcggaagggaaataatgatggagacaatcatggtgagtgctgcttgtggggtgatgaattccctgctgcgcaagcttgccactctactggagaaggaatacatgctactgaaagatgtgaagcacaacattaccttcttaagaaatgagcttgctagcatgaacttgctcctcttcaagctggcagacatagaagatctcgacgtgcaagtaaaggagtggaggaataagatccaagaactcagaacccgtgttgtggaggagagcgatcgccgttatagatacaagctggacgattcaaccttcaggcctgaaatgatggaaatcgaccatcgtctcaaggcgctctatgttgacacaaacaagcttgagggcattgatagcccagtggaacaaatcatacagtggcttacaggaaatgggaaacacgatcaagaactaaacataatggccatagtgggcttcggaggtttaggcaaaactacccttgcaatgcaggtatacaataaattcaaggacaaatttgattgcacagcttttgtgtcagtgtcaagaggccccaacatcaagaaagttttgatggacttacttaaagatgtgggagctgccattgacacaacagatgatgagatgcgtctcatcaacaaactcaaaggacatctcacaaaaaagaggtaa

SEQ ID NO: 34643 - DNA, 2819 bp, Zea Mays
tttaggtaaactatggggatgtttagatggccgcctaagccgccgccgcccgccacacttcccacgccaccagtgtggcgctcgttttgagcgccacaggtgtggcgcggcgtggccgccggcgcgccgatccaaactagccctatgtatctgcgcaccgtttaacatgtcgccgccggttggaattccctactccattccgagctgccgccatcgccaccactgcgccgccaattcgaatcggatccccactccgttccgagctgccgccatcgccaccgctgcgccgccgattcgaatcggatccccactcctttccaaactgccgccatcgccaccgctgcgtcgccaatgggctcgacgtgcctgtcgtgcggcgagggcgcggtggtggcagacgcggactcgggcgtgctcgtctgcacctcatgcggcatcatccaggacgccggcggcgcggagttcgtccaccagtccaccttcaacgagtcggggggcctcgatcgccgcgtctcctccctcgtccgcaacgactccgactccgcctaccgcgaccagaagctcgccatcgccaccgcgggcatcacctccatcgccacccgcctcggcctgtcccacacccgcgccgaggaggcgctccgcatggccaagtccgccaccgacggccagctcgccaccccgggcagcgccttcctccctgccctcgccgccgcctgcgcccttctcgtcgcgcggtcccaccgcctcccgctctccctcgccgaggccgcggaggccgccttctgctccgcgcccgccctcgccgacctggtctcccgcgtcaccgcccagctatccctccctcccctcccatgcttcgactacaccgccgcgctcgaccgtgccgtgcacctctcgacctcgctcaacgccgccgcgcccgacaagacggacgccattctcgcccaggcccggttcctcttccgctgcgcatccaagtggtcgctcaccacggggcggtttccacttcccctcgtcgcggctctgctcgccttctctgcggaggtgaacggggtcacttctgtctctttggaggacattgcaagggacatctcggcaggattgaggaccagcctgctccgatacaaggagctcgttgacgccctggtgcatgtcgcggggcacctgcttccatggggtgccgatgtcaatgccaagaacctgctcctcaacgctccggtcttgctccggctcatggagatgcggtcacaatcggacccttctgaagagtttcttatgagctgcgctccgaacattgctgcaattgtgcaggctaactctaaagttgatgacgaagtgtctaaataccttcacattactccagtgggttctgatgactttgatttcgataatcttgagccagaggagaaagaatttgaaaatcagaatatctcagagaagggcctatcagatgcttaccaaaatgtcttaaataggcttgcccagctacagaaacttgggaaggttggtaaaggtactgacaggaggaagcgattgaaaggaggactggagctggagccatgcatggacacagtgaataatggttggagaaaggacatgctgcttgaggatgtggtggatattgacgttggctatgatgcacctccaccatcgtttactgctggtttggagttgcagaagcagaggagagcacgtattgaagctgctaagcagcgaattgatgcaactaggaaggctcctgctgctccagctgcaaaagcaaataactcagaagacgttgtaagaaaaaaattgaccatgaagaatcgagggggaaagaagaaggatgatatcgatcatatccttcccagtgacaatatgacaggttgttcaggtgctaggaaaaagagacgaagaggttcctgtgacagtattgattgggaagattgcatcattgagctcctgctactgcatggtgcaaatgaagctgagattgaacaaggccagtacagaagattgttggagttgcatgtattcagtgcagtaagtggggagaattgaaaaatgtctcaagtgttcgccgttgccttcgctgtattagctgctggtgctatagttctgacactcaatgttctactgctgggtgggaacatcatcttcttccaaagcctcagtcttctcggatactgtctgttcccgctggacgtgggggctctgatttgcatgcttaaggacagcgtcatactaaagatggttgtggtgacggtaacattggcatggagctcttgggcagcataccccctcatgagtgctgctgttaacccaaagagaaaggccctggcgctgtatcccgtgttcctcatgtatatctcagttgcatgtctcataattgctatagattaaggcgggcatggtttctacagaactaacagaagaattacaggattttgttttctagctggatcatcaaaatgcatattattttctttttttggctgcgtatagatctgggttcacattgttattgtagtttttgctggctgcttcaatactttatttcattttgtttaagaaaaaaatcacagggatttagaatgtagtcaatcaaatgtatgaatgttgtatagccatacagatatcttgctgtttcgcatctatgtggataatctggaatggactgctgaagcctgaataagtgaattactctgttttaccatttcgtttgggggtgtggactgtagaacagttagggggtgtttggtttgtggaatcacttcatctaaaatgtagtggtgcatcatgggtccattcctcaaatttggtgggatgaccttattcct

SEQ ID NO: 34644 - DNA, 4048 bp, Zea Mays
taccgtagctcataaaaagttacagagggtgaaagattaatagttccaatctggcgtggatgtgtgcttcataataccaaactagtgaagcacagctgcggagtaataaactggcgaagccgcgtgacgagaatgttacaaactcaaataactcctcctctcccccggcttcagcggttcagctccttcacatactgacgtacacatctcctcgccgaggttgctccgtccggtggccagaccgtggttcttggcgctcttggttggtcggggtccttggcaaccggacgtctggtgttcctgtttcgaccttgaacttcttgggggtggggttttgggggcgtcacctccctgtttgtttcttgggttgatgtggcggcggcgcttcctgtgaccggaggggccaaggaggtgggactttttcggtgaagggaaaactgcgggaatggaaggcgaggcagcggcggccgaggcggtggcgcggatacggctggtgcggtgccccaagtgcgacaagttcttgccagagctgcccgcctactccgtctacgtctgcggcggatgcggcgccactctccaagcaaagaagaagaattcagcccaatcttcagatgatgctgacaatggaaatgtgaaataccttgaagtactggagtgtattccacaggcatctgcaagaaaacatggagctagtactactgataagtcagaaaccagtaagattgcagatgtacatagcaaaccagtttatggcaatcatgataggattcagacagggccaagtccctcaaatctgaacacttctattagagatgatggcaaggaggcaaagtaccgacacattcgttattgcgagaatggtgaaatggggcaatcattgagagtaagagacatgtccccgaagtctccaatcaatcacatttcagacaataatcggagtgagtaccacttgaagcagaggtacagctattctactaaggaatgccctggtgaaagaaacttggatggtccaagcaaagtcaggggacttgagaaagaccgcgctgagatcttgaggatgcttgatgagttgagagaccaggtacagcaatcttgcaatgcgactaatggggcaagtggaattgccccatctactgcagcagcagattccaacagttcacatggtacttctgaccggttgagtcaattgaggcaggttgcaccacaattgcatcagaatggttcacatcactccccatccttgaatgttggaagtcctagcgtttctcgtgtttatgctccgctgcctgcacaacaagattgtgtcagatatgcagagcctatttcacatgctcgagcctctagctatcctgccagcctctatccatggagaaattttgataattatttctttggacagcatgatcccgatcctcttctctcttgccgccatgatggcttctatcaccaagctgcctgttcttgcttgcactgttgccaccaagaattcttgcctatacagggaaatcacataggcttccatgatcaaagggcaccatatcttctgaacaattatggggcttatcctgtggacagtcccttacttggtcagcaaagatacagtgcaagagttaccaatactaccttgcagcagaatcacatgagggtcaacgttagcaagaaggctgcacagacttgtgagccagtcgcaggtggtgctccattcaccatatgctgcaattgctacgaagttctacagataccaaggaaacagtccctgtcagggaacgagtataaattgcgttgtggatcatgctcacatgcaattatagtcaagcttgatggaaacaggctcaatgtatcagaatttgcactatgtacacgtttatctgatggacaggaaaatgacatgggaaccgatgggcaaactcaagacaataggtccattccagcttaccatttatctgttggaagtcctgcatctcaagaacgagatctgcactcaaatttgagcgagtcagagaacaatcatacccctctaggaactgactcagagggcacttccctgtccagggatcttcctgctgaagacagtgcagtttcccatgtaccaaatttaccacatcacagtcattctggatcatctccaactgaacattttggagtgggaagtagaagtacccattctgaacctgaaaaagttatactattaactgaaagttccaagcagacctcagttagaggtatatgtgtaacaaacaagatgcaatctccaaacaatgagtttgatgttcctgaatacacagatgatacattaaatgaccaacaagatactgaccaccctagaacaacaaaggccagtgattcctttctcactaatctgataaaaaggagcttcaaaattaataatggattgcgcaacagaagagcaagggtttatgtaaatggctttcctatctctgatcatgtggtccgaaaggctgagaagctagcaggatcaatctgccctggcaattattggtatgactaccatgctggcttctggggcgttatgggacatccctgccttggcatgataccgccttatattcctgagttcaatttccccatgcccaagaactgtgctggtggaaacaccagcatatttgttaatggaagagagcttcaccagaaggatttggatttacttgtcactagaggactctctgattcccctggtagatcttatgtagttgaaaattctggaaaggtttcagatgaagtatctggtgaagagctttatggccttggaaagcttgcaccaacagttgagaaaatggggcggggatttggcatgcgcatcccaaggttcatcaagcgacaggccaacttggtacagctagacttctaaaccttgaaggcaaatcgatggggcgtggatttggcatgcgcatcccaaggttcatcaagcgacaggccaattcgatctaccgtggttacttcaattgtgaagaaagttccattccatgtatctttctttttttattatattccgattaacatgaggcctagtttagtcaatcaagtttattgtaatttcccatgcatttgtttttactgaaaaattccctttttcatttacatgtgcaagaacaatgaagcaattacctagttgaatggcatgaattgtatcaaataagggtcggtttgctttatattaaagccagctattcggactgttgcaactgcaatctatagagacaaaacattgtagaagtagaagtccgtatagattaaaaccaaacgaacatgctgtaagctaaaagggaagtaatagctatgttatcccatgttgagttagttaggtcatcattattaatatccttggtagctattgtcaataaaatttagggatggtagaaacaagatcaaaagattctttgaactttcacatcactatactccatttcccacacaacaagccaacataatcataagaattacttgttagatactcgtgccttgcgagggtaggacactgttggggcctgctctgttgaatgtcctcataatgcctttatttcgcgtgaacaaatgtgtttcaggtacatagctgatggcggacgaagctggccttcggctgaagtgctaccaagaaaaacccctggaagtgctgcctataaaagctgaagtagtgtgaagagaagcttcgtctaacacatacaaacggcaagggtgtaactcgaagccacaagcctcggcatgaagaggctttcaggtgtaaagtgacgaagtagacgaagtctgagacttgtgcagcaagaaagaaagagaaaagatagcaatgtccctgcatcgttcgtaaacatgtgtgtaaactttatggatatgtttgtaattttccacgaagctatttatcttcgctataaataggtgaacaatgctctacataaattcacctttttgaggaccttaccttcgttttgcttagccttcgaagtatctttgagccatcttgtgtggagaagccgaacgtatgtttgtaaactcgtttaatacgaagagaaagggaatgaaaatgctaaggcat

SEQ ID NO: 34645 - DNA, 2846 bp, Zea Mays
  misc_feature (2845)..(2846): n is a, c, g, or t
cttacactatattttttccagcttatcagcaaattaagagatcttctacagtagcaagggctaagacagacacgatacgatatattccatatatatattcagtaaaaacacaataatttaatgccctctactgtcaaatgactaaaaagagatcgtcattgcaaaatatattgttccataccagccagctaagacgtccccgttcatcggggtccgaggagtgaccgaattctttcaggacttcttcccaggccggaataagcagtctctgcgccaaaatagcatccttgcattagaccatgcaccgtaccaccagcagcagcatttataggacgtccaattttatgttcgctgcctttattgttggttcaatcctgtcttcgcttctatcccgtacctctcccgaccgcaattgtagcagagaaacttctgggagctgactagcttccttgctcctcggtgttgtcatcttggccaaaaaaaaaaacagagagaggaagtcatgcatgtgcatctgcatggccaaaacaggcttattttcggcccaccttgctcgcacacatgccccccctctcttctcccattatataaccacagagtagaaccatttctcttctcaaggatcaatgtaatatgttggagagattttttttacccgagaagctgcgccgcgcgccaatctgatcatctccatgcgctgaagatcgttggtgcccgccatgcttcccgatgattgctgccacatcgtcgctgaggaaatttcaagccccatagctgcacatatactcgacttctactacggcgacggcctgggcgatgacctctttgccgcggtgactgccacctctggcccattccctgccactgacgatgatgtttcttcgtctaccgctaccacccctcctatctgcggctacagtgaagacaccgcagctgctggtggagccacagcctacaccccgttgacatccttcgacaccactctcacagccctcctggaggaagagcagcaccatggccttgacgccgggttcctcccgcagatcgatggcctatcagaggtagcagcatactatccaactgccaccgatgaggccagcatagggcagttcgaccagatgggacttccagagaccttagacgagcaggtgcctcctccagtgcagatgagcagcagtgcatctgccttgatgccgctcgctacagactatgatgagtgcttcatggcagccgtagcagctggagggttcatgggtctggatggagccatgtatcagcaaactggagcagttcttccaggctccgacggaactatcagtactggaagactccacgtttaaggtcgtccgcttgtcgcctgaagagagaaaggaaaagatccataggtacataaagaaacggaacgagagaaatttccgcaaaaaaataaagtacgcatgtagaaaaaccttggcggatagcaggccccgtgtccgtggaaggtttgccaagaatgatgaactctgtgaagcagcgcaatcaggctcccagagtcatgaacattatgaacaaactgaccatatgaaagaagaggacatgctggacacatctgacattcttgcgcaactaaatggattaaatccctacaactacaagtataaatccaccattgaatcatggatatgattctcaagtctcaaccacacaaaaactaagacccaatgtcttatttgaagttgtgcgacgtcgagcacagtttttttatttccattaaaataaacttacatcattagaagctcaagaatttagttcaactaatgtagatttaatgtatgtgtcaatctgctgtcacttgtttaccattgtcacaagtgaatgtggtagtgagtctccagaagagtcatttgtgtatataactatgtcatctatagaaataaaagttctgaggatctcttaagtatttcttcgtagcagagtctagatttgatctgctcatcagagaatttcaaggatagaatgtagcaatggtacatcagagaatcaaaaaacatggcaacagagcacagtaataagtaaacttaatatattgggcctttttagcctgtgcccttatgtgcagaaggatcaagagttggaactaacaagaacaatatgaataagcatagcaaaaatgttcaacattatactctttgagtttagtaaggttaatgatcttgctgataaatcataggcccatgaaattccagatatccaattctgttgattttctgtttaatttgagttatccaagaacaaactacagatctatagagagtaatgtatccacagttgcattacggcaaagagtaaaatcttaatgaactaaaaggtttgacgctacggggtaagtaggcaatgtaccaggttgcaaatctccattacagctaagctacaatgagtggtcaaatttacaaactatgcttcacccaaaccagcattctacagaattggaactccgactggatggcaatctagaaaacaacactcagaattccatgtcagaatttactctggcaaaaaagatttgatcgatgaaatcaatacgattggatccttaatgaggtgtttggtttgatgaatcactctatccaaaatgaagtggtgcataataggttcattcctcaaatttggtgggatgactctattccacatattagtactaaacaactaactttgaggaatgaggtggtgatggattaactcactccatttcacaaaccaaacaaaaaagtgaagtgtgagaagatgatggactacatcattcctcaaaccaaacactctataaattgatgtacagtttcttgaaccacacttgtctattcgtacnn

SEQ ID NO: 34646 - DNA, 298 bp, Zea Mays
atggagccagctatgcgacattccctctctagattcccccgagaaagcaatccagcactcatgaagaatgcagtgccgcagcaggttcaaaaggctggtgaggttgccgaacagcgccgggtggagcacgccggagagcaggttctccctgaggtcgagcacctggaggatgccgccgagcgcggcgaggccgacgggcacctggccctcgaagtcattggacgcgaggctcagcgcgaccaggccccgcacgcggcagagggaggaggcggcgagctcgcccgagaggccgagaccc

SEQ ID NO: 34647 - DNA, 2503 bp, Zea Mays
gaaacagaaaagagcaggtcgacagttgaggtgttgaactcggaaagcctgaagcgcgcagccctcggaagcgaccgccccgccgcgctaccaccgcacgccccacctactactcccctcgctgtccctcgccgtcgccgccctgatcccgcgatgtcctcgtggctgcggagcgcggtgagcaaggccgtcgaggccggcggccgcagcggcgtggcccgcacggtcctgggctacgccgacgccgtcgcacaccacgccggccaggccgtcgccgagggcgccaagattatcaacgagcgcgtgagcactcagaacttcaaaagtgtgaagcaaacagtgaagcgattggaagaggttgcggtttcatcacgcagggatgagagagttcaagtgctaaggcgctggctcggagccctacaggaggttgaggctgaagttggaggttcgggtgggtctcagaggcagaatgtctcttcaagcgagccaaactcttcgaaaccatcattggccaaagttttgttttatgatgctgatattggagggcctcctatgaacttccgagatatattcctttatagccacgcacttgagggtattacgttgtccatgaatatgtcttacagggggcaaagaagttaataatgctatagtgagcagtatacaggacctggcaaagtcattctcaaattaccatgatgaggtcctggtgaaacgtgaagagttacttcagttcacacaaagtgccatttcaggtctaaagaggaatgctgacattgtgaggatagattctgaagctctagatttgtggaagaaactacatgagaaggaggcatcacgagctcaatcaattggcgatcctgataaagttacagaaaagacttcaactattgagtctttcaaagaagcactcaacgaagtccgattttgctctagaatggaggaacttctattgaagaagaaaacaattaatactggggattccttagagatccactcccaaaaggttgagaaattaaaggtattggcgacttcccttgctaattcatcctccaaggcagagaagcgtattttggatcacagacgccagaaagaagaggctcttaactttcgtgctaaaaaggagaacgaagtgattgctgttgaaaaggatttgactgctgagatttctgaattggagaagcaaaaggatgaacttgaggctcagttaaagaaggtcaacatttcactgaatgctgctatttgtcgactaaagcagacaagagaagagagggaccagtttcatgaagcaaacaatcagatgatatttactttacaagcaaaggagaatgacctgtcaaaatctattgactcatgtaacatggaggccagtgtagtcaagacttgggtaaatttcctcgaggatacatggcaacttcagttgtcatacaatgaacagaaggaaactaaaacgaatgacgagctggagagatgcacaagcagttttctgaagttgaccaagcatcatctttcctatttcaaggaagttcttagcccgtcaattgagcggatacgcacatacgtggataatttggcagtcttaaactctagggaggagtcaatagaacatgaaggggatgatgagatttctgtgcagacaagtccacaaaagtcccttgaggaggaatatttggaaactgaaaagaagatcgtgattgccttcagcattgtagatcgcatgaagaagatgttttattctgagcaagcggctaattctaggcaagatgatgcagaggtcaggaccttattttctgagattgagaaactgaaggaagtgtttgagtcggtagaaaggccgacactagacattgaagtccgcaaggcaaaggatccaatgaaggacaagtctggatcgaatcgttcagccaaagacaaatctgaatcgagccattcacctgttcaggtgccctcttcacctaaagatgtgcccgtggagtctccgaaatctccagtgaaacctgagcagacgatggacccagattcagagtttgcaaagttagagctagaattcggaaaagttaacagagaccatgaggagataggcggttgggatttcgacgagcttgaagaggagctgcgagctgacctatctaaatcaaccaatccaaaataaccacgctcaacccgacatctctgaacgcgcattccacctaactttccttgtgctggcttcttctgaaaatttgtagactttgaattgttgaatgtacatagtattgttgtttcattgtgtccatggacgttctatagattatactcactacatgggaggtggagattgttacactgtagactgacatttcattagcttatttgtttggtcttgtcatgtgcattcatacatgaatgaatgaatgataaacattatgtagcattccacattttggacattggaacatatattaactataacgataaaatgctcttggtcttggatgtccctgccaggttttaattaagcaga

SEQ ID NO: 34648 - DNA, 474 bp, Zea Mays
gaccgggttgtcagatccgtcctcccaaccaactcgtgataggcgcggccgagctccccgcgccgcacgattccagcggacctggcgcctgcttgtcctcctggagtatatataggacactcctgcctcctccttggccacccaaacgttgagagcacgcaaatctgagggcacagggggaatcgcggagcgcgccaaaggaaaagcaccaccgccgcgggcgggattgaggagcgtcgccattcggggtctggattcgtgtctgggtgcttcgtggagacataaggaagataagaggcataaatttaggacgcaaggacaaacaaatcatcgagaattcgtcgccggagtgctccctccgccgtagagccacgctacaccatcgaacaacctcgccaccacctctaccctcgcagtgaggtcacgagaaacttgaagattaacttggagaaatacctaggatctcaagtctaa

SEQ ID NO: 34649 - DNA, 544 bp, Zea Mays
cggatacggaacatgagtggtttttccgtccttttccgttggttttcatccctgctcacatcgttgtggtcgcccgcacaattagcccaccgcctccacctcacccgtggcccctagcggcgcccgtggctgcatcgccgccgcgccgcccatgaccagccgcgcccgtccacaccctcgccgtcgtcgtccgccccgtctccgcgcacccaccgatcgcagcacctgtgccatctccgcgcgctcatgcgtccacgaccacgcaccctgtcgcccgccaccccgctcgtcaccgccacctgatgcgcacagtccaacgcacggttctgctaaacaagtgcattatttttttgaattgtttgcatgcgttgattaattgcagttattttacatacatataaattttttttgtatgatcaaaattgtgtactgtgctattttcaataaccagaaagtgattattcaatttatttataatgttttagttcatttagaggtgcttaagctaaatttgtaatttctgagtgtatttattaaaccctcg

SEQ ID NO: 34650 - DNA, 2114 bp, Zea Mays
ggtggtactggatcacgatccaaatatttcttcatctgcctcggaaccctagctgtggcacgcacccaggttgtcgtcctccccaccgcaccaccaccacggccactgctgcgacgatgacgagggtgaccgtcgatgcctgtctgctgccacctgaccagtacggtcgcgtgcccgtcgacccggatccgtacgcccagctttcgtgacaccgatgcggcacccaaggagggtgcctcgcgggggacccagacctccacctcttcgtcgtcttcaatggctggttagttcaactaagatattacatgtttacagacatgctcttttccccctttttcctatttaatttacaaaatactcagatcttttagtgagtgcaatgttagctcacagtttagggtttagggttttctttttgcacataagttgtggctcatgagttaacatgtttctctcttcagcgctatctgtgttaacatgtgtggtgcacgatgcctaaatgcttgcagtgataaaaatgtgatagttctcctcttgatgacatatttgtggtttccataatatgtgtaaattaaatacaaaggtagtgatgtggcgtctctgttgctgcaattgccaagtggatgaaacagatcggtgtgagagtcatgtcaaggccacaaccaacaaaattgacggggtgacgaagggtttgagggattctgctactgcaaaagtcgagccacacgatgatgctccccctatcgatgtcgatgttctatccttggatgatctgataaaaaattgttgactttggttcaagagccttgataggtgaaggtatttatgggacattgtactatgcaactcttggtaatgtaacaaaaatgacagtaaagaaactttactgaaaatgaacccattgtcgagttcttggtcgaggttggtgttgccattgattattgatcacgggggttactaccaaacaatgatgcttacttctgataccaagtctcattggtttcaaggatgacacatgaaaactttgttgacatgttgggggaccgtatcaagcgtaatcttcgcatagtatcctacgaattcgcgaccatgggttctctccatgatgttctacatgggcgatgaggcggctaaactaaatagagtggggttaagtccctaattgccttgcctgcagttgacttgcaacattttccctgggatgtccatttcaagccccacaagctctagaagcttaaagccatccatgtctggcatgtgcacatcgctgatacaagatcaaacaagttcttgttttgactcaacatggtcaagatcacaacagtctgattcatcgttgtgactgcaaatacgaaacaatgtgtcttacaggtgcaacaggagagcaagcaaagcacaagcaaaagtgcaaaattgtccgaagtccaagtagaggttgcagtaccccaagcaaatgcacgagttcccaacaattcaaattagcacattgatgcatcatacattgatccattgatgcatcttcaccaggagagcagcggagttgatgcgtacccaaggtagcggaggaggatcagccatcagggtgagcctcgtgagtaggaaggtctcggcacggcccgaccgacttcgcgacgtggaccacggcgtggagtgcgcacaacacaacatgctgacttgtacttgttttgcttaaacaataaaccatttctcaataattttcccattatactgcttatgaaatgttcattgtgcacatgatttcctgtacatcggttagtgcttattttcaaacgttagtaccactccttgtgttaccatggtatcaagatgatgtgaatggctatttatcttctcttcaaattagttattaggaacaaaatgagctttagtgaatagttatgtcttggattttctccccattcaatagacttagacttctcattgttcggcctcagcagcacaccttggtgttttatcaggcctccaagccgtccctccctctagctgcttcccgccaagcctgatgctcacaagtttgctgtaattcctcatgccagctgagatcttgctctggagcaagttgtttgagatgtcaagatatcatagccggtgca

SEQ ID NO: 34651 - DNA, 3101 bp, Zea Mays
tttctccatgcccctacccagccattcccctaaaaatctccagccgtctgtcttgctgctcgttcctgcagctcagacgtcgcctcccttctaccccttgctcctcagccaggcttgttagccgagcccctccaactagcgtgctagacctttgacgccgtttccccgtcgtccaagctccaccatgcccacacgtccgtcctgctcctccatgcacacgcccatgcatccttatctccctggaaacttcactcgtgtacggctccctggtgataatattcagcgatgcttcgccagggcaccgttcccctgcgcgctcgctggacgccgtcgcacatgctccctgctcggcctccccggcgtgctgctccctcgccttggtgcccctgcgagctccttctctctggcccggtttccagctcgggcctcgctagatgccgatgccgcttttctgacctcgtctcgatactcaatcgctgcagcacgccatgccgtgtgtgctgcactgtcatcattcgctatcctcatttttgctaatttttctcgtcgtttctcgtctacaaccttgtcagctcctgcgtgtcgtgcgcgtcttgtgttcgggtcgagccccaggattttgaggaaaaggaagctccagtgcattggccggtgaaatgaataaaatggattttgaagaaaaggaagctccaatgcatcagccggtgaaatgaataaaatggtggtaattatggtccttgtgaaatctgagatcaacttagtcgcgctcaccgaagaaggatcattaactctaccggtgtctactgctcagaacagggtctcgctgccgcagaacgttgtcgcagaccgcttcaccgtcgaccctttgaactgcgtcatccccggttaatctcgcgcgcgtaccgacagcttcgaagaacacctagatgaggtggtacttgaagaagtctactccagtgcctgctcatcaagtggatggagctatctaactaaaggttaggtataaggatctagaatctcttctctgcaacaaaggcaagccccggtgcatttaccccttccttgtatttttaaaaagacttttatatactttaagtctagtgaaatgtgcattaagtttataggaattgattggaaactattggatgcattgactaccttgatatccattcctgttatatatacttctttcgaagtatcaaatattgtttacaaaaatgcttagccctgcttagatctggtggatagaggttgtcttttgcaataatgcctagctcaggggttatcctgaggacggatggcttctaccagcaagaatattttcattgggagcatggtgggatcttactacaaagttccctataatgctcttttcatcctaaggaacacaaaacaatcctaaggatggaagtacttaaatcgagacttgggctaggaacaggtgatgctcctcccaggttaattaaggattggatgcgtatgtaggcctgtatgatcaaggactatcttaactggccacatgccctggatatgggacagggtaagcttgaacccctctattccatacatgaaaagacaatcgcgcactgggagtggagagatggcgagagtgacacatacgctcctggcaaaggaccgcctaaaaggggtggtgtgctctcgggtggcgcgcacctgttcatgcagtggaggatccgtgggaattgtagacatatgcaagagttacgagaaacatatgtcgtgtggttagagatcctcagctgagtaaatcgattcggatcgtcgttatatccccggaaagtggagacttgatctctgtccttcaacctaagtcaggatgtaaacattatgaataaaaatgatgttgtattgatgagatgctgaaataagactagatgtaaccagagtctattaatatttaatctggcgttaaaatattgaaagtaaggactcactttagtaagctatttctgcaaacgtatctaagttgattcttgctaaagccttttccttgattcctatttaaccagcatatccttaagagtcatttttccttagtcgggtaagacttgcgaaagtgcacgccgtacttagggttttcgaacccatgttgttgtaggtgatgaggagtactctaagtgttcctgtggctggagggcgtttccagttctggaggaagactagttaggctagtgtataagctttggagggttcctaccgtcctgcttttgtaataagttatgcattttgagtatatcaggacttgtaataaatgtaactcttactatgtgtcaaacgatttttgtttgatttcaaactttaccagagtatgttcaaggtaatttggcaccactttcatatttgggttttgtagatttgagttttggaaaacagagaacacggctgaacttcataaagggtttacagtataaaaaggtatttggagaaagagaaagaacaccatagatgtaaggtaagaggatatatccataatttaaagtatttttagaggtaactgctatggttttatggtgcttgtaaagcttttagaaagttgcagccgacgaggaagaccacggcacatgtgcgctcgtttgggagcggcaggcaataggcggtggcgcaacaccggcactagggggagggcatagacgggcaacgcgttgcgtatgagacgattgggtgatagtgcaccgcgctgaggtgcggtgcggcgggacgggacgccaccagacagaaacagcacggcagccgctagatggcgggcttggcggcgctagggtgagggcgagaacaggcggcgctgggaggaagaggaattgatgtgagtggtgtcagcaaatactccagccgcaggacacggcatctcagcccatgagccgaaacgcaccgatcgggctcgtagtccaagcatagaaacctcctacccagaatgggctagattcaccctagaagaccggctcatctccagcaggccgtttatagttatagggtcatgtaaagtactattttgtactatagattacattgtttctagaataaaatttaaaatagagagtaaaatagggagtctgttggagatagtctaaagctttacgagc

SEQ ID NO: 34652 - DNA, 481 bp, Zea Mays
atagtgtgttgtgtgccccacgccctgctgttcgatcggtaccagtgtcctccttcgtcagactgctgctcgtggatgaactggacatcagttcggcgatctctgcaagaccatccgttcccctttgtcgaactttggccttatcgcctcggcacgcaacaaccatcatagcgtggggattcagctgcgtcgctttttcggagcgcaaatcgctagatggtgaaggcagtgaagttctatgtcggtgctcgccaaatgttcgatggaaagtctaatctgataatcgttgccgattgtggggattttcaagtttacttgatcgtgacacgttagctgatcatgtgatgtggaggaccaaagctgaatcaaccacaagattttgtaaagcgtgagccacttgcaaggtgatgctggtggacgaacctgaagatggacaggctgaacaagtgccaacacaaaaggctggtcgccacctgtaaca

SEQ ID NO: 34653 - DNA, 3727 bp, Zea Mays
atgcacccacgccccgtctctttgaagccgcccgcgtctccacccgagaccccgacccaccccgccctcccccgccgtcgcgctcgcgctcccccgcgacagccgccatgcgccctatctccgccatgcctgcgcctcctcccccgcccgcccgagaaccaccaagtttcccttccttacacagcgaggtccaccatcaacgcccccttccctggcaagccacagccgtccacgttcctggccaccagcgacctcccttctctagcccttagcagcgagcaacacctcctccccatggctgcccccagaccccagtcccgtccgcgcatccgctcccccgtcagcgacgcacctattctcctcgacgtcgcccatggcgtggacggcgacctccctcaccctgcactctggtatgtcaccgtattgcccgcctcctttccccgcaccggcgcagccccctgttgcggcggccccttccccaaacagcacggcaccacgtgctccccctgccgcgcccgcactctccttccccaaacagcacggccccacgacgctcacactctccttccctggcgatatcccctcatctgcgccttgtccctcggagatccccttccatcttcggcaccgagaggaaaatggatggcaatcccatccatcggcgccaaaccctacacatcctccatagtaggcacccgcccctccttacgcggcaccatcggtggggatatcccccaatctgctggaaggagtccgcgccaaatcagagcccgaaatccgtgccaaatccacgctggatgaggtggtggggagaccccccaatctgcgtcccttctacatgcctacacatcctccatagaaggcgccctcctactaaccactaaaaaaccccttccacacgctgacaactccatatatattagtccaaagggagagcacgattaaggccacgcctaccagcttcaccctcctcgcatttgtaagtccaatttttagatttatgatttcagatgttgagttgattttgcaaactggtaagtgttttgtttcatacggcaactctgcacatggacagaatcacagctctgttagcgttgttttatcaaggtacgtccaattccttctatttagttgactgtgattcaatatgcttgttgttcggttttacttgcgacatgctgttggggcatgtgtttgggatggatgacgtttggactagatagtttcagtcagtagccatctaaacaagcccttacagtattcgctatttcatattgaattttcctcatattgtagagaaaatcgcagctaatctgttcactgtggatgagttgccccatggtttgttcttaatcagaagaatggacgtgtgcaccacagtttagtgctaaatcatatggatataggagagatgtgctctctcctgtcctaaaacagttcatgttctcgtttttctattctgacagttcataagcgccggtcttttagatgcccactgacctggacatgttggtagaaatactgggcaggtgggatcaactccgatatttggtcaatttctcaaccactttctgttaatacgcaatttttattgaaaaacataatgacgtgcaatgcaaccaccctattcaatattcgtatggttagcaaaccatacgatcaatagaagatctttttggtagcactaaactacctacatacttgcatgcatgcgtcctaatccttgagtttgagtcaaaattaaatcaaaaattgtcatgatcaatcaaacaggaaagaattgacattctatagtttgcgtaggaaagtgtctctgtgtgttttctttttgaaggatcaaggattgaaggattttcctgcttgacggattagcacttcagtaccagtagttaagttattaggagcagtagcaaaaaggggctatatttgtttagggcttgttcgttttcatctcaatccatgtggatcagaggggtttgagtagctttaaatctacaataggtcaaaagctctactaaaatttttcaatctcatcaaatccatatgtcatatgaccgaacaaggccttagcgggtagggcacatcatcttaacgccaaactgctgcctcgaaaacgagtgtatagggcacaacatttgaaccacatatatgatatcaatcttatcaatctattgtgttaattatgaatcctgcatcaatcaaccagggcccggggcacattttcccaagccattgacaaatgttggtagatgcaggattcatagttacagaaactatgtggttcaaattttgccagtatttgactcatcacatttttcttctctatttcagttcttctagcagttgaagtagtgttttcttggcagatgttcgcctttaggacattgctgcgaggggaatcggatatgccacaggctgcatgttgttggagtttctatgtatccccatatcaaatttgtttttccctaatcagggaactcaattgttgtactgctcatctctttcgagaagatcacactgtcgcatttctaatgtttggatctttttgcatagtgcgagtaatagcaggagctcttccgaaaggccttcacatgttaatcctatcgaagaataacatatcaattattgaacgcctcagagaattgacacgattgcgcttgttggatatcaactataataggatatctagaattggccatgatcatctgttaggattggcctcatgttcctctttgaaggagttgtatctggtcggtaacaagatcagtgaggtagatggtcttcaccgacttctgaagctcaaggttctggacttgtgccacattcagtcttctgtagccactatacttggggttggtgaggctggtggaaggtttcagttcttctatacgtggaactaacctataggaggccagactgctagagcggtagagccagaaagtaatagttggtgacttggcggggacatttatgttatgctacctaattattaatctgtggaaaaggggaagcttttggagtagagcttattttttgttcgggttactatttcctctaattgtgtgaaaactgaaaagtatggttcgtgtctgaaaagcaatagttggtcgaggcatatttttgtatggttccactgtactaccttctatctggtgaattagatcccgattctaaataagttgctctctaatcagattaaacactttaatgtagctggcaattgcttattttgcaggtgcagaggatgctaggaaaatactcaataattatggtacatgtccaattctaagtatgaaagtcggggccattactcagatggtaaacaaacttgggccatgtaaatggtcgaccttgcctaaactatacctggacgtattggaaagcaatgctgggaaagctatgccatgaaagatatttgtagcagtgttacatgatggcatcaagtgctgggaaaatatttattaatttatggttttgtttctatggaatataggagtcatgattttgtgcatttgatcagagactacattaactagaggatactttctttttttcaaaattacaaaaacaatactaagtgtacctattattgtctactcgtctcatgatgattactatgtagataaattctctaagctatgaacagtgaccaatgaaatatattcatttgcatacagttctcaaactaatgtattcacgtcattatatattgtgccagctttgtcaa

SEQ ID NO: 34654 - DNA, 2046 bp, Zea Mays
gtcacaacgtcacctctacgtgtgaactaatgtgcaaggaaggtttgcaatcactttttcccatggaagaaattgccattatgggcatgtgggagctgctgccgcacatatacagtatcaagaggaaaattgaggatagtgcaaatgcggctatgctatttcaacctcatgctgtggttacaattgattcaaagggtttttcttttcgactgttgaagcaactgaaatgcagaagcaatcagaaggttcaaagtcctctgcatatccattatgtttcgccgtcattctgggcctggaaaggtggtgaaagcaggctctctaagttgcataattttgtggaccacatgttgtgcattcttccatttgaggaagaaatatgcagattaaacgggttgcctgctacttatgtgggccaccccttactggatgatgcgattggcctaaacatggggacagaattgtgttctgacaagtctaagtatcaaagaagttgtgaagctttccgactggaacatgggctgtccccaggtgccacaatcataaccatgttacctggaagtaggatgcaggaggtagttcgaatgcttccgatctttttgcatactgtgcagaacttaaggcatacatttgatgaactatcattagtcatcccagttgctccacatcgagatgtgaggacctatattgaaaatgttgttcagtcagaaccttttccagtggtgttgatacccggggggtcgcttaaggaaagatacaatgcattcagtgctagtagagcagcattatgtacttcaggtacagctgttatggaactaatgttagcaagactgccctgtgtggtagcgtaccaagctcatttcattacagaatgctttatccacttgaggaaaaagataaactttatttctctgcccaacattctcttgaattctctcgttgtgcctgagatcctttttggggcttgtacagctaagaatttagctgcaaaattaagtgaggttatttcaaatgatcaaatccgccagatgcaaattgaatcagctggccaagtattcagggttctctatgaacccatcaagaaacgggatactttattaagggaagagatcgactactcaggcttgtcatcaaatttcctatctcctagcatgatcgcagctttaacagtgctttatatggataagcatcaaaacactgcatgccggaatttggtggtagaatcagaagctaagaaatctcttgttctaccaacgtggtcagggttccatgcatgttgttcatgcacaactggagtaacaaggcaacaagcaactggttatgtttaagcttccacttctgaagtggtatcagggtcggtcagcatcatggtatcgcaaacagatttggtcatcctgttggtgcagactcttctacggttagaatttcctagatggaacaggactcggggagtgtgactagatggtacagtggggcttcgaaagtaataatgaactacaagatttttttcttctgtgtttctgatttctttcagattctgcagtggctaggcagactgtacgctagcagtcgtctgctcctgctttttagcaaggggggatatgagagatgtcgttataatgaagcgcatatcgagatttctgttgtcctgacggatggagagtataattttgtggtcgacctgacattgggcaatggtaaggtggaaactggtaggactgcagtttcctgtcaaaggatttttcaaaaagaaaatcaagtggatgaaacatggattcccacgtcgccagtggtacgatgacgtcactcctgaggtcacgcaggtggtgggccatgtggcgtcgaatgtattttgaattcttattttggtttaaaagttggaagagctacaggggcagtgggctcgggtaacatctctgttgttccccaccccaattggaatcccattcttggaatcttcgtaaggaaggcaaccgtttcgcatttgtttgatggattctcattctgtactcggcatttgtttaatgtctatactgagaaatctttact

SEQ ID NO: 34655 - DNA, 2564 bp, Zea Mays
ctgccctcaaggaggaactaggcccatattgcctaccgcaggcccattgaggacaccagagtgtatggatcgctgccgcgtgctcccgtcgcggctcccgcacgcggacgctgtcgaccaactactcgttgtccttttcccgaacgccgagccctagcgtcaacgcggccaggcggcggtcagggccgggcgtcaggcggcagcagtggagcacgcagcccagcagctctaagttctattcagattggtgttttgctggtaccatgtccagtccgtggagccctctgagtattgaggaagacgaagagatacaagagcttggtgccgaggagcagcaggttggtgagcagctgcggcagggtgatgggcagcagcaggagttgacagctgatgcaagagcacaagagaccggaatgaaacgtgcaagatcagtgtccagttcatctactaatccatcaaattctcgtaaatctgagggaaagataaaggttgaggaaaatgcaccaggagctgcaacaggagtgattttgtctcttcgtgaaaggtacatcacattttatgcatgaatttcttattagctgataacttcatttgtattgttataaatggacataggactaacattcttctcctgtagtttacaggactgtaaacaaagccttgcatcttgccaggtttcataccattcactttttctgatgttctcatttactagagcattaaaatactgctacgttatctggttggataatatgttatttattctagaattttggtataacttgttcactataaatcacatttacttggtggttttctggatctcctaaataaaaaccagctgacaaaacaagttttactaggtattttataaaaataatttaaagttagtctgtatttcgggagttctttgtttgagtggcacaagcctaaaatatctcccaaggacagaggacactgctttgcgtgatacacacttcatccatggctagtattgtgaaggtctttcatgtgcacagtattcatgaactggccatgatcagaccccccctgcatccctggcagcagaaccaagccttattggtgagggcagtctatatcattatattccctctccgatccatggttaccatataattggatctgcatttctgctgatatatgttggcaaaacaaaattgtcaactaaaaagcttggtgaaaaactgacataaatagaattgcattactgaagtgataagctcctgttgaagatttaggtaggaaaaaaggaatataagattttggtggattaagtaatatagttctgtacagttagttggtcaactgttatttccactccattccagaatccagaggctgcaagatctgctctacctagataaaattatgacccttttgacataaattatttggactattgtaacaacaggtggaactggaagctgcaaaatcagaaatcgagaagtggcattcagcatttcagagcattccagctgtaccttctggtaccattccagatcctgtttcagtggtgtcttacctcagtaccctgaagtcatcagaggaatcattgaaggagcagctggagaaagcaaagaaaagggaggcagcttttatagtaacatttgcaaaacgagagcaggagattgcagaactgaagatgaacccattatgtttataccaatgccctccacaagggtggatggctggcagcatgcatgtgcttgggcttgacaaggagattattgcttgatccagcaattcatgaggaatttacacgtttaaagaatcttgtggaggagaaagagaaaaaaataaaggagctacaggacaatgttgctgctgtcaattttactccatccagcaaactggggaaaatgctaatggctaaatgtagaacattgcaagaggaaaatgaagagattgggacgatggcatcagaaggaaaaatccatgagcttggaatgaaaattgcagttctgaagtctcagaacaatgagctcaggaatcaatttgatgttttgtacaaacacatggatggtgtaacaaatgatgtggagagatcaaacgaactggtgtccatcctgcaagaggagttagaagctaaggatctagagctgactagattgaaggaggtgcttgcccagaaaggagctactcaggacgcaccggtggagaccagtgacgacgctggaaacggtcaggaggcagattcagatacactgcaagtgaaggcggaaagctaagggagtttaggctttgaagtgtgtttgttgggacttgtgggaaaagtaatatcatgttatgcggtctcatagcatgtctaggttattatatagtaggggaatcactgcacaaaaacatcggcaaacttttatctatgatcgtacatatggctttacaaaagattattttgcattgtagacaacactattatagtgtggattttgaaattagatatataataataatatagatgagtaagctgtgagtaagaaagcctcaaactgattcgctacagatttgcgctggctgaaccagtaatgatctccaacaattca

SEQ ID NO: 34656 - DNA, 1698 bp, Zea Mays
atggcagaatccaacaagcggcagagcgccccaaacaaaacccaactcatttttttttcccagctcgcggaacgggcggcctcgttgcaacttgcagagacccagtcctctcgctttctcaccgcgattcgcctcgcttccatccgattcgattcgggagctagaggagagagaggagaggagaggcagtgatgccgctggctgagtcgcccccgtggcgccgcaaggccacagatttcttctccacgtccagtgtcaagctgaagcaggcaggccaatcggccggggataatatagttgatgttgctgggaaggttgggtccgtggtgaagagtcggtgggctgtcttccaagaggctaggcagcagcagcagcagcagcaacgtccgccgcatgagacagtgcaagagcgtatcatcactgctgctgcctccactggtttgcttttcaggaaaggcatttcagagacaaaggagaaggttgcagtgggaaaggtcaaagttgaagaggctgctaaaaaaactgcagataaaagcaagagtatcttgaacaatattgaacgctggcagaagggagtcgcaagcactgatgtgtttggtgttcctattgaagctactgtacaacgagagcaatctgatagagcggtgcccctggtgcttgtgagatgtgcggactacctggttatatcaggtttgaataatgagtacttattcaaatctgaaggtgacaaaaaagttcttcagcagttagtttctctttacaatgaagactcgggtgcatctttacttgaaggtgtaaatcctattgatgtaggtgcactggtgaagtgctaccttgccagtatcccggagccacttactacattttcgctttatgatgagcttcgagctgcgagggttagcattcctgatcttaggaacatattgaagaagcttccaaatgtgaactacatgacgctagagtttgttacagcgttgctgctgcgagtcagccgtaaatcatcacttaacaagatggactcccgcagccttgctgtggaatttgcgcctttgatcatgtggcggcaaggtgacactggcacagatttgcgtaaccacctcaagtttaccctgaaaccgcctccaaaaattgtggatacaacatcaaatgctgccacatgggacctgttaggtgtgtaaattctactttgtttattaccttttagatgaggatgacgaggatgcttcatcccagatccccttagacgatgcttcaccaccagactacagctccattgaggttatccagtgtctgatcgagcatcacaatgccatcttcaccgacgcaaatgaaaccgtgtggagatgatcggcatctcctctagatctctctggtgttagatcgtgctattgtacaagttccaggtaggaaggtgggaaggtggattagcgctcgctattgttagggataagcattttggccggaatatttttgaagtaggtttgtatatacactagtgttaactgttaattctccacgggactagaaccgggtcatgccatatcaataaaaatatatttggatggatgtaaacgaaatgtgttgtttccatcattgattgtattcagatcatataataataacaaagcctttgtccccagttgggctagactaaagttgaaatccaataaaagccacaaattatggtttagtcatata

SEQ ID NO: 34657 - DNA, 2223 bp, Zea Mays
cccggtcctctgcccacccgcgctacggccctcgtgctcggcggcgagaaggcgaaggatggcagcggcggaggacgcagagggcgaccgcgtgattgaggtcgtgtcagcgggggcactctaccaccgcggcggcgactgggagcgcaaatactggagctgctcgaggggcaaggaccggtacccttacccagtgggttaccatgccgtccgccattttactggaatatcctatgctatggaaatccaacagggacctagaggtccaatattcctggttacatccaccgaaggagatacagcgatagggcagacccctgatatcgcttggaagaacttccagaaaaagactggggctaaagtgaagaactggcagaggagaaagagcttccctcaaaggattgatggtgctgagctttttgggttcaaaaatgcatctattcagagattgcttcgtgagcttatagtagattcaactggagcagttgaacttaacgagccttgtgaagtcacttctgaggctggtgcacatttagtttgtaaagatgcatctgatgtttctgaggctgaagatccatccgtttgcttaggcatggaaagtggaactcctaaaagaagtatagagcccagccaggtggaaaataccttggcagtccactacccggacatgttaacagcagttgataagtgcaatgtatccacacataaaaatacaaatgaaggagatactgtaggtagagcactgttgcaagatgtctctgattcaagatgcacacttccattgctggaagaagtccctaagaatgcacaatccacttctcttgatgataatttgggagagtcttctctagtttcatctcaacaagttggtttatcttctggttcttatttgaactctgaaaagtctgatatagaattggctgagaaggaagtagcaaagtctatgatgtctattttgcttccccaagctattccccttctcatgaaaagttacaaaaggaagaaattcaagcataaaaatagagaaaactctactgtttcagtgaaaacagtttcagcttacaatccatctgatagttgctgccgaggtgtgactgtaccaacaattgtgggtgaaggtacaaatggaaatagttctgaaatgtgtgaccatgggggatctcatcatgacaaggttaaaaatggctttgccaatgaggactgcagaaatgacgacttagtggttaaattagatgagatgaatgattatgttgcagatagttttgaggatgatgcacaaattttgggcgacaacacaacaaaatcaatgggtaaccatcatcattattctgagtatgtgctctctagggggcctaatgagaagtcaaagctgctaaatggtaaaagtgaagtttttgagtatcaggctagtgtgcataatggcaaaagggcacctgatgtggtatacaatcatgaaaatggacaatatatgttgtctgattcgcttgttgcttgtctagaggatgagttcggtggggaagatagttcccaccctgcaaactacaaccagtttaatggcgatgttaaacaattcgagcagcaatttaaggagcttacagctgttataaaaaatggctcatcagttccggtggatgtttcataccacaagaacactgataatggatcaattaatgtttgtgcacaagcttttgctagaaatggtccaggagtttcgaggaatgaggagtgtttagcaaatatcttgcctgctccagttcattctaatgcacataatgatgctgtaacgagtggtaagcatgatgtgagttcaactttgaatttgccacctgcatgtgaggcaaaatctactttgttggtcatgcgagatggacaacatcatactgaagtgccagcaattgatcagaaggaaaataggttccacagtgttgtaatcataatcccagtgacatgcaggaaaatgttgtatatacttcctctgtccacaaaaggacgcaattctcacttttcgagaagtgaaatgattcgaagttcgactacagttatataaaagagtacaaacatttatgatataagataagtactgttaatctagttgatgacataattgttaatacttttcactatagacttggtcaaagttaatctagtttaacttgcacaaatcccgtagttgcatccttttatggacggagggagtataccttatgctggtgctgattaaat

SEQ ID NO: 34658 - DNA, 2091 bp, Zea Mays
tttaatagcagtggcggttgcactcctcccacgacggtggccatagtttagtcgcagcagtacaggctccacttgggagcgaggacgaggaggcgggtgccgctcctgtggcttcgccatgtgctctcgccccgcgtcctcggctcctccctcctcggtatctacatgccattatgccaagatctcccactctccgatctgaccagggccgggccaccgcagccatttgcgtctgctcttcccgaatccctgtctcgctttgccctccgtttctccagctataaagccggggggtcctgtggcgtgtgacctttttataccggatgtgcagcgcagggtcaacttcgtcaggtttcttggctccaacaaccttcctgggtcactctccagtcagtcaatctcaaactctccatgcggtttcaaaacatttgatggcaactccgctcctctgaattcgactgctacccagaaactgtaaagagatggggtgtggcccatcaatccccgacaagtacacgataggtgggaaggggcgcaagcgccggagcgtcatacaggaggttgccgtgttcgtgcccaccatccgcatcccagtggcctctgacatagctcatccgctcaggggaatagtttccaaggatcttgtcgaccgactctccacactccgtgcccatgtcgcctcgctggctgaagaaatctatcacgcggacgtatcagctgttcaagaactgcagcatgcgctagaggagtacttgccagttgttcttggtttaacaacgaaagagagccgtcttgaatcgtcagtacagttcagatggaagaccttagacgacgaccaggagtgttgtctggcgagcgcgtggtatgaggtgctctcggtggtccacatgatggccatgcttgcgttgtttgaggctaacctattgctcatcccaaagagcagccaaggtggtggtgaaaggaaggtagcagaagacgcaaagaaggatgtcgtcgattcattgctcagggcgtcgggatgcttagactactccgtgcatcgcatacttgttcagatacctgcgcaagtcaagaagggttttcccagttacttgcaggagggcatgcttgaggccatctcaattcaggcattggctcagtgtgtggaaatacagcttggcttggcttctgaatgtgagaaggcaacgctgtcagtaaagaggaggctagcttgtgagcaagtcagctatttttctcaggctcactattgtctgtcgggatgcgatacgagtgactcgtacgggaagaagcttctgctgttcctcaagtggaagtggatggaggccaaggctgtagcgtattactaccatggtctggtgctcgacaagggcggcgaaccggcaaaccatatcagtgcagtctgctgcctctctgcagctgatgacctgctctcagacagcaaaagggcttgcttgagtttttgcttggcaaatcctgtcacgagggtgcctcctccttggggtgtcatgaaaaacatgcacaaaaagatcccagatgtcgcttacaagaagttccaagcgcacgggcatctgtttgagcaaaacaagaacagcgcactccaatccgttcctgacctaccagagtttgcgctgtcgctgagaccggatggatacgagttgccaagcactgattcgatctgggataatgttgatggccaacctcagattcaaagcctcaaggagcatatgatagatgacgaagatgaagtaggcacaaaatgatagttctcacttccaaatgcttcttttcattgtaccaccaaaagtagcagagctcaaaaacgcttaatccaaaatgttttggattcagcatatggctcaactgaaaaaggaatcgcgatctctgtattattgcaagtattaccatatgatatagtaaagtcttatgtgtaatagaatcataaataatagttggtttcttgctgtaatcgcctttaattttattttcccaactggcagaatagagcatcacagaaaaaaaaaatacggcacgcatttcagtagaacaatagtctgcgtgtttggttgggtggctaagtggagaatgtagaag

SEQ ID NO: 34659 - DNA, 186 bp, Zea Mays
tctccgaaacagatgcggtgcctgaaggcaaaaaatcatgccaggtgctacgttgtgcaggcagatcgtgcgtccctgagaggactatagtggaaagcgcccgccaggatcctgatgacaggttgtggaatatgcgttcccatcgccagcatcatgaccagcagaatcaccattggcgaggtggtc

SEQ ID NO: 34660 - DNA, 3154 bp, Zea Mays
gctgttcctgtttgcgacactccctgctaccactcagccgagccgagtagccgaccgaatcggcgtctcctccctccgcagctccgtttctccgacgcgctcagccgccggctaaccatctcaattctcacgacgtcaccgcctagtcgccctcactgacgacgcggcgccatgcctcctcttcctcgcgcccgcgccatcctactaccagtccctcctcctctccctcggttccaacgacaccgccgccgcccacctgcacgcgctcaccatccgcccccacctagcgggcacgggcgccaacgccctcgccgccgcgcacgtcgccgccacgctctcctcccactccttccggacccgcctcacgagctactccgtgctcctctcctaccctgcgtaccgctctctctcactctccgcgccggatcgcgacactgtgctcttcgctttgaagcaggaaacctacgcaggcgacccttacgaggcggtctccgccgaggccgtccccaccttcctcgcctacgcggcctccggttcggtctccgccgaggccgtctacgccaactacggccgcgcagaagatttcgcttacctcgccgcccgcggcatcgacgtcaccgggaaggtcgccgtcgcgcgctacggcgaagtgttccgcggcgacatcgtcaggaacgcgcgggatgccggcgccgccgcggcggtgatttactccgacgcgaaggactacgcggccgggaagaccttcccggacggaccgtggatgccgccgacaggcgtgcaggtgggtagcacgttcaagggggtgggggaccccacaacgccgatgtgggcgtcgtcggagggctgcgagcgcctgaccatcgcggaggcgatgagctccgatgacatgccggggataccggcgctgccggtgtcctggaaggatggggagaccatactacagctcatcggcggcgatgtggcgcccgagaattggcaaggaggcgatggcgcggcggcctataggtttgggcctggcccggcagtgctcaatctgacctacacagggaatgagacgatggttactattcagaatgtcatttcggtgattgaagggggagaagaacctgaacggtatgatcaaaatccccaatcaccttacccccaatacctccttccaaactccaatttaggtaaggggcactgtatcatctacagtacaaatccgtctgtgggctcaagcattcagcctgaatgcgatggatggaaatttaaccttcgttaggtgaatgtgactagcaaaattgaagtgtatgagacactttttttctttgaacagtgtgtatggcacactttttcattgaaacggtgtgctcacacacactaaaagtatttgtaatcatactacagaggcagagttatggaactttgggtggctagtgatgaaacagtcaccatgaaccacttagtgttaaagatatatcacagatcttgtatggtatttcgaactacttagtcgcttacaaattgcaatctcattctttgaaagtttaaaaaaatctgtacaaattctgtgcaattatcattctaaaacatgcaggtatgtaatccttggaaatcaccgtgatgcatggacatttggggcagttgatccgaacagcgggacagcatccttgcttgagctagctcaacggttgtctgagctgcaaaagaagggctggagacctcgacggaccatcatcttgtgcaactgggatgccgaagaacaggatccactgaatgggtcgaggagaacagggcaatgctaacttcaagaactgttgcttacctaaatgttgattctgcagtggctggtcatggattttatgcatctgcaactcctcaacttgatgaattgcttaaagaagctagtaagcaggtatgtcaatatgaaggaaatgtagcagaattttagagttaacaaaaagaatttaacttaccatgtgaccagaaattgtacaagtggcttaattgtatggatcctgtagttatgcaaagggtacagtccaaaaatcagtacaatcagaggaacgaaatcctcttttgattttgcatgtgctgttatttcaagtataaattattgactattagcagtttggtttgtgatgtatttttttatacacaattgctgttagtatgagcatctgctgactatgactaaagtcaaatggtgacttctcttaccagtcaactattctgtctctaaacattttctgttttcgttattgttgaggaaggtccaaaatccggacaatgggacacagagtctctatgatttgtggatgtcttctaacagttctcctttgattggaagattaggagggggaagttcggattattctgcatttgttcaacacattggtattccatcagtggacatggcgattgggtcagactatccggtctatcatagcttgtatgatgacttcatatggatggaaaagtttggagatcccttgttccagaggcatgttgcagctgcaagcatgtgggggcttgttgctcttaggctctcagatgaggagatcctacccttcaactacagcaattatgccacagagcttgagtaagtccaaaatttgagaatcgtgacagttggtccttgttatcagaatggagcattgggcataagtgaaagagtacagggaatgcctgtcagcttatcacccctgcacaagtcaatcaaagagttcagaaaggcagttgcaaaagtggattctgaattgaaggctctacagacatggaaaatttggtccccatggagaaacaaccccttaaaggtcagagacatcaatgatcggttgatgatgaccgaacgggcattcacagaccgggaaggactgtctggacggccatggtacaaacacctgatttacgcaccttcgctgcacaacgattacggggctgaagtgtatccaggcattggtgacgccattgagagggtgaagaaaacaaatacttctgaatccttgcaatctatacaacatgagatttacagggtctctcgagtcataaaccaggcagcgcttgttttaagtggagggctcacgtgaatgcagtagctggactgatacagtattgcatagtatggtgatattaaggggaaaaataaatttcactggcaaaaaaaaaa

SEQ ID NO: 34661 - DNA, 769 bp, Zea Mays
acaccaacgaacttcgttaggctaccatgccgttgccccccgcggcccgcgaacccctgcgcggttgctcttttccctttttctatttcgcgagcgtgggtttgcaattccccgcgccgccgtgcgtccccggcaatgggaagctcactctgatgatcgctggtcggctcctctcactcgcagccatctctctctccgccacccgtcctcatttgcccccgaacactgtgacaccatctgctgcgcacgcaccctttctcaatggccgaagcgaagagggggatgggaaggatccgtgcagagaaaagtcttcgtgataatggcttctagccttctggaatatttaccacctgcggccaagcgtgtgaaaattgctcggaaagattggcaagctgaatgaccgaaggggataagatcattgaccgtgtgcgcaagtctggttgctctctcaggtgtccctatcagggcttagaaaggacgtgtttggacttggacgaactcaaggagaactacataatgacgatttagtgacggggtttttttaagaagggtttagtgatgacttgttacatgcagctttcggctccaggacttgggtttggtaagctgtttctctgttaagtctgctattgggggtacagatccaatgcaccgaatgatcaacagaaccataaacgtcgggctggtttggtaacttagccagacctgtgggcagcccatcccctgaggcgttttattgggcctcacctttttttcccccagattattt

SEQ ID NO: 34662 - DNA, 3300 bp, Zea Mays
attttcgccgctccaattcgctcatccgtccgcgcgcccctcgccgaccggccggcgcggcgccggccgacgtcctctctccggggtagtcagtcgcgcactgcgcatcgctgttgttccttccggttcctttcgcgtccccccttcggagcagggcaacgtccaagagatattatcgctgccgctgccccgcgcgggccgctcgctgtcccactcgtgcgccacgcctcggactcggaggtgtattccctcttctccccccgtgcttatccgcgacggaatccaatcccttcgctcaagtccttctcctaagcaaagccccctcgcttttggcgtatgcccccgctggcgcgcccatgattcccgccgattcctccgcccgttcagtccagcaacccttgctgctgcagtgctgcggctagttcggtggcggggaaggaggaggaggcgagatcttggagtggggcgaagcggagatgtcgttgccgtcgaacaaccggaggacgtgctcccggagcagctctgcgcggtccaagcacagcgcgcgggtggtggcacagacgcccgtggacgcgcagctgcacgccgagttcgagggctcccagcgccacttcgactactcctcgtcggtgggcgccgccaaccgcccgtcggcaagcaccagcaccgtctccacctacctccagaacatgcagcggggccgctacatccagcccttcggctgcctgctcgccgtccacccggacaccttcgcgctgctcgcctacagcgagaacgcgcccgagatgctcgacctcacgccacacgccgtccccaccatcgaccagcgggatgcgctcggcatcggcgtcgatgtgcgcacgctcttccgctcgcagagctccgtcgcgcttcacaaggccgccgccttcggggaggtcaacctactcaaccccatcctcgtgcacgccaggacgtcggggaagcccttctacgccatattgcaccggatcgacgtcggccttgtcatcgaccttgagccggtcaatccagccgacgtgccagtcaccgccgcgggcgcgctcaagtcgtacaagctcgctgccaaggccatctccaggctgcagtcgctgcccagcgggaacctgtcgttgctgtgcgatgtgcttgtccgtgaggtgagcgaactcacgggctatgaccgggtcatggcctacaagttctatgaggatgagcatggcgaggtcatttccgaatgcaggaggtccgatctggagccgtatcttggactgcactacccagccaccgacatcccgcaggcgtccaggttcctgtttatgaagaacaaagtgcggatgatatgtgattgctgtgccactccagtgaaggtcattcaggatgatagcctagcacaacctctcagcctctgtggttccacactcagggcttcccatggttgccatgcacagtacatggcaaacatgggttctgttgcatcacttgcgatgtcagtcactataaacgaggatgaggaggaagatggggataccgggagtgaccaacaaccgaaaggcaggaagctgtgggggcttgtcgtctgccatcatacaagcccgaggttcgtccctttcccactaaggtatgcttgtgagtttctcttgcaagtatttggcatacagctcaacaaggaggtggaattggctgctcaggcaaaggagaggcacatcctcagaacgcaaacccttctttgtgatatgctcctgcgggatgctcctgttgggatatttactcggtcacctaatgtgatggatctagtaaagtgcgatggagctgcattgtattaccagaaccagcttttggtgcttggatcaacaccctctgagtcagagataaagagcattgcaacatggctgcaggataatcatgatggttcaactgggctgagtactgacagcttagtggaagcgggttatcctggtgctgttgcacttcgtgaagttgtgtgtggcatggcggccataaagatctcttccaaagattttatcttctggttccgatcgcacacaacaaaggagatcaagtggggtggggctaagcatgaaccggttgatgcagatgacgatggcaggaggatgcatccacgatcttcattcaaggccttcttggaggtggttaaatggagaagtgttccctgggaagatgttgaaatggatgctatccattctttgcagttaatattacgtggctccctgccagatgaagatgccaacagaaacaatgtaaggtccattgtaaaagctccatctgatgatatgaagaagatacaggggctacttgaactgagaacagttacaaatgagatggtccgcttaattgagacagcaactgcccctgtcttggctgtcgacattgccggtaacataaatggatggaacaataaagctgcagaactaacaggtttacctgtaatggaagccatagggaggcccctgatagatcttgttgttactgattctatagaagtggttaagcagattttggactcagctttacaaggaattgaagagcaaaatatggaaatcaagcttaaaacattccatgaacatgaatgcaatggtccagtaatcttgaaggttaactcctgctgtagtcgggacctttcagagaaagtcattggagtttgctttgtagcacaagatttgaccaggcagaagatgattatggataagtatactaggatacaaggagactatgttgccatagtaaagaaccccactgagctcatccctcccatatttatgatcaatgatcttggttcctgcttagagtggaataaagctatgcagaagattaccggtataaagagggaagatgcgataaacaaattgttaattggggaggtcttcacgcttcatgattatggctgtagggtgaaagatcatgcaactctaacgaaacttagcatactgatgaatgcagtgatttctggtcaggatcctgagaagctcttttttggtttcttcgacacagatgggaagtatattgaatccttgctgacagtgaacaagaggacagatgctgagggtaagatcactggtgctctttgctttctgcatgtggccagtccagagcttcagcatgctctccaggtgcagaaaatgtcggaacaagctgcgacaaacagctttaaggaattaacttacattcgtcaagaattaaggaacccactcaatggaccagctgaaaaagattttacatgacactgatcttgaaagcattgaacagtgtgctaaagatgcatgcatccgacaaggctgacca

SEQ ID NO: 34663 - DNA, 2799 bp, Zea Mays
ccacgccgctgcgcttccgatgcaaccctaaccacctcatcgccggcacgatcttccccgcccccactccccggctattgcctctgattggcggctctccgggattcacgttggtccggggtacggctcctgcgattttcacgcaatggagcaagatcagagcgtggttgtcggcagcgcggactctggtgctgcggcttttggttttgcgactggcaacccccctagcttggctgtgaccggcggaagcgccgtggcccccgacggtggagctcaggcagctgatgcctctgcgtaccaggccgagcacacggcgttgaatgggactgtcggcgatatgggtaattacccatctacaggagctgcagagaacggcgaagccgtccccaacgagacgggcgagccggttcctgagctatcgtacgaagaagccgtgctttcagcagaagaggctaggttatggagtgttgttaccgcgaattccttagattttaatgcctggaccgcacttattgaggaaacagagaaaaatgctgagaacaatattttgaagatacggaaagtgtatgattcgtttcttgcggaattccctctttgctttgggtattggaagaaatatgctgaccatgaagcgagacttgatggtactgtttgaacgtggcttggcatatgttggaacagattatcattccaatattttgtgggatgagtatattaagtatgaagagtcactggaggcttggagtcatctagctgatatatatacaagagtattggagcatcccatccagcagcttgatcggtattttaattgcctcaaggaattggcttcgaagcacagtttatcagaaatacttactgcagaagaagcctcgttgtatgttgtcacatctgagaccactgctcaagcgcctgatggtgaggcacatcctgatgatgttgataagcttggtcaaccagaaatttcgtcttcaacagacgcagaaagccttgcaaagtatgtctccatgagggaagagatgtacaggaaggctaaagagtatgaatctaagatcattggttttgagctagctattagaaggccatattttcatgtcaagcctcttgacaatccagagcttgaaaattggcataactaccttgactacatcgagaaggaagaagacattaataaggttataaaattgtatgaaaggtgtgtgattgcatgtgctagttattcagaattctggatccgctatgtgcaatgtatggaggataaaaggagtctagacctagcaaacaatgccctggctcgtgctactcatgtgtttgtcaagaagcagccggagatccatctgtttagtgcgcgctttaaggagcttaatggcgatatttttggagcacgtgcagaatatcagcatctgtattcagatttatgccctggctttctagaggccattgtgaagcattctaatatggaacaccgactgggagataaagaattgtcctgttcagtttatgaaaaggtcatcgctgctgagaagggaaaggaacagagccagctcttaccaacattgcttattcagtactcccgtttcttatttttggccatcagagacttggagaaggcaagggagatattaactgtgctgcatgagcagttaaatttaacaaaaccagtgcttgaggctgtcatccatctagagtcgatttttccatgcgaaaagcgtattgaatttttagactcacttgtggagaagtttgttacacctgaatcatctcagggagagttggcaagtctagttgacaaagaagaaatatcttccatatttttagagtttttggatctctttggtgatgcaaagtcaatcaggaaggcttcaactcggcatacaactcttttttcatgtaagagaagcattctgccatcaaagaaacggaaggctgatgatgctgttgtgtcagacagggacaagtttgctaaaactgggtctgttcagtcagccacaggaactgatccaaatgcttccaatcctcctgtttggcctgcgacttctgaaacatctggacatcaatggggagcttcttatgctcagcaggctgcatatcctgcatatggaacttatgactacagccatcaaatgccacagcctgctcctcaaacagctgcctatggcgcttatcctccaacatactctgttcaggcctatacacaacaaagctacacacaacctgcagcaattccggcagcaccagtgccagcagtggtaccagcacctacaccggcgtcagcttaccctcagcaacctgcggcagctcctcaaccttattatggaacaacctactactgacaagtagagtaatcttcgatggcgatctgacgagcctgttaatcagcaggtttgtcgatacgaggtcaaaggcatcacaaaaccctctgtactgccattgtttagccccccttcagacagatgccgtcgacgagatgatcacttgagaacaaatttgagattggtatagtctgcatttttgtcgttagcatgtgtcgctagggattgctattgtttttcttgtaatagcataatctttactgtagaagaggcagcgggtgctaaccaatcctatgaacatataattaacattattcactgtttcatgccacctttcggagtgctttttttttcaaccactgatgatagcgggattcctgtcaagcacgctcactggtgaagtcctcggaacaaaattgtcaagatctgcgactacacagttcactgatttctactgtcactgtaggtcaaactatcttgatttgac

SEQ ID NO: 34664 - DNA, 2666 bp, Zea Mays
ggttggcctgtctgctcggcccgccgtcgtctcagctcttgtgttttctgttacggaaaaaaaaagaagaaaaaacaagccggggacgacggcggcgaggacgacgacgacgagagggacggaactggaccagcgcacgtgccgagatggcggcgctggatgacaaggccatgacggacctggagacgctggaggaggaggaagtgctgcgccggttaggcacagcggaggaggcgggcctcaccgacaacgaggccgcgcgacgcctccgtctccacggccccaacgtcgtcgtcctctcgcaccacgagggcagcatgcttcatggattcctaatggcgctcttctcgctctggggatgggatcatgtcttccccaagtacaataacatggtccgggtcatacttaactccatgtcgtgggttacagtactgactatagttgtgtctcttgctatcacctcagctggccaaagatcatgcgagctggccatcataattttcgtagtagctacatgcctcatagcatgctttactgcaatgcttgttttagagtatgctaaggctccgctggaggccaaagcccacgcaccaagggccaaggttctgagagatgggaattggagagatgtacatgcagcaaatctggtcccaggggatatcatatttctcaaagttggggacattgtcccagccaatgctcgcatactccgatttcagaaaatcgacacaatgacttgctgggccaaaaggtctgttgattgtgcgcatggcttcctcctatactatgcttggactgtttcctgtggccaaggaactgccgttgtcattgcaactggacgtggcattcccagaagtacattgcggctctacccacaacgttatgctcgacctgggcagcttaaagaaggagccatgcttactggctgcttctgtgcttccctggtacttgttggcacttttgctgagatagtcttaagatttttgttccaaaaacaaaattacagaggcatgccactcgacgcccattttatgccattgattggtggaatcccgatggcaatgcctacttttttttacctggcattggcattgggatctgtaaggctttgttttctggggattgctagccggggaacagttgcacttgaagatctagcaagtgtggatgtaatcctcttcaacatgactggtactttaacgtgtaatcagccctgttttgtacgggacaagattgagatgtttgcagatagcgttaataaagaccatgccatagttttagctgcacgggcatcaagatctcaacatgagttgtacattgaaccaattgatgcagctattctaagcctccttgatgatccggagcaggcacgactcggtgttcaagtcttagagcatcatgccagtttctttgttgcactgaaactgatgttccagactacatacatcgacgaaggcaatagattcaagtgttgcgtattcaaaggtgatcctgcaaaggttgctcatcactgtggcagcagcaaagaagttaaagagaaaataagcatgataatggatgaacttgcccttgatggatatcaggccatagctgtaggacatcaagtagactcttgttgggactttattgcccttctgccttacacagatgaccttagaagcgatagtgctgatgttgtcgatagccttatcgatctaggtttagatataagagtcctcacagaaagtccattgtcgaccacaaagcagatattcaccatttcatcaactgtccatcttgatcctgcaggtctaactccaatcttaattgtaatgaagtttggtgtccgtgtcattttacatttatggaactttgacttgtcaaatatcctggctttcatgattacagcttgtaattactgtacgtcctttgcaatgttatttgaaagggtggaattgaacaagtcaccagataaatggagagttcagaaaatcattacaagcggtgctgcttttggaagctacatagttcttactactgccattttttatagggttgcaacaactgcaaacccttttgcatgtaaattcaaacatatatcactgatgggcagtgatgaggaaatcagatctgctttgttccttcagattagcacagtaaaccaggctattgcactctttgttcattctgatggttgctgtatcataagatggcctggaccttttgtcacatttgcctttgttgtttctcaaacggtggcaacacaaaaagttgtccatggcgacttgaattttgcactaacaaagggtattggctgtgttagggccggattgatatggttgtataacttagtcctacttttggccctggttttagtttgtcgcaaatggagacacgcaaagatgactagtgaaaagttgttgacaatatgcttgcgttcagctatcctacacatagttcttacctggtttctgtacgtaatacttgatgttagggtgcaacagccagtctctagtagatagatcgaacacatagttagggctttttccttctgcagtgtcatctgtaaaactctcaagttaattaatatcttgcataatagattttgcagttggttggcccttcatgattcagaacttgcaactgtgagaccactatattattttaagttaaaactttgctgaagc

SEQ ID NO: 34665 - DNA, 2417 bp, Zea Mays
cgaggcctacatagcgaggcacgcctcctgcagtcctcctcctcgtctagtcatctctcctccccctctcatcagacatcagagcccttcttcctccgcctccccttcacccccatctcgccatacgcttatcgcccatcccctgatcaccagccgccgccgccaccgcctcgatcccgtccgatccaatccggttttttccttgataatgcgcgtggcaaccttgtcagttcaatccgtccgtgaagaacttatccttattttcgtttgcatcgcatcgcttctgcgtttgggggaaaaagggccgcgtccttgatgtctactatcgcgaccccgccgccgccatcggcggcgcaagagaaggccgccagccggaataagcgaaagtaccgtgccgagacaccatccacggagttgggcccattcgggctggagtacccactgacgacggactgcgtgggattcgagtttatgtcgcccgagaaggttgccatggcagccgcggtagccgccgctgagggtgtcagccttgacctcctccagaactcgtgcgaaaactgcaaggatctccaccctactgcggaggacttgttggagtgccagcgatatgtgaattggggtgacccaaatgagatgcagctggaggagatccttctcaagagtctggacaccacctttgacaatagtgtgagtctgatcaccacaatgggctactctgaggcggccgcacgtgctgctattatgcggacagctgcgcaatacgactggagggagagccttgctgggtttggagaggcggcggttgaggttctcaagacggaaggggacatgttgccaagggagggtgcctctgttgaagacatgaggaagattgaggaggctgtgcttggcagtatggttacgttggtaactgaggctcagccattcaacaccccaggcgatgtaatgtattgcttgcttatgtcggatatgaatgtggcaaatgcatgtgccatggactataacagtttctccctcccagctgtgtctgctcaagttattgcccaaccagtcgcgggaaactacgaacccggttcaggttcaaatttgtcagtttctattaccaacccgcagactggcgttactttccgtggaaaacttaccccagtgccacctggctcgtatggtgctataaaagctgattcatcaacggcacaagcaagcccgaatgtatcaaataccgaaccctcggtatcggacaagactcagtgtgtcatcccgaatattgagccaaaaaaacaccatgttcctatatgtgatcattcagaggaccaaccatttgttgctgctgcgacacaatctgtgaaaaatgacaagtcgtccccaagcaagagggggggctctaagagggactcctttcatcggcagaagttgacgaactatgataaaagttcccgagcattgggttccaaaggctctcttaggtctggcaagcaaagctcttcagccagtgcagtattggagaggaagtgcaggtcattttccgattctactactagcaacttgaagggctcatcaagagttgctaaagggtttgctgcaagcatatctggatcagaagtatcagttgacctttcctttactggtaccctttccccttctccatcatttgatgccaaggtagttagtaactcaaactcagcacctgctgctagcacagatctttcattggcattgtcctcaagtgatagtttaacaccatctttgagtcatgattccaatactgaggtagtggactctagtagcaaaattaatttttcatatgatgaagaacagaaggtctggatcccacaagataaaaaggatgaaattgtcttgattcttgtccagaggcagaaagaactgcaagcacatacacgtgactggacagactgggctcaacagaaagtgatgcaggtcgcacaccgacttgcaaaggagaaggatgaacttcagtcactcaggaaagagaaggaagaggcagaccgtctgcaagaagagaggcatcatttggaagagagtactcggaaaaagcttctagagatggagtctgcaatttctagggcaaatgctcagttggagaaggcagaagcttctgctcgcagacgtgaggttgagaatgcacaacttacgttacagatggaagctgcaaagcgacatgcagcagagtcagcaacaaacatttcagagcttgtaaagaaggatgagaacagtcgcaaaaggtctcagcgttggcaatctgacagagccctgttacaagaggatcttgcagcacaaaagagcaggttatctcgggtccaagaacaccttcagcatgctaaagagctaaaggatcaagtgcagagccttcaaaattcccgggctggttctgtctcaagccacctaactaacccaggtag

SEQ ID NO: 34666 - DNA, 2526 bp, Zea Mays
ccgattcccatatggagcccaccaaaacccaacccattacctgatcccaggcggcagcggaaacgcaaggagaggggcggcgatgatacagtagatttcaaactcaaactgaccaccagagagagatagaggggagagatcggagaggaaggacgtttggagcaggcggctattgcaggctttgcagccgccgtcctcctgattcgggcccccctccccggatcgctccagattcgcacgatttggggatcgtgcgtttcgccatcagatcgggagaagaaaaatcaaggtgaaggggcaagtttctgcaacttaaataaatagagtgaatatgactgacatgaattctgatgagattcttgaggttcctgacactcctgaccgattacagcagtcaaaataccatgtttccagctctattgttgggagggatggtacaatggcagctgctaatccatcaccacagcgcaaatttagaattagattcaagaacaattccgtgcaaggttcatcaagtcaaaataatggttgtagcatactgcctgcagctttagatactgatcatattttcaaacaagctgaagcagcacagattctggaactgtctaaagactataaggcaaaattttccctacagaaacctgacagcacaaggatatctgttgacagtgaaaagagggctggaaaacatggctttgatcagagcagaagcatttcgaacaatataagttgtagtgtgactggaggaaggaaccctaccttccaagttaaagatggagaggttggtcagcaagatgcaggtcatcagagtgcaaactttctagacataggaccaggttttcctactattcaagtgggaaaaccaggatacagattatgcactcgcactactgataagctgaaaggtgtaacaggtgctgatgtttgtccaggatcaagttctggggaggtcaaaggggacttgatcactaacaaggtcattgcaggacctacaagccctctgcgtgtttttcctcgaaggcatgtgggccaaaaaaggctggtacgcaatggatgtatttccccctctaacatagccaagacagatgcaaaagttaatgaaaaacaggaaatgtgctctttaagtgaacatttggaccatccgcatcagcctgatgcatttgacggaggtgatgtgattgacctcacggagaattcaccaataatgacaaggcagagatctgaagtgaacaataaattgatgtctggacacaatatggacacaagggccgcaaaaaagctgagaacagacagatttggcaggactttggttcggcagtccaaatgtcatgcaaacaacagcagttgttctgaagttagcttatcaggcctcaacaacaatggaaaaggaattgactgtgatatcttggatagtgatcaaactggagaagctaatttgaggggggttgatcttagtactgctggaacttatctaaacaaaaacttttctgatataagcacggagcaaggttggagaacaacacacaaccacacaagtaaattacccatttcgtttatgggtaatataactagcagttccggatgggaatctggatcttctaccacacgatctaatcaaaaccatggatctgctggaggcaagcatagctctgttagtggagcaaacataatagttcctgataagatagggaataaaacaataatgcttggtagagaaaggagaaaacaaacctcaacttcttcccatattggtgaaagctctagtgctgctgacgaacctagagacctagttcgagtggattcactaatagaactcttgatcctaccatagaagcacaattggagtcggatgagttattggctcgccaactccaggagcagctctacaatgaatctgctcgttttgccccaacagaagagattgatgcaattgtagcaatgtcacttcaacatgaagaagatactcatcggacatctaggaccttaaggaggttccaaaaccatactagaggtgctcgggctactcgtttgagttcttatcgaaatgctcttagggctgaattagcaacagcaaacaatatgatttcccgtcagcggaatactgctccaataaatttgggattgagagctgctttagcaagatatcctggtgctttgcacattcaaccaaacattgacttaaatgactatgatgcactgcttgctctggatgaaaataaccaccagcacactggtgcttcagaaagccagatcaataatttgccacagtcagtagttcagtccaatagcattgaagatccatgttctgtctgccttgaaaatccttctgtgggagatactatccgccatttgccttgctttcacaagttccataaagagtgtattgacgagtggcttaggagaaagaaactgtgcccagtctgcaagtttgggattaactgaagtttgccgtaccagtctacagtggagttctacttggtagtggcagcgacgaggtgctgcaatttctcatacgggatgctttcc

SEQ ID NO: 34667 - DNA, 3321 bp, Zea Mays
ttccctcagcggtcaggcgggcctcatgcctcatcccctaaccgaacaggagtagccacggactccgacactccgttcaacccccctgcctttttgctctcctgttcaccccttgtgcccgcgctctctcgtggcgacgacttgcgcgaccgccgccaacgccaggcacctaggtcttcgtcggtcctttcttcagagacgagcacccaacagggggctacaagattggttttgatggattatgacaagtctagaagaagtaactccaagaagaggacacattccaattctgatgacggaaagagaaaacggttaaacactaggcatgatgacacatctatgttctctgagccaattgaaaccatctacaggatattgtgcccggtaaaaaagataggcagtgtcttgggaagaggtggtgacattgttaaggcccttagagaggaaactaaagccaagataagggttgctgattccattcctggtgcagatgagagagtaattatcatcttcaattaccaaaatgagcctgaaccgactgatgaagcagctgaagaaaaaaatagtgatggcttagggaacttcaaatcccattgctttgcccaagatgcgttattgaagatacatgataagattgtgtctgatgaaattcatgatgaagtcgccaatgatgaaaagtctgaaagtgcagatgatgtgactgctcgaattttggttcaaggcaatcaagttggctgccttctaggaaaaggtggctccattatacagcaactacgaagtaatactggtgctggaatccgtgtcttgccatctgaaaaccttccccagtgtgcacttaaaagtgatgaactggtgcagatatctggagcaccttcccttgtaagaaaagctctatatgaaatatctactcgtctccatcagcatcctcgtaaggaaaatagacctcttgaagaaataatagatgcaagcacacaaaggaaacgtgaatctccaacactacaacatgaatattcaatgttgccgcacctgcatagtgatcatacacctccaatacccctgcttgatccatatagaagtggaccacaatatcctgttactgaaactgaagagttctctatcagaattctgtgtgcttctgagctcattggttcagttattgggaaaagtggggccaatgttaggcgtgtagagcagcagactggtgctcgcattaaagttcaagagatcgacaaagatgcttctggagaaaggctgatcattatttcatctaatgagataccagctgaaccaatatccccagcaattgaggcactcattttgctccatgataaagttagtgcaccctctgagaaacaccattcaagtacaaggcttgttgtaccatcaagcaaagttggctgtattattggggaaggtggaaaagtgattactgacatgagaagacgaactggggctgaaattcgagtttactcaaaggcagataaaccaaaatacttgtcttttgatgatgaacttgtgcaggttgctgggcctccaactattgcaagaggagccctcacagaaattgcttcgaggcttagaactaggactttgagagatacaagtaccgccaataatcctccaccttttgccccttttgatgatcctcctgttgatatgcctagcagaaagttgtcactatatggagggcctgccactgatccaccgtatggaaggcctgccaatgatccactgtatggaaggcctgccattgatccaccattcggaagacctaccaatgatcgaccatatggaaggactgctgttgctcccccatttggaagacctgccaacgatccaccatatggaaggcctaccaacgatccaccatatggacgaccttccggtagtataccatatggaagaccaaacggaagtgcacctcgtgagccttccgatgcatatcctgtagactacttttctaaaagagaatatcctagtggaagtcctatgtttactagtaatgccccatcagctgcttatgagagatatgcagcacccacacgctttcctactagagaatttccctctgctttcagtcctggtgtagatcatatgcctcatcattcctatcgtgaccatgtgcctactgatagctactctagtaggggtacacagcaattaggcatcacaagaggtggaaattcagatgcttatgactataccgaggtacatccttgacgtgagcttccctcttttgcaaaaggccatcacctaaatttttcattagaagcttgagactttacacatgcctgctccattgcccctgttctgttatgttctgtattaggtggtactcctaaatattgcaaaaaagtcatatgttggtgtcttagctgtcacttctgtggcagcaatgttcaccctataatgtggtcacatggtgcaactcttttcatttgttgtcactcacaacttggttcaatatatatttggcagctgggatgtactctgctgctcttggctttaaccaatttttctttattttgtggcctatcagaaaatctcaagttctgtacatatttaaattttatcattgcacaggctgctggacaaattcatggacgtgaggattacagagaaccgacaagtgctaccggaaggttcttgagcactattgaactaaggattccaaatagttctttggggtctatcgtcggtgctggtggggtcaatctagcagagatccgtcaggtttctggtgcaagactgaggctacatgaggctcatgctggttcttctgagtctgtggtggagatccagggcacactggaccaagcaaaagctgcccagagcctcctgcaaggctttattagtgcaaacagccggcagcaacagcagccctattcttctcgcatgccactttacccaagctggggatagcttctggtctcatggtcgtgtcagaggaaaacagagtcagcagggtttgtcatgtggctgtagatctcggactgcagattagctgtagcgatgatgttgttgaaggaggctgtttaacagtgcaagcaagataacttatacttatgccttaggacaagtaatattgttttcctctgatgaaatacttggtaacgatctgtctctgtatttttatatttgattctgaatgctttgaaccctagtgttacaaaagctgctattttgaggtcagactacggaggccgaataattctgttatctgcagaattgggcaaaaaagcacatcttgctgaggttcctatgtcttcacccatatcgtttcatattttgtccagaatattggaaaccctaactctagaa

SEQ ID NO: 34668 - DNA, 2150 bp, Zea Mays
tagaggcagtgaagaggtaggggatctcgcgggaggcagggccgctgctgccacctggagatcccgaatcccgaccgccgccgcctggagctcccaaccgctgacgcctggagtgtttcgcgtccgatgggctgttgatcttaacagttttgcgtgccaaagtttaaaatacaatcatccacagactgaggtgcgaaatgagaaagctgatgagtttcttgctctccttaaggaatgggcagtcttatgtgaaaaatatgttcatcaagacgtggattcgaatttagcaggttcagaggatcaagaggatgctgacactcttgacaaggatgaatttgttgtacagaagcttattggaatacgctatgatggcactggaaggaaaaaaggcgtatattttaaggtccaatgggaaggatatggtcctgaagaggatacatgggaacctattgataacctgagtgactgtccgctgaaaattagagaatttgtacaagaagggcgcaaaagaaaaattctcccgcttcctggtgatgttgatgtcatttgtggaggcccaccatgtcaaggtataagtgggtttaatcggttcaggaaccgtgatgagccacttaaagatgagaaaaacaagcaaatggtgactttcatggatattgtggcatacttgaagcccaagtatgttctcatggaaaatgtcgtggacatactgaaatttgctgatggctacctaggaaaatatgctttgagctgcctagttgctatgaagtaccaagcacgccttggaatgatggtggcaggctgctatggtctgccacagttcaggatgcgtgtgttcctctggggtgctctttcttccatggtgctccctaagtatcctctgcctacatatgacgttgtagtacgtggaggagcacctaatgccttttcgcaatgtatggttgcatatgatgagacacaaaggccatccctgaagaaagctttgcttcttggtgatgcattttcagatttaccaaaggtcgaaaaccatcaacctaacgatgtaatggagtatggtggttcccccaagacagagttccagcgctacattcgacttggtcgtaaagacatgttggattggtcgtttggtgaggaggctggtccagatgaaggcaagctcttggatcaccagcccttacggcttaacaatgatgattatgagcgggttaagcaaattcctgtcaagaagggagccaacttccgtgacctaaagggtgtcaaggttggagcaaataatgttgttgagtgggatccagaagtcgaacgtgtgtacctttcgtctgggaaaccactggttcctgactatgcgatgtcattcatcaagggcaaatcactcaagccattcgggcgcctgtggtgggacgagacggttcctacagttgtgaccagagcagagcctcataaccaggttatattgcatccgactcaagcaagagtcttgactatccgggagaacgcaaggttacagggcttccccgattactaccgattgtttggaccgatcaaggagaagtatattcaagtcgggaacgcagtggcagtccctgttgcacgggcactgggctactgtctgggtcaagcctacctgggtgaatctgacgggagtcagcctctgtaccagctgcctgcaagttttacctctgtggggcgaaccgcggttcaggcgaatgccgtttctgttggcactcctgcgggggaggtagtcgagcagtaaaaggatagcggagcaaccctggttggtattttgattcgagcccatccagtagcatgtttaccaataaataatcattggtcgtgctgattcttatggttggagatgaatgtatgtagggtgtactcgagctcgagtgcttgttgtactgtaggttgaggtttctcatccattggcctgcctatttgtggatgacgtttcatttcagattagcaatgtgcttatttaaggtttcgtcatgtacctgtattctacaatccactattgtttccaaagacagcatttgatccttgttcaacgcgagcagattttcgtccaccaaagctgtgtagggatcgaaatgtcaacaatgaattgagtcattcaatcatttgtctaatgttaatgtgtcctttgcatttat

SEQ ID NO: 34669 - DNA, 1741 bp, Zea Mays
tcctaccttcggcttttctactccagtgtcattgcgtgtggtgcccccgttgcgactgcgggggatgttagactgtgtgtgtgggccgacaccactgttgggctgccggacctttagggttagggtcctgtgagtctatatattgtaccccatgtccccatctcctatgcaatacatcaagtactacagtttactacaataccatcctaattgcacaaatgcatgcagaaacgaatttacgttggccgtggaatgcatgaaagccaagtttcactttttaagtatacatttttttggattttgctgctatgctccaaattttcgtttagctactttgtccaaattcagcctctaataaaaccaacaaaggatgtaatgggtgttcataatattcattacgagtggcatgaattttttccaaatgcatcctataatattggtgccatcatgtctctatgggctcctgttctactggtctatttaatggatacacaaatttggtatgccatcttctctacgatatttggtggcatgactggagcacttgggcgacttggggaggggttcgagggttttctcgacctgtgtgagaaggtcttcttcttaatacaatgcccgggggctatcttacccctgcaggtttctcccaacaagagaactgaggccgccaagtttgctcaattgtggaatgaagtaatatgcagtttccgggaagaagatcttataagtgatggtgcagctgagaactttttgttgcatagggagatggacttgttagtggttccttattcgtcagaccccagcctcaaattgatgcagtggcctctgttcttgcttgctagcaagatacctatagctttagacatggcggcacaatttagacctagagattcagatctttggaaacgtatatgtgctgatgagtacatgaaatgtgctgtactggaatgttatgaatcattcaaactcgttcttaatttattggtggttggagaaaatgaaaaaaggattattggtattataatcaaagaaatagaaggtaatattggaaagaatacattccttgccaattttagaatgagcgcactcccagttctttgcaagaaatttgtagagcttgtgtctaccttgaaagaaagagatgcctcaaagtttgataacgtggtgctgttgcttcaagacatgttagaagtgataacaagagatatgatggttaatgagattagagagctggctgagtttggtcatggtaataaggattcagttccaagaagacaactttttgctggttctggtacaaagcctgcaattgttttccctcctccggtttcagcacagtgggaagaacagattaagcgattgtaccttcttttgactgtgaaagaatctgcaatggacgtcccaacaaatttagaagctcgtcgaagaatagcatttttcactaattcactattcatggacatgcctcgtgcacctagagtacgcaaaatgctctcattcagtgttatgactccttactacagtgaagaaactgtatattcaaaaagtgatcttgatctggagaatgaagatggtgtatcaattatattctacctacaaaagatctttccagatgaatggaacaatttcatggaaagaaataattgcaaaagggaaagtgaagtatggggaaacgatgaaaatgtactgcaacttcgtcattgggcttctcttagagggcagacactctgtagaacaggta

SEQ ID NO: 34670 - DNA, 262 bp, Zea Mays
cgggtgactcgttcgcggtctgttttgtttaagggtcacggcaatgatccttccgcaggttcacctacggaaaccttgttacgacttctccttcctctaaatgataaggttcaatggacttctcgcgacgtcgggggcggcgaaccgcccccgtcgccgcgatccgaacacttcaccggaccattcaatcggtaggagcgacgggcggtgtgtacaaagggcagggacgtagtcaacgcgagctgatgaccgcccttactag

SEQ ID NO: 34671 - DNA, 2291 bp, Zea Mays
gaaataagtcccaaagaacatgtttggagcctaaaccgaaaaggaggacaaaatttctcctctcgaagaaccctagcggcaaaacctttgctccgtcccgccgtcgcctgctcccatcccgccgccggcgctgccacccgcatctgccaaggggctcgccgccggggaggctgctcgcggtgccgcgctctctcccgcgcccgaccttggccctcccctcctccatgatctgcgcgagaccatggcaagtgtcccgccaccaaggaggacctcaccatggatgatatcgtgccggtcaagaccaacacgatcgtgaagcccaggcctttgcaggctgcaagcattccaggactccttgggatttttcagaacgagtgggatgctctcatgctttctaattttgctttggagcagcagcttcacacagcaagacaagaacttagtcatgcactctaccagcatgacgctgcctgccgtgttatagccagattaaagaaggaaagagatgacgctagagcacttttggctcaagctgagagacagattcctgcgtcagttgcaggagctgctcctgcagctgttgtttccaatggaaaaagagtaattgaagatgaaattggccctgacgggaagaagatccgtcctggtatcaaccctgtcatgattgatgaacttacagagtgtaatgccatgctttcagcacagcgcaagaaaagacaggttcctccaactctggcaccgatcgatgcactcgagagatacactcagatctccagccatccccttcataagacaaacaaaccaggcattttgtccatggatattcatccttcaaaggacattgttgcaactgggggtatcgatacaaatgcagtaatctttgatcgttcatctggtcaaatcttgtgcacgcttgctggtcactcaaagaagataaccactttgaagtttattccacgggatcaactctttgtaactggatcagcagataagactgttcgcatctggcaagagaatgagaatggaaactataactgtgtccatacactgaaagatcatactgatgaggttgaagctgttacagtacatgtgactcagaagtattttgtgagtgcttccaaggataactcttggtgcttctatgatatttcaacaggatcttgcctgacacaggttggcgatgcttcaggacaagagggatatacatctgcgtctttccatccagatggtcttatccttggaacaggaactactgatgctgttgttaaaatttgggacgtgaaggctcagtcaaatgtcgcaaagtttgagggtcatgtcggaccagtcactgctatgtctttctctgaaaatggttacttcctagcgactgctgctcatgatggtgttaagctttgggatcttcgtaaattaagaaattttaggactttctctccctatgatttggacacgccaaccaatactgtggaatttgattttagtggaaactatcttgccattggtggttcagatataagggtctaccaagtagctaatgttaaggccgaatggaatcttatcaagacattacccgatttatcaggaacagggaaagtaacttccgtaaaattcggagtagacgcgaaatacatagccataggttctatggaccgcaatctacggatatttggtctccctggagatgatcaaatggaggaatcaaacacagcggccgagtgatgggaattcatggtgcctaatttgtttcttctgccatcatcctcattatactgtggtgatggatagactgattgcacatggatacatcaccgtcacaagagggaagggtcctggcggggattactggtctgagcttcggctggtgtaaaacaagctgtgatattgttgtactgtaggccttactaattcttctgatgaggatacaatttgttttgttgactacgatgctaaacagctaaagttctctgcgcagattccagtgattcaaaacgaactacttgcttcttagcttctttattacataggtcaatggaagcactataagatgtgcccatgcgagtgtgtccagcgtgatctgtgaagattggtgatttgtacaattcattttgtttctgagtttcttaggttgtgcgtgtttaggatcagttacaggttaagccgctgtctttcatttgtgtatctggccactatcgagacaagatacatggcgtgcctctagaagtcaaaagtctgaacagttactcagaatcagctggaatactatctaactatcttgtgcttataaaaggtcg

SEQ ID NO: 34672 - DNA, 2300 bp, Zea Mays
ctggccgcctcgcccaagcgcgctcagccgttccttgcttttattttactccccggccgcggcgccgtgcggctggctctgcattctcccctccggccctcccctcgtcttctcttctcttctccccgcggagcgagcgagagaagcaaggccgctccgtgcccccaaccccgctcactgagcaaagcggaaaaagcgaggaaaatatcctgctccagcgaagcaccgcaggccgcagccgcagccgcagcagagaagagcagacgccatcgcccgcagccgccgcccccggagaatggtgcgggccggaccgcgacgggcgaaggagggcgccgcggcccccggcggcccccgccgccgctgatagtagtctacctgctgctaaccagccatctgaaggcacagtggtcgcacgcgaggggcccggattgattgggtgataggcggcgggcgcagatccaccgaccccctcgtcgtgcgcctgtgtctctggttccggtccgtgtccccttggccgcttggtggaggccggaggcgtggtcggtgcgtttggagtttgggtatggcgggtggcggcgagggggatcgcgtgggtgtcgggggagcccagcagttcgtggaccggagcaaggtgaggattcttctctgcgacggcgacgccaccagctcccgggaggtgctgcggctcctctgcaactgctcataccatgtgacctgcgccaagtctccgcggcaggtgatcaatatcctcaactacgagggcggcgagatcgacatcatcctggctgaggtcgatcttccggtctccaagtgcttcaagatgctcaagtacattgcccggaacaaggacctgcgtcacatccccatcataatgatgtccaacagagacgaggtgtctgttgttgtcaagtgcttgcggcttggcgccgccgagtacctggtgaagccgctgcgcacgaatgagttgctgaacctttggacccatgtgtggcggcggagacggatgcttggtttgcccgagaaaaacttcttcaatgacaacttcgagttggtgctctcagaacctagcgatgccaataccaatagcaccaccctcctctcagacgagaccgacgataggcctaaaggaaacacgaatcaagaaacaggcacctcaaagcaacttgaatacgagtctaatccttcggttgctgagcccgaccagagagaaaagatggagggtgttccaggctctgccctagatgccagtaaaaaatcctctccaagaagagcgttttcacgccctataaaaactaacctgagggttgccgagtcgtctgcatttctagcatatgtcaagccaagcaccccagccaccagctcatttgacagcgaattacaaaggggtggcagccgattagattccttggataaccagggtaattgctctagcgcaaccgatagaagtgacactggtactgatgtaaatattcggagtaaagaagcttttgagatgcctgcgcagtaccctatgggatggtagagcacaacatggcactttcgtcggcgcaagattttcaagcaaacataaacaatgctcaagcacatacaccgccagcgatgcttcctcagtacaatgtttatcctcagtgccatggtttacctgtgataccatcatttcagtttaatccttctggcatgagtacgcactcaagtcatttaccaacgcaaaatgtgtggtcatcggcatcgagcacaccaccagtgcctgaggaaacatgcagtcgctctgaaaggagggctgcagcacttgccaagttcaggctgaagaggaaagagcgctgctttgacaagaaggtgaggtatgtgaaccggaagaaactcgctgaaacgaggccaagggtgcgaggtcagtttgttagacagccaaccaatacggatgtcatcagcattggagatgatatatctgaagacgaagatgacgatccatcgtccagggaggtagatatggtttcttctccagagtagtagtggagaggtcctccatgtgaaaaaatagactgcagatggttactgctcatcttgttacaactcagtagacctaggcaatacaccctttttgctcacacacagtattacatttttgtccctaaaacatgtggctgttaccctggttgctttaatgaagaaatcatctttgataaagtgtagctgaagttttgctagttattgttgcacagaccagtctaatcaatatgatcttatggcaggataatcttttgagaaaaacagggctattattgtacattcctcctattatt

SEQ ID NO: 34673 - DNA, 1971 bp, Zea Mays
gtcagtgatgctatttttttttttttttggtcagtattttgcagctaaaaggataattcacatttgttgctatcaaggtttttgaaagttttatatgattcagagaaatatatattcttcggctagtgggtctgctcattgatggaaggcaaccagattttggtccagtcagagcagagccttataccaggtgtgcaaactcttgtcatcggtcaagagtttgcagatgttgacacttgtcggagggctgtcaaggacatggccattgctttgcactatgagctccgtgtggtgaaatctgatcgtagccgtttcatcgcaaagtgctcaaaagaaggttgcccttggcgtgtgcacatcgctaagtgccctggtgttccaactttcactgtcaggactttgcatggggaccacaaatgtgagggtgttctgaacctgcatcatcagcaggctactgttggttgggttgctaggtctgtcgaggcaaggctcagggataaccctcagattaagccaaaggagatactgcaggatattcgggagcagcatggtgtcgctgtttcttatatgcaggcatggcgtggaaaggagagaagcatggctgcagttaatggtactcttgaggatggataccgccttcttcctgcatactgtgagcagattgttaagacgaatcctggtagcgtcgcaacatatggaggtattggaccagggaatgccttccagcggctgtttgtctcgtttcatgcatccatttatggtttcttgaatgggtgcaggccccttctagaaattgacaaggctgacttgaagggaaagtatcttgggacattgctttgtgcttcagctattgatgctgatcacatgatgttccctctagcatttggtgttgttgattctgagagtgatgataactggaattggtttatatcggaattgaggaagatgcttggagttaacacagataagatgccggtcttgactatactttctgagagaaagcggcaagtggttaaagcagttggatctaatttccccactgcttttcatggtttttgcctgagatacgtgagcgagagtttccttgacgagttcaagaatactaaactgcttaaccttttctggagtgctgtttatgctctcacagcatcagaatttgatgcaaaggccatcgagcacataaggcaccaactgacttgctggtttgctgagcgtcagaacttggcacagtcatacaactcagttcttgttccgtcagctgagaaacttgtttcagaagccatccatgactcgcagtgctaccaggtccttcgagcaaacaaggtggagtttgagatcgtgtcgtcggagcggacaaacatcgtggacactgaagctaggtcctgctcatgccgccgatggcaaatctacggcattccatgcgcacatgctaccgccgcgctgctttcgtgtggcgaagacccgcgcttctatgctcatgactgcttcagtgtaatgaagtaccgagaaacatattcgcagccaatacatccaattccagacaggagccactggagcaattcttctcccgggttacaaggtgtggccagcaaggccgatgtgatgatgctcagcccacccaatatccggaggcctcctggtcgacccaagatgaagattctaaagatcgagagcatgaagcggccgaaacggatcgttcagtgtggacgatgtcatcttgtagggcattctcaaaagaagtgctctctgcgaagctgtgactcgtatccacattgatgtaccctgaacttcgttttattgataatttaggaatttcattcttgcttgttcgtatcaggtgcaggtagttctcttatggaagtgctactgtagttgctctgcctctgaaaccatgtcgacgttgagtctatgatggcactggaagtgtctatacgcaagccgccgtttcagacaagggagctgaaaacatgc

SEQ ID NO: 34674 - DNA, 219 bp, Zea Mays
tgaatattgatggagatgaagatctattttcttcttggagcctcgagccctcgaggtagcagtgtaggcgtgtagcacatgtttttggtttctgcacagatttgatgtcctcggaacaacctctgcagttcctttctcccgtgttgagatggccatggcatcttgttattattattattgatgaaggcagagactgctctggtctgatgtactgaggcc

SEQ ID NO: 34675 - DNA, 2937 bp, Zea Mays
aaccttccctctcattctccgcctctgccccccggccacgctcctcacgagtcaccggggaggcggggactagcgcttggcaaaatcaacgaacgaccaacgcacagtcaaacactccgacgaccccttcctccctcacccctagccgcttccccggaccccgcgccgatcccaccgaacccatggcgtcggagatcgaggtgctcgaggacaccaccacctcctcgacctccctcgtcgcggccgcgtccacggccccttccgccgcggagggcgcaggggcgccggcggagaacgagtcgctgaagaacgacgtgtacaccgcagcggcgtacggagatctggagaagctgcagcggctggtggagggggagggccgcccggtcaccgagcccgacggcgggggctattacgcgctccagtgggccgcgctcaacaaccgcgtcgccgccgcgcagtacatcctcgagcatggagcagacacaaatgctgtggatcacactggacaaacagcacttcactggagtgctgtacgtggtcatattcaagttgccgaactacttctgaaagaaggagctaagatggatgctgctgatttatatgggtatcaggccacacatgttgcagcacagtatggtcagactgcattcatttaccgcattgttgcgaaatggaatgctgatccagatatccctgataatgatgggaggagccctttacactgggctgcttataagggatttgcggactccatacggcttcttttgtttttggatgcttataggggacggcaagacaaagaaggttgtactcctttacactgggctgctattcgggggaaccttgaggcatgcactgtgctagttcaggttggcaaaaaggatgatttgatggtgaaagacaaaactggcttaactccagcacagcttgctgccgataagaatcatcggcaaattgcgtttttcctcgacaacgctagaagggtacatgacagaggatgtggtgcgaacaccagatttgggaaattgtcaaaattaggccttgcaccttttctttggtgcaccattattggcatgcttattacatacgtacactctgttatattaggacaatatgtcatgactatgacagcaccatttgggatgttcgcatggtcaggagtttttcttgcaactgctgggttggtcatgttctataaatgtagcaggaaagatccgggttacatcagcataaatacaaggggctcgcaaaatcaaagggacgatgaaccactgctgaagatggagttagaaaatcctgcgcttctttttggcaactggtcacaactttgtataacctgcaaaatagtcagacctgttcgttcgaaacattgttctacatgtgatcgttgcgtggagcagtttgatcaccattgcccttgggtatctaattgcataggaaagtgtgttctttcatccgatctatttttgaactgtaactgcagaagaacaaatgggaattcttcatgttcctcaccttagaagtttttgcaatgatcattactggctctgctgccattataagacttgtaagggatccagattctccatcatcttttggtgcttggattcattattctgcgtttcagcatcctggggttgtttcatttctcgcattggattgtttccttttctttggagttgcagttcttacagtttctcaagcatcacagatagcaaggaacattacaacaaatgagatggcaaattccatgagatatgcatatctcagaggcccaggtggcagattcaggaacccgtatgatcatgggattcgcaagaactgctctgacttcttgttaaatggatacaatgaggacactgaacggctagaccagacattgcacactgatgaggagatgggaatgatacagatgacaagagcggtttcgcagaatggtgacaatcatttacatcatggtaatggcacggaacatagttgcgctgattcacaggcaagcccaaaacctcatagccaagtgggttcgcctcagtgttgtgatcacagtaagaggactgataggacactgttgggcctaggtttgggccttgggcgaaacagtgcatcccggcagtatgttcggtctcttatcccattgtgatctatcatttggatatcatgtgttcgtttcagtgtagattggatttgttcactgctccggccccatcttttatacgtgcccttgacatggttcaccatgtaccattggctggtcagggacattgttgggccattagcacaggaatactgagatatatctagtgtttgtagttttggggtgaactcagagaagttgaaggtaacgacttggcttgcgaatatcagctgatctgcactcgggaaatatcagagagcttgtgcagaaaaggtaacagttatgggcttatggcagatgcagtagcatgagatgtcttcataattgttgtgtacatcaggttcagtggtcttgggggcctccttcttctgaaggtcttaaaaacacggttaaccatttattttcagtatgttattaagtattacaggagcttcgttactagaaaaacttcgacatagatcaatgaaagcacgacgaagcaagctttgttacgttgtcacagtaagtcgatgtagggagaatgtgttgttcaagctgctgagtgcaaatgataatattgtccctgtgacatttgtaaatcttgtatgtaatctttgagggtatgaatgtaatatcgtacgaattgtacgattgcttataaatagatgaacaatactgttcacactgaattgagattgcattcacgctttcgctttcaagcaagccgaatatacaaatgtaatgtacatcatgtatctctttgttaatatatgagatgtatcttgatgttgtttgacatttgatatgaaataaataatcagcat

SEQ ID NO: 34676 - DNA, 1642 bp, Zea Mays
gcggccgccgcttcctccatccgcacgtaggtgtaataagtccggtcgcacctacaccgatggccatacccaacgtgagtcaagccaagtccattcccctcccttgcttcctcaacttgttgtcttgtggtctgctatttgtctcagagaaggtggtgccatcatcatcagttgtgattatgaattatattctaccgataggcttagataatttttggaacacaacattgctccaaaaagtttttctgaagaaaaggtatcaatctgcagtttggtaagtgagtctgaatctgcagcaccaaggacttcaagaattagtctgaacctgcacttacagttccatgggtcttctcaattattaataatattatttttaatgaataattgaatatatattgagtctgtatcatagattcagtcgccttaacaccctttgctgttttcccacttaagttagttaatgagatgaatggatgtaaattacgtagtgaatgtatgataagtccaggctacatgttaaaagacacacttggctacttgagctctgtattgccatgaagaaatcttactgacgggtgctttcatctgctatttggatccgttgctgatggatcttataaaggttgcggagacaaaaacaaggagcatggaagaggaagtaatcaagctgcagaaatgcttacaggacaaggatgagcaactgtgttcatccacaagtagcacggaacagctacaggagaagcaggtgttgcatcagctaagttagctcggatgtagtgcatgtcattgctgaaagagctgaatgagaaggacagctcactcaaagaccatagacttcgagtgaacaatctaggtgagcagcttgatcttctccagaaggatgtacaagcaagggaggtcacacaaatgcaacttaaagatatagttataaggatcgagaccaacatcatggatgaagttgccaaagcttttgaaattgcgatgttgagagggggaatcggaatattgtctactcactggacgaacaaaaccaagaaccttgaatcacagttaaaaagcaccagagaactgatcaggagctgaagaagagggttctgaagcttgaattttgtctctggtcctgtcatcccctggtgtgttcgccaccgcacctaccgctgttactagctcccttgctcttctcttgctgcgactgggatatagcatcgtggatcttgaacctaggccagaatttaggcaggtctagaaccaccatgatgcctggaacatagtcctattttatctgacaactctttcttgtcctgattcttggcggggtttcggcatcttctgataggaccatgctaacaggatgctcaacttttacgctccaggaacccaaatgaaccttcaacttgcttattctgtgagatctgtgagcaagcgagttgtcctagaacagttggctcctcacaatgggtattcgacgctagccccatccctgccacagacttgggaaaggcacagtgatttttatggtgacatgaagacattcctctttaaattatatctttaagcatccatttttcgccctactggtgcatacaagaatttgcaatggagaccttattttcttcacagcatccaagacaatgttcatttc

SEQ ID NO: 34677 - DNA, 2025 bp, Zea Mays
aattttcttttctgcggtccaaacaatccattttttttctattccagtggtttgcaatccggaagatgagtgagaagatgagcaaggagggatctcgctttagaccagcgaatccatccacaaagattccgtgcacctccagcgcagcctccgctgtctgtccccgcggccgcggcaaccgagcaggaagaggaggaggatcccgtcctcccagtctagagcagccgcttgcaaagcgcatcggcggcacggccgtggattccgcgaatctgccaccgcttgctgctgcttctgagactgacaccgccatcgcagctgatggggatacccagcgacggcgacgacgtggtgcaaatccggcacgccgacgccgccggcgagcccaccgtcgtcaccgtgagctgccccgacaagacaggactgggctgcgacctgtgccgggccgtcctcctcttcggcctcagcgtcgtcaagggagacatgagcaccgacggccgctggtgctacatcgtgttctggctgttgccgcgcgggcggcggcccgtggccgtgccgtgggacctcctcaaggaccggttgcttcagctctgccccgtcgcgccgccattcggcttcgggtcccacgacgcgtacctcgcggcggcggctggcctgcaggacgttccgcctcccgcgccacagctcttcctgctcaagctatgctgcttcgaccggatgggactcttgcacgatgtgacacgcgttttgtgtgagctagagctcacgatccggagggtgaaggtctctaccacgcctgatgggagtgtgctggaccttttcttcatcacagatgccagggggcttctgcacacaaagagcaggagagaagaaacccaggacagactcgagagcgtcttaggcgactccttgacatgttgcgaaatagatcctgctggcgaagacatggtgtcttgctgcctccagtcctgggcctgggcttcgctgacgcctgctgttatagcacagatgtttagcacagctgatcgcgtggaggagcaaccgatcggcacaaggggtggtggtggtggtaccatcatctccgtgacgatggacaactcgcttagccctgcccacactcttattcagattcagtgtggcgaccataagggcctcctgtatgatgtcatgaggatagtcaaagactgcaacattcagatttcatatggccgattctacgcgagccaaaacggaaggtgcgagatcgatctgttcgcggtgcagtcggacgggaagaagatccttgatcagcacaggcagagagcactgtgctgtcgcctgaggatggagctccgccgaccactccatgtggcgttggtgaaccgaggtcctgacacggagctgctggtagcgaacccggtcgaggtttctgggaagggtaggccgctggtgttctacgacatcacccttgctctcaagaatcttcagagacgaatcttcttggctgagattgggaggcacgttgtggaaggcagggagtgggaggtctacagattgcacttcggtgaggagcacgagctctcgtctgcgctgcggaagaagattgtggatgcagtcaccaacatgctgatggggtgggactgatggcactgctgctgctgccgtgcctcggtctgaaacattatgcttagtgttcttccagaaactaacctatttggtgcaagcaaagaagaaacaactgatctctatctcttagatgcagcggttttcagctaatgcagagaccatgaaacctttggttatctaaacatgcactaggaaccggggtcctactacttagtgggcaccagacctgatgtatatgcatatactgaagcatgatcaagagtcatgtgtggcatatatataccattttgtctttgtcagaaatcgagttcttcatcagtacacaagcacacaaaaaaaacacgtagaacagatgttgggagatggaagagttgtacttctggatgattacaaaatatgaagtgtatataaggttcagatttg

SEQ ID NO: 34678 - DNA, 1606 bp, Zea Mays
cgagtggatgggaccggcccatgcccacccagactagctgagtcgcacccgtccatctccctcgccgcgtaaaccccccccggctcgttcgactgccgactcggccgcgctcgcctctgttcaatcaccggcgacggaggacgccgaggaggctcttcgccgccgagtccatttctgcgagatccccgccgagcaagaagcgcagcaccgcgtctgcctgcaccagcgggtggccggccgcgtctccttccgagtcccgagcgcctgccgccaaacttctgacgagtgtcagtgacatcgggtcgggttcgctggagaactgaggggggcttgccgccgacgcgatgaacgcctccgcaatcccgtcccccgcaggggtacgggaggccggttcttcacgggcttcaccaaactgtgcaagggcctcgccgtcatcatcttcctcgtccacattttggtccacctcttcccttcagccgccacctatctcacgctgataccagccaggacaatcccttttgcttggaacctgattaccgcttgttatattgagcaaacaattccaggggtgataatgagcatagttggtcttcttctactcgggaaggtgttggagcctttatggggagctaaagagttgctcaagtttatttttattgttaatctctcaacttcagcttgtgtcttcgtaactactattgtgctgtactacataacacaggaggagacctacctttacacacctgtttctggattttatggagttctttcaggactactggtgggcatcaagcaaattttacccgatcaggagcttaacctttttgtgctcaagattagtgcaaagtggattccatctattgttgcatttacctctgttgttgtgagcttcttcgtaaaggaatcgatatcatacctccccatcatattatttggcatctacatgagctggatttacctgcgttacttccaaaggagtttggaagtaggccttaaaggggacccaagtgatgaattctcattttcaagcttcttccctgtatttttaaggccagttttggaccctattgcttctatattccacaaacttttctgtggacgatctgcaaaacctgaaggcacaggccagacactggatgggtcacagttccctggtttaggctccattgaggcaaacaggaggagagaaaggggtcagagggcactagagcagaggctggcagagaagccggccgcggtcaggaatactgagggcacgcctccgccgaagcagcagctggaggacgcggaggatgatgcttctgacgaagtctgagcccttctgttttcagttggtggaattcgctggcaggagatccttgtcaagttttcgacccgcagtacacagtagctcatggcatggagattgtaacgaagcagtgcaaccgggcaagaaggcaaatgcgacacgcatgctcgaaccagttcttgcaagacagcgagtagtgtttttttttttgttgttaatgggtgtttcgtgtcgtgctcagtacccaactcttgccaaatgctttacattgtttcatgtgctacctgaccgaaacgctacgctgctagtgctacgcgc

SEQ ID NO: 34679 - DNA, 597 bp, Zea Mays
tttttatttgtcgcgttttagttcaaaaatgaactaacgggtgacaaatattcgagaacggaggtagtacaatatatcagtttccaaaaccctaaaagaaaggtcccagctttcccaaagtttgcttaactttccatttgagcttttcatgattaattttgagtcatatgcctatctaataaattggcatatcaaataggatggatgtgatttagggaatgatctggctaaaatttggaaacctgttctgggactggttacaaggaaccaaccggttcaaaccagttctatgaaccctgttgtgcagttcagaaagcaaacaacataccttgcgataggaatgcagcattgtcctctctaaccttttatcaagcttcttaaatgtcaagccactgcttccaaaaaatatgagtaagcactctgataactacaagaaatgtgagttacagtcacaaacattacacattacctttcctccagtatatctcttaaggcatccataaatgaatcaaacctctgccacaaattattaatagaaggttagaaaggaatgtaaattccaggtcatattggatgttaagcaacttaattatatat

SEQ ID NO: 34680 - DNA, 4024 bp, Zea Mays
tcaggcaggcaggcaacgcccaccccccacagaggagagagagagagaaagaggcagcagagcacataaccaaacgacacccatccgaaaaccccgaaaggaggagggaaaagggtgagagaaaaccacgcagtcgcttgtccagacaaaacaagaacaagaacccaccagtacgcacttcctcctcctcctcctcctctctgcctctctctcctccctccctccgccagtccgctcccccctggcccatcagatccaattccttcccccgacccccgtcccggatccgccgcaattccttcctgcgtcgagctcgactgctccctctccctgcccgcaagaatcccgccgtggccggcggcttagtgggactcccaagtcgaagccaaggctggtggggggcgcgctcctgccgggcgtagcgggccatgggcgcgctgttgccgttcgtgcgtcgggtaaccagggccgtcaggctcagtccgctgcagcgcagcgccgaggatcggtgagttttgcaacaagaatgggggcaaaagtagaacgggaaagttatatgcctggatattatgccacgggggatctcaatttggaaccaaatggtagatggtctccatactatgaggagatgacatcaaatgatcagttatgcaatggcttcacaacaaaaccaacaaatgactattcagaatttgacaaagaaatactcaagcatcaaatacttgaacatgaagctgtgtttagacaacagcctcacaacccactcgctatccaggtgtatgaactgcaccgagtttacaaaatacagaaggatatgatgaaacaacatcaaagcaaagaggtatattcatacccaactttggcagttgcatcacatacaaattcaccatcacaagtgccacaaaacggtgcaaagatgatgtggcagatgccagttcctccaatgtccacaacatacaggaaagctattggagagcataatgatacaaaccagtcctccatgaagttccttagagaaggcagtgtgcagtcctcaccaaatggatttatatcaagtgatgttggtccaagaagcagacaaggcacttttgaccttcaacttccagctgatcattatatagatgacgatggcacatcagataacaagcccatagatttccttggtttggcatcagatacaaaaccccggaatgatgctgagcttacattagttagtgcagaaggcttgggcaagttcagtgataatagttcatcctcgggtttgcagactacaaataatcttggaccccggcaggttaccgacctgaatgaatcaaatactggcttccatatgggtagagcaaatggatcagtttccagaggccttccgcgtacccttgagaactcatggaaccaaccaatattgagagcaaacacaactaatttcagtttcagtaaaaaacactccaaagaaaagcacacagatgaaggtacaagctcaaatttctttgacacaagtgtgaaaacaatacatgacgacaaaccatcaatcaataaaggtaaacaagtcagcagtgtaacttttttagcacccagatataatgatgctgaccccccaaaatacttcaaagctgttgatgggaggcctgccactgccagttataaccactttgtttaccaaggtcagaatagttcagttggatggattgcacaaagtcctctggaaccttctgttatcaataattttgctagagttgaccgtccacatcatttgaatatgggtacatttactgcccccgtctctattcctcaaatagacaatccttcaattgtctccccgatgggttcttgcacagcagacccaaggagcagcgttatcaataatcctgctttaattccaagattcaatgggttctcaactgtgaattcgtacaccagtcttagtgctgtgacgcagagcattggaacttcaatcccaaagctgataaatgtggataatgtagataaacgctatcgtggttttccacttgattcgttttccgtgtctcactcacgacatcaggtagcagtttcaagtaacctggagcaaaagaattcccagaagttggaagattcagatcaacagtcccatggcaagggtatgaagaacttcaatttgaatgagacactgtcagattgtcaggaagatggtcttgtagaacaagatgggagatgtgcttccagttttcagcatgataaagatggggggtcagtacttgggatctcttggctcaaaaaaaaacttatgtctgctgacccaacagctgtggagaagccagggaagatttttggacattcattgggaactgcaatagagctgaaaaatactaaagaccagaatgaaccagctgtgactattcggaatttgtcagattctgcttctacatctgttggctgtgcaattaagaaggataggccttcggataacattgttaccggaactctgcctgtctgtaataaagcccaagagggtgctacatgtttacctctttcgtgccagaagcatgtgcctaaagatggacaagccgctgaaggagccaccaagaaaagtggcgcccccatcaggaacttcatcgatctcaatgatgatgtaccaaatgatgacaattctgaggaatcagtagtgtcacacgaatgccacgtggaaccttcacggaacaaccatcctaaacgagcatttgtgattgatttagaggtgccggcctgtgaagaggacgcttcgtgggatattgatcaagaatgcgcgcagccgaaacctgatgcgtaccaggaagttgacgacggatctgatacatccgctctagctgcagccgagaacatcgtagcgttgtcaaggaatacgccaacagccgcagaggcatcggacgatacgttgcagtggtttgcagatctcgctgtattaaacatcaacgaccttgctgagcaagctgaactccaagcttgtacgaatgattccagtaactacgagtcggattcattcgagtccttgacactgaagctggaagagaccaagatcgacgatctctggagcaggccactggaacctgaaaccgcaaccgatgaacagacagtttcagctgctcaccttctcaccaagcccagaaggggccagcaaaggagacggcggcagaagcgagatttccagagagatgtcttgcctggcctttcgtcgctttcccggcctgagatcacagaggacgtccagttgctcgaggggttagtccaggcttccgggggatcctgggagtcgagcttgactaggcgaggacgttgtggtgggcgtgctagaggcaggaaacctcggaaaactgtagtaaccgtaattgtagaggaggaggaagaggaggaggtagaggttagcccaccgccaaaacctgctggcactggggaattggaagccgatggcaggggtatgatcgggtggggcagaacaacaaggcggtgtcgcagagcgagatgtccgtcaggtaacagcatggctactgcgtcttgagtgggagggtatttcttggcagcaagcattggacctgattaggtactgggtggttcacaattgttgtattgactccgatggatgggctggtggtataaggtgatcacactcatatgagtgtcggcctactggtctcagcacaactttcgtgcttttgggtcgaaacatggtttacgttcttataataagttcggtaaattagctggcgagacatttctgcgacagcattgtactaagctgttccaggttatgaggcccggtgccccggtatatattcattgtgagaaaaactgcaatgcatgtaaaccaccttgatctctgaagaatagctcatcacatgtgtaacaaaagggtgtgaatgaggctctgagcctgtattctttttgtagctgtatgccctgcctaattggcgctagtatccagcatgcgaattgctaatttagttttataccgtggatattgctcatatcgtgtcccaacgcttttcttccctatgggaatgcatatgccact

SEQ ID NO: 34681 - DNA, 1351 bp, Zea Mays
aaaaaaagacacggcggctacaactttctccagagatttccatcgcacaactctccagcgactttctccatagatttccatcgcacacctctctagtctccatccgtcgggacgccgcatctcgctttctctcccagttgcttcgtctcgctttcatcctctccatgtcacttgggtttcgtcggcgtcaaggactccactttcgcccgacgacttcgccttctcttggcttactcaccggctgtgtctctttggttagatgcgtttttctcctttgtctttcgtcgtccctttcgactgggtcgatacctggttccagatccgtttgtcgatcatatcgagcctcctctacttgagatcctcttgctttttgggatcctgttgcttcagtgcgtggagattgagatctaaacgacaagtattttcttttggttaactggttcgcaagaagtgtagatggacatcgggttccggatttgtgcttcgatcatatccagctgccagcttggtcgtcgacacgtttatttccacagttgtgctcccattcttgcttcgtcgattgtttcgttttggtgcacagctgatttcgtttgtgtcaaatgcataaggctgtctcaggtcggagatttccggttgtgctcattgcaaccaagacgaagaagacgacgacgatccgtccacaacggctgtctcctctgcgggcgtattgacgccacaacccactatgggtatcttgagttggccttcaagcagatggcagagaccgcagacgccagcaacgcactcgaccacaggcttcactaccttcggttgaccggcaatgcatgtgcggcgagggcgctggtatggtgggtatgggagaactctaatgctcatgctgcgaacatccactgctcgaaccaccatggcgctcggctatagagcgtcatgacagcagctccccaagcgatgcaagccgcctgtttgacgaaatgtgtgagaagcaaaatagagacatcaatggtgttttcatgtgtctaatacattttaaaaaaaacatagctagatagcattttcgacaggaacaaaggattcgtaatgcgctcggctactgggcgtcatgacagcagctccccaagcgatgcaagccgcctgttcgacgaaatgtgtgagaagcaaaatagagacatcaacggtgttttcatgtgtctaatacaaatttattttttaaaacatagccagataacattttcgacaggaacaaaggattcgtaatgtaatttatataatgtaattattttgattaatctatgattcaatttccatagcataagaatgtttttttgtttgcatgtattataagaaaaaaaaa

SEQ ID NO: 34682 - DNA, 2912 bp, Zea Mays
cgggtcatgtgactgggtccgtaggaagtgcgggcgtgagggacgaggccgagcggtgtgaggaaatagaaccgggagactggagcggaggcgggaggaggaggagggagaggggatcgagaggaacgcgcgcgaacagaagagaggaaggaagaggaggtggcaggctcggttccgcgcgcgccgacgtgagattccgggccgcacgtgcccgcagtgtgatagatatcatcttgaggtcttcataagtcagcaacctagagcagaaaatgtcagctccggaattcaggacttcttaccagcaatcccctgagaatgtcggtcaactcaaggtctgccaatgtgggtcgggcgactccaattttcagatcacaaataaatccgacggtggcgaaaattcaccaacaacttgtccaaactgtcaggtccttaagagtggaaatttactgctttcatctaaagggattggctggacagtatggaaaaagcgttggtttattcttacaaggacatcattagtgttcttcaggagcgatcctaatgttccccctcccagaggaagtgaaccaattgttacacttggtggaattgacttgaataacactgcaagtatgatagtcaaagaagaaaggaaacttataacagtcgtgtttcctgatggccgtgacggacgcactttcacccttaaggcagaaactacagaagacctaaatgagtggagaagtgcattggagaatgctctggctcaggcacccagtgttgtgaatacagcgggacaacttccagtagtcagcactgacataacagaacctgttgaagctgctgttgaacaatagaataagtctgtaattggcagaccagcagaatttgcacttgtcgatgctgatggcactacagcattcctgcagaaggccttaaagttcatcgaagattatggaaagaatgagttctccccagaagaggatgcacatgttatcggtgactgtattaagtgcattcttcgagagatgccatcttctccaattccggcaccatgttgcactgccctggttagagcttaccgaactgacaagacaaaaagactcgatgctatgaatagagtgatatatgaagtattcccagaaccaaatcgtcaattgttgcagaggattctcaaaatgatgcagattgttggatcacacaaagctgtaaataggatgtcttcatctgctttggcagcttgcatggcaccgcttcttctccgtcctcttcttcttggtgaatgtgaaattgatagtgaattcagtatggctggggatggttcattccagttgcttcaagctgctgctgctgccaaccatgcccaagctattgttattattatgcttgaggaatatgatcagatatttgatgatattgaagacggttcgtactcttcagatgcttataccgagtctgacattgacaaggaatattctacagacaatgacatccctgaagattatgatggctcctctggttctggtgaagatgttgaagaagatttgaatgatgatactgaacactcttatggcatgaaggtcgaatgtgatagtaacattaggattgataatgcaaatgataaggcaagaaaaggcttgccaacagaggaggatggctgttccagtgataacgacaaggctcatattacgaagcttgaaaacaagaagactcatctccaatctaaacttacggaggaggagaaagaaaatacagtcctccaggcaaatttagaaaaacgaaaagaagcattacacaagcgccgtgtagcacttgaaaaagaagtggaaaatttacgagaccagctactgaaggagagaagtttgagggcttctctggagtctgggctaatgaatatgcgaagaggacaagtgtccttcccctcaacgatagacaccaagactaaggctgatcttgaggaagttgctgccgttgaagctgatattatgaacttgaagcaaaaggtttctgatcttcggggacaactcaacaaccaagttcagttgagttccacctcgttatgtgaatcatgcaacaacaagcgatccataaatgcagacaagcttgtcgaaggtgaacaaaacgctgccctttctccacagattgcctcagtcgaagcaccacctattgtagggtcttattctgtacctgacatgttctgggctacaaaccaaatggttcagaagatgttgtattcaaagggtgagattgcgaaggatggccaagacggatcacttacatcaagatggaactttgcacagagaccacactcaaatagtccagtcatgagcagggttcaaggttccgatgcctattcaagtactaaaaccgaggaatctggaggcgcaccttcctctgcattagcgaagctgactacccgactcaactttttgaaagaaagaagggccttgcttgccagtgagatgcaaaacttagatctgggccgctcccaggcccagaggcatacagctcctccgaaagctgagactccaactgagaagtagaatcgttttactgcatcgttgttaggccacaagctcaggcattcatgtcttcaccctgatgattcatatgtcaagttttttagcgacaccgacgaacaacctggtttgtactattttatctccaaataaacaatactcctactctgggacaaagccaaagtgcgtttgcaaattatttgtcggtctgtctggtactctggtttgtacatcaacttcacttacgatcaagctaagtaaaaataccgtaccatgtgtatctatgccttcagtgtaacctaatagcaattccagtaaaacttggcagtcccagtgccaaaaagagcgaccagtatacctgcttgaacatcgtgctccgttaagttggcagttccagtgccaaaaagagcgacc

SEQ ID NO: 34683 - DNA, 3057 bp, Zea Mays
gccatctctactcctcgatgtcctacagctgaaaaaacaccttttggtgcaaaggttgttgttttaggaggtgatgctagacaaatactcccagttattgaaggtggtacacggtcgcagattatagatgctgcaataactagctctcctctatggaattctattattgtcttatacttgactgaaaatatgagattaaactcatcccatttggatcctacaagtaagaatgagattgcttcctttagcaaatggttgttggacataggtgacggcaaagtacccgcaagagcaagagacagtgaaaccgaaagatattggataaaaattccgcatgacattttactaacatctcaaaataatagtcttcaatgcattgttgactccgcgtatccagatataagagataggtatgcagagatacaatacttaaaagaacatgcaatactttctccaacaaatgaaattattgacacggtcaacgactttgttgtcactctaatacatggtgatccaaaggaatatcttagctgtgatagcatagtaaaaggaccagacaacaatgattcatatgacttattatatcctgttgaattcctcaattaagttactggcaacaatttcccgcaacatcaattaatactgaaaaaaggagtaccaattatgcttttgcgtaacattaaccaatctgaaggtctttgcaatcgaacgaggttaattattgttactctaggagatctgattattgaagccaagatcatgaccggaaaatataaagacaaaattgtgctgattccacgtgtatgtttaactttaaaaacaccaaggctaccattcactctagaaagaagacaatatcccattaaagtttgttacgccatgacaaataacaggagccaaggacaaactctgtccaatgttactgtgttcttgaaaaaacctattttcacacatggacaactatatgttgctttctctagagttacttcaaaaaaggactcagagtgctgattgaagatgatgatggaaaatcaatagatgaaacgaagaatattgtttaccaggaaatctttactcgatttccttcacattaaggaagttctataattgccgcccatgtatagaataatgtctatataagtgagttttatattccattttatatccaagacaagcctattatgtataatatatgcatctactgaagatggtttctatggcttacaacattcctacttcctttattacaggtacatttcattactctctcccccccttttccctccaattacatacaattttacactcttttaactcacttgaaaaaaatagtaaacctatctacatatacaaaattccatttgttttcatcgttttgtataatactatatattaactcatacatatatctcataaataaatttattataggatacttataaacaaaatgctaactacattttttatctgttccatgttacacagaatgcctaataaaccactttcagcattgactctacaagatcgagacatagaaattcaaatagaggtccacaggaaatgggaatttcgaggtgctattgacaatggacccatattacacatagacatgatcctgacggattgcataggcaatgctatccattgtcaaataccatcattcccagcagctaaaagaggtgatgaatttcaagtgggaaaaatatacaagatgtcccgctttccagtagctcgtgcaaaatcttcctacaaacctgttgatggtgatctcatgtttctaacaagttacgacaagattgatccaaatgaaccaaatgcaaggaacttccatggggaagtacttttaagtggtggtgcagcctaccattggtacttcaacccatcaattgaagaagctactgctttttacaacaagattgaatctgagaagataaacatagaattacccagccttgacggacaagaaattacacctccacaacttccacaacgagaacatcatgaccttaaatacatattacctctaaacccacatgatgtaccggatgaaggatatgaatgcacagtaaccattacaagtattcctgaaggcaagacttggtattatattgcttgcaatacttgcccaaacaaaccaagcattgatcctatcatccgtcaatgctccacatgtggatcaacaaaatactgcttcaggtacaagctcactttcaaggcatcagatggaactgcagaagctgaaatgtttgctttcgacactgttgcaaggacaattattgggaaaccatgtccaatggttgttgcatcattttccagatgcatcagctatcccacctgaaattacagcaatcgtttcacggaaatacacattcattgtagtgttcaacaaccaatcatacagatttctagaaaaagcattgctcataaaaggaattgtagcatcatatggaagaatgacatcactaccaagagttcaagaaaaacttgatgtgcaccttcctcccaatccagccaaaaacaaactgataacaacagctgctcaatctccctctacagtcatgtctagactttccacggcggactcaccaagtgtgagtcgaaagctaacctattctccagcaaaggataaacctgagacaaaccctcttgatgctgataaaaatagagctcctgcaacaacacttgaatcacctacaaaaaggatcaaacaagaccctaagaatcaacaagagtagacgttgtgtgcaacacagtaaggaatacttctgaacatcacgcccaaacttcaacaaacgaagcatattcctcactattttgtctataaatattatgtgtgccttcttctatgaagcaaaccttaccctcgatatgctatatataatatctatgtattgtcatgtaatataaccatctataaactcatcagttgctacaatatattctaagcaaaccttaccctcgatatgctatatataatatctatgtattgccatgtaatataaccatctataaactcatcagttgctacaacatattctcatgttatgcatataaaat

SEQ ID NO: 34684 - DNA, 1696 bp, Zea Mays
ccgcgctaaccgccacggtaccacccgccgctaacctctatcgcgttcaccatcagggcaccaccgcctccattacccccgccccctgctgccacgtccaccaccacggcaccaccgccgcccccagcgcgcgcggcccaccactaacagccagcttgggtggccgctccttccctcccttgcctcaaaggacttcttcccacgcgatgttaggagcagacatgaggcggcgagagtccagcatcggagatctccgccgccatgtaggcactgcccagcaccttgcggcccgaaaaccgtcgatctaatgccctgccctccttctccgatgccttcgccctcgcctcaggcagggtccctctcccgccttgcctggctctacgtggtcggtcggttgtggcgggatgtgcagacaggacgatcgtgtccggcctcctcgagaagagctccagcaacatctagaaggtgctcttgatggaggacaagcttaggaaccttggatgcaaggtgattggaaagaaaactattgaggtggagatggacctgaccaaggccaagagcgagaggtacctatgggggaacaacactgcagctatgaactccgacaagaagcagcagtttacactgggtttggctccagtctcaaaagaaacgtctgtttcagtaagctgatggtcggtcacccaaaggacccattatctatttttattaatgttaatatattaaaaactggttagagtaaacatacatattatgctatcatgtacatatatgcctctatgagacataaatatatgtgtcatgtttcaactttcatgaatttttttcctcaacgagtaacatactagtgataataacaaaattatttaaaataataaccattatatataacttataaattatcatgatagatttggttatatattttaacttaaatatttgacatatggtataactataagttcataagtgcatatataaattctttgacatgaaaaacaagaaatattgatacatggggggcaattggtgtcgattgcagatggctacatctttctagaattcatatttctttgtagcaaatagtcattataataacaagtattaatatcctctccaggttagcaatactaaccattatagatctctgtttatttatattgtcccttcatacatattaatgtacatacacatcctttctttctcgttattccaatccctcctggacatagatacaacaaatatgatttgttccgtagaatcacaaactcttttgtacaggttgcaacttttaccagatcaggtatgatttcccacaaaaaatgaaccctgcttttttatagtccttgtcaatgcactcaacttaatagtttttcccatagcgccccttaattgggcagagaaaaagtagaatccatcactatgttttattaaacactatgtacgtatccatgtatgttgttgtgtaaacatttgcatatgtatataaccatacacacagacataatgtgttagtacacataatgcatgcacatggatcttattagttgtctcctagcctgcagcatcgcataatatgacttcaaattattttcattgcatttcaattaatagtatacttcattatcatttttccctttttcacatttttaataatctgtatattgggttgttcattttctagaaccaggctgag

SEQ ID NO: 34685 - DNA, 2414 bp, Zea Mays
atgtgcatgtcctcactaatcgctcccacgcggccacgccgcttgtcatttgagaacagcaagcgtctcgaggaagcgtcgacggactacatggacgcggagagagacatcaagcccttcgtcttccctaccgtgcccaccaccattcagcggaacttccacggccccggcgctcgtcagccaacggcacggccattggagcgctgtggcactcgagtgctaccgcaaactcatcgaccttgctctgcgccacggcttagtaggaagttctggggcgccggcgattatgacgcggtggcggggaggtctgcgccacagcctccgagtctacagaatcgcatgtgcgtccacccggaatttctccactccaacgcgacctcgcataaatggccgtttggagtatgtcttactttctttcccattgctatagccgtggcagagttgttggacaatgcggtggatgagatagaaactggtggtgctacaacgatattgctggacaaactcatcgacaaacggaatggatcaccagcattactaattcaagatgatggtggaggcatggatcctgattctttgaggcggtgcatgagctttggattttcagagaaacaatcagggtcttcgattggacaatacggaaatggattcaagactagcacaatgcggctcggggcagatgctattgttttcagtcgctgctgcaccaggagcagtgggcctacacaatccattggtctcctctcttacactttcttggtggaaacaggacatacaaatgttgtagttccaatgcggttggagcgtcatggttcgaaacagttcttctcaaatttgtcggcgttgttgaaatggtccccttttgcaacagaagaagagctgatgcagaatttctgtgacattggtccacatggcaccaagattatagtgttcaatctgtggtccaacgacgatggtaatttggagctcgacttcgacacgaatccggaggatattatgatcagtggagcgccaaacccagaacaaatcagcaactctgttaggagggctaacgagaaccatctggcaaatcgactacgctattctcttagggtctatgcttctgtactgtatctacagctaccagattactttaggatcatgcttcgagggcgagaagttgagcgtcatcacattgcctctgacttgatatatcctgaacgcatcagttatagaccacaaagttgcggaataataagagaggctgaggttcttacaacaattgggttcttaaagggtgccccaaccattagcgtgcacggattcaacatctatcacaaaaaccgccttatcttgccattccatagagtgctgagtaccgcgagcagcaaaggcagaagcgtctctggagtgttggaggtagacttcatcaagcccacccatgacaaacaggactttgagaagtcgcagctgtttcagcggctgatgaaccgcctcaaggagatgactaacgagtactgggatctttacagtaacaagatcggatacgtgaaagtgccacgcgtgagagcagctcccactcctgctcctccagtgatgctggcaatagagaatggccccgccgaaccatcagaaaggagcgcgcctgctccgacgcaacccttgagatggcagcacggcaactccagctgcgtgaacgcagttccaatcgccatggcgccccctgcttttcacccagctcctgtcaaaacagagactgatgcaccaggagcgcctacgggctacgcctactcctactccccgtcctggccaagcgtgcaagccatgcaaatcgagaagataaaggaggaaccttccatggcggcgcctggcaccgattgggtagagacaagaaaaaggacgaacgacgatggcgccacgacggttgcgttattcaaaaggaggaaggctccgcaggagttggctggcagtggcagcagatccgctactgatcaggtatcccggtacgtgggagagggagagctgaatgaattctgcttcctgaagatggagaaccggatgctccgtggagagtgctcagaatttgagatggcagagaaggaactacgagtcaaggaacagaatctacggctcgagattgagatggcgcaggagcagttcaagagactactgggcgaatacgtctcgttctcatctatgccgacgcgtaaaccataggcaccgcttccgaagccaactcattagcgcaaaaggcgtgtgtacctgtacctagctctcagaaactcggcttcggttcattttctgtgtgacgaaaaggtctatatgggaaattgagctgaaaatggggggaaaatattcgccgtgttaattttctatagagatcggttacgatagacgggtagagagagtagcccacggagcacgatgcgctcgtg

SEQ ID NO: 34686 - DNA, 2907 bp, Zea Mays
ggaccatagactccagttagccaccaattacgaccttcctgttcagcgaaaagaacaaaaactgagaaattatcaacccttgaaccgacggcctgacaagaacccccttccaagcaaccagaactccacctctagtaccaacagcaggtaactgctgttggaattaacactgaatgggggttgctaatggcaagcatatctgaagattcgggtgaagagacaccacttcaggttcgtttgaatggtgtcgctacttttattggaatggttggactttctgttgcccttgcagttcttgttgtacttttggccaggtacttcactgggcatacttataatcctgatggatctgtgcaatatgtgaaagggaatatgggtgtaggccagacgattcgtggaatagttaaaatattcacagtggctgtcaccattgtggtcgtggctgttccagaaggacttccattagctgtcacacttacgcttgctttctcaatgcgcaaaatgatgaaagacaaggctctggtgaggaggctttctgcatgcgaaacgatgggttctgccacaacaatctgcagtgacaagactggcaccttgacgttaaatcagatgactgttgttgaggcatattttggtggaaagaagatggactcacctgataatgctcagatgttatctgctgatgtcacatcgctgattgttgaaggaattgcacagaacacttctggaagcatatttgagcccgagggtggtcaagaaccagaggtgactggatcacctacagaaaaggctatcctgtcttggggactaaagctgggtatgaaattcagtgaaacaagatcgaagtcatctattcttcatgtatttcctttcaactcagagaaaaagcgaggcggggttgcggtgtacctggctggctctgaggtccatatacactggaaaggagcagctgaaattattttggattcatgcacaagctgggttgacactggtggttcgaagcattcaatgactcctgaaaaagttgccgaattcaagaaattcattgaagatatggctgctgctagcctccgctgtgttgcgtttgcctatagaactcatgagatggatgatgttccagacgaagatcggagagaagagtggcaacttcctgaagataacctgattatgcttggaattgtgggaataaaggatccctgccgtccaggagttcgagattctgttcgtttatgtcaggcagctggcattaaggtgcgcatggttactggtgataatcttcaaactgcaagagccattgccctggagtgcgggatacttgatgatcccaatgtgtcagagcctgtcatcattgaagggaaaacattccgggcgctgtcagacttggaaagggaggatgctgctgaaaaaatctcagtgatggggaggtcttcaccaaatgataaacttttacttgttaaggcactgagggcaagaggtcacgttgttgctgttactggagatggcacaaatgatgccccagcactgcatgaggcagatattggtctatcaatggggattcagggaactgaagttgctaaggagagttctgatattattatcttggatgacaattttgcctcggtcgtgagggttgtcaggtggggccgatcggtgtatgcaaacatacaaaagtttatacagttccaactaacagtcaacgtcgcagctctgataatcaatgtagttgctgccgtcagttccggaaacgtgccattgaatgctgttcagttgttgtgggttaacctaattatggacactttgggtgcccttgcattggcgacagaaccacctacaaaccatcttatggagagacccccagtagggagaagggagccattggtaacaaatatcatgtggagaaacttgattatcatggctacgtttcaagtttcagtcctccttagtctcaacttcaaggggataagcctcctgcagttgaaaaatgatgatccagcacatgcagataaagtgaaaaataccttcatattcaacacatttgttctctgccaggtgttcaacgaattcaattcacgtaaaccagatgagctgaatatattcaagggcatttcagggaaccatctttttattggcatcatagtaataacagttatactccaggcgcttatcgttgagttcctcggcaagtttgcctcaacagttaggctaagttggcagctgtggttggtatcgataggtcttgctttcttcagctggccactggcattcgtgggaaagcttattcctattcctaaacgtccattaggagaattctttgcgtgctgctgtaactgtaaggggagcaaacaaggccctgatgacgcaacctctaatggtaaggaagacaacaagcttgagccatgagatatcgcaaggtttggtggctggcaacgatggccttctgctgtttcttgccagggtttgacgtgttggatttgtaattgcccctgattgcgattgtatatatatatacacacacgggttgctcctaggatctgttatacgggcaacatcaatttcataatcatagagattttcctcttagtcttcatttaccgagttcattgcgaatatgattaaacttgtcttgtctgaatctgaatctataacgagagttgggctatggtacccttctggagctgaccatgagtaggatgtcctgagatcttggacatcctgtgatgaaagtctgggaagattttagggccggttttaggttggcttcaaagcttgagctgacctcaattgtctattaaggagagtagcatttacgagtctagtgatgaatttatttggtctataaactggttagaagacaatctgtaatttgtagtctcctgacatccaatagaattcaggagtggtgtaccgact

SEQ ID NO: 34687 - DNA, 1971 bp, Zea Mays
gcaaaagtatctaagttgatttttgctaaagcctctccttgattcccaattccagcatacccttgagagtcttttccttagtcgggtaagacttgctgagtaattccatactcagggttttattccctgttgtttttcaggttttaattttgtgctgctgttgatggtgttaagtgccggtgggctcggccttcttataagtctaagtacttcttctatacttcttattgaggatagtcacttgagctagcatatatttcaaacttatacttttgtaatcactccgataaaaaaatgtaaaatttttataacctataaaatttggtaataagatttccgctgcagaaatgttgtgtgtgtgatttgtgttacttaatcccgcggttctggttgtatgtggtttatccgatgtccttggggcaatcggatggatcctgttaagttatttagtgcacatgtatagctgtttgaggtctttgagacaaggacatgtgcatgtgggcccaataacttgggaggttctgccacacagctgcagctgcagagaaggtcatggccgcagcgcctgacaaagggaaaaagattgttgatgctgctacagaagaaaatgactttgaccttcggaacctggtgggtcaagaattgtccgaggctgagaagaaggagctacaggaatatggtcctgtggctaccagccagaagctatgctctttggtggaatcgacgcaggggccttaggatgcattcgagaccgcgcgagggcaaaataatcggcactctatcgaagaatgttggtttcccgaagcttgaagctaatattagcggctaccggcgacaacatatcatcggcagtctattttactccaatttcaaggtaaaattccttttgctaggtttcttttatttttgtgatgaaacaaaattttctgatgctggcttgtttctatggagtatgctgctaagtaagacactgagaatgcaacaagacctcgaagacaagaaaaatgaaaccataatcgagggcttggaaaataaaatcaaggattacgaagcttctctggagaagaaagactttctacttcaagcaacatagggctcgcttgcagaaatccaagctgaaaatgttagattaagcgaggagcttctccaaagtcggacaacgttgaaagaaaaatcaaagaacttcgaccaagagaagaaagatctgcaagcgaaatacgaggccgaagctgacaagaatacgaagctacagaaatctttggaagaccttcgagatacgtgcttgaatttaggtagcagctgcgtgcaacggttgaaaaaggtcttcagctcggttggggctagctctgaagatattacaccttcggctgaagacataccaaacaccttcgcacatattgaaaataaagttgatgcacttgatgaagtgatagccggtcatggtgacttttgtgccttgctagcttctcgcggcacagctgccgcattttttaaggctggttgcacacacgcaaaaacggtaaatagatcaaccttcagtctatctccaacagatttgattgatattcccagtgaagcccgaagcatcggaaacagatttataactcaaatttgggctaagggtggacgagagttggctcgggacgaagcccgaacttgcttaaaccggatggtggtgccgaaggttgataatctgaagcacattctgaaggctgctgaagcttctctttagtcctgcctgtatagagcttagaaacatttgtattatctttgcaaaaagctgtaatcgagaaccaaacaatacggtgtatatttgtccataccttgtaatatatttttaccttttcatctatgtacaagttgctttgatgtggacgaaacttgtatcttttgagccgaaggcgaaaaacaccttcccttcttttcgtacacaacgaagcatgtccttgtatagaatgtatatgtttgaaa

SEQ ID NO: 34688 - DNA, 4676 bp, Zea Mays
cgatcgcctacgccccacgcaacgccacgagcccacgacgcaccccgcaagcgaagcaaagcaagccccaggcggcgccgccggcggaggacgcgatggggaataagatcgcgcggacgacgcaggcgtcggcgacggagtactacctccacgacctgccgtccacctacaatctcgtgctcctcgacgtcgtcagccgcggccgcttcctcaagtccgtccgctgcaagcacgacgaggggttgctcctcgtcaaggtctactttaagcgcgccggcgagtccatagacctcaaggagcacgagcggaggctggagcggattaggaacgcgttcaaggggatcgaggggtcccacgtatggcccttccaggtttggctgcaaacagataaggcagcatatctcttgagacaatacttcttcagcaacttgcaagatcggttgagtacacgccctttcctcagtcaggttgcaaagaaatggcttgcctttcagttaattcatgcagtggaacagagccatagtaagggaatttgccatggtgacataaaatgtgaaaatgtgctcgttacttcttggaattggctatatcttgcggactttgcatcattcaagccaacgtatatcccggatgatgacccgtctgatttctcattctactttgacactggaggaagacgacgatgctatctagcacctgaaagattctatgaaagtggtggtgaatcccaagttgcagcagacgcacctctgcaaccatctatggatatattttctcttgggtgtgttcttgctgaacttttccttgaaggccagccactttttgagctttctcaacttctggcttaccggcgtggtcaatatgaccccatacataccctagaaaagatacaagatactggtatccgtgacatgatacttcacatgatccagttggaccccaaaaaaagggtaccatgtcgaagctatctgcagaaatatgaatctgttgtgttcccattttatttttcaaaatttctgcacaagttcttctcggatatcgttccacttgattccgatgctagggttgagaagactcaagaaaattttggaaagatacaggaaataatgatgggtagttcaacaattgaacaaattgagaggtctacatcgtgtgagcatagtgaaccatctgggagaaaaggcatggaaggggaaattttaaactcgccaggaaattatagaaatagcacatctgtatttaagaaaaatactcctgtagaccatcaacatattattggagatatcaatttcctcctcaaagaagtggagggcaggagtaacaacacaagcacaaaggaagacaaattggaactggtttgatgggccacaaacatgttgtatctcatgtgaagatctcaaagagtaacatacgctccttggtggctacttatgatgatcaatcagatacctatagttttgatatttttcagcagacagactccaaggtgagctgtgaaggcatggtcttgcttgcctcattactttgctcatgcatacgcagtgtgaaaaaacctgagctaagaagggccagcctcattcttctgaagttctcgtccacatacatagatgatgatagtcgcctacagctagtggttccctatgtgattgcgatgctttcagatccgtctgccattgtccgctgtgctgctttggaaaccctatgtgatgttctttgtcttgtgcaagatttccctatcagtgatgctgttatattccctgagtatatcctcccaatgctctctttgctccctgatgatacggaagagagtgttagggtttgctatgctagcaatattcataagctggctttaacagcttataggttcctacttcgttctcgtagcattgcagatattcgacctctggatgaatcagtggtagctcacagatcccaatctgcagattcaccagcgaagaggcaagataatttttttcgccagcttgcagaactgaggaaatctatttatgagatagtgcaagatttggtgatgggacaaaagcagacacctaatacccgtagagctcttctgcaggatataggttatttgtgttacttctttgggcacaaacaaagtaacgattttcttcttcctatacttccagcatttctaaatgatcatgatgagcagctccgtgcagttttctttggccagattgtctatgtttgctattttattggagcaagaagtgttgaggaatatcttctgccatatcttgaacaggcactaagtgatgacatggaggctgtccttgtaaatgcacttgattgcttgaccatgatgtgcagaagtggttatttgaggaaaagagtaattgttggtctattggtaaagattctccccctgctccggtatccaatcaattgggttaaacagtctgctgtaagatttgttgctgcctgcagcgagagcttaggatctgtagatacttatgtgtatctttctcctcatctaaggcagttcctacacatggagccaccttcattggcctctgaaactgctcttctttcatgtcttaagcctccactaccaaaatcaatcttctatgaaggtttagagcatgctcaggacattggagacattttactgaagagcagtggcaagaaagaacagatagtacatggtggaagatatcctggtacagcacaaagtggatccttggccaaccttgaagatatcctgcgaccgaaaggccctaatatttccagcagcatgtccttgtatgtcaaaaactctgtttcttttgaaaaatcactatattctggttttgctctgcatgcatctgctgcaaatagctccttttatgatggcttatctaaaggaataccatcatattctttttgtactgataataagcggggtttaggagaaacacacatggtccctgattcatcagtgtataaagcttcaataaggctaccttggttggaaccaaaccgtcctgccatgcagaccagagatgatcattttagtagcacgcgacaagatttcagcatcaatgactctatgaagagcaattcctctttgcaaggggatatcattccgaactctgatactggagggttgcctttctccagatcagcagtgaacttggagactggatggaagcctcgtggaattctagtggcacatctccaggagcatcgctcttctgtcaatgacattgccgtatcaaatgataataccttttttgtgactgcttctgatgactcaagtatcaaaatatgggatacaagaaaattggaaaaggacattgctttcagatctaggttaacatacagcatgggtaatagccgagctctatgtacgacaatggttcatggtacttcacaggttattgtcggtgccagcgatggaacattacacttgttttctgtggattgtgcacgcagcgttgggactgttgtggaaaggtatgctggaattgttgatgtaaaaaggaacgagattaaagaagacgcaattctcagcgttgtaaattgttcaaccgacagctttagcccgactgttcttttcagcactgaacattgtggcatccataaatgggatacaagaaccaactcagaatcttggtcttttaaatcctctccggaggagggctatatatcggcacttgttgtgggcccgtgtgggaattggttcatctcaggttcttcgagaggcgtccttacactgtgggataataggtttttagtacctgttaaatcgtggaattattcaacattaagcccaatagagaaactatgcttgcttatacctccaccaagttcgatatcctctgctggaaggcctttagtttttgttgccgctggatgcaacgaagtttctctgtggaatgctgagaatggaaactgccatcagatgtttagaacagcaagcactgacaatgaagctgtgatgtcaaaggcgccatcgaggcctgttaacaagccagtcatcaaagatataaggcgagcaggcaattataagtacagaatcgatgaattgaatgacccacctgtacgccatccagggatacgttctttgctgcccttgccaggtggtgatctattaactggaggaacagatttgaagattcgttactgggatcaagcaaggcctgagcaaagcttctgtattgctggtccctcggcgaaagaagtccgttcggcaaaaggagatatcttggagaaagcagttggaaacgatgagtcttacgatataagatccagttttggaatacaggtcgtgcaggaaatgtacaaacagagtagctcggtctccggtttgacgcccaagactcagctcgcggtggcagctgcagattctgcagggtgccatcgtgacgcaatactcgcgttggcatccttcaacttgtctagccagagattggtatcaggcagcagagacggcgctgtcaaagtgtggaaatagcttctccagcatggggagtatcgtggaatagcaaaaaataaaataaaataatcatgacgaataggaggcaggaggctgtccgactacaactgtatagggctccaatgtctaatcatactcctctacacaagaagtgtttgtagatggctgttattttggataatgaagggcctctaggtagtgttggggccgcaattaaaagaggcctggatgctgaattggc

SEQ ID NO: 34689 - DNA, 7157 bp, Zea Mays
gcctcccaaaccttcatcctttttatgccaaccaaaactccaccctcctctcgagcccgagcccatctgatcctccgattcagttcttctccccctaccaaaaggccgagcccccctcaggcctcagctccgcctccgcgctgccaaccatactcgtcaagccgtcacactttgtctctctcgtgccccgatactctttttctttttttttcttttcttttttttttttttttgcttccgggagcagcaaccgtcgccgtggccccgccttggatattccatcagttttcgggttcttggataggagaaagcggggcgctcaattccccccctcctgatccttgttccttgatcgccgccatgagcaacacgctgcttcgagtctacccttccgacctgaagatgccattcgagctcaggaagcagaactcagcgtgtcttgagctcgtcaacaagaccgaccggtgggtggctttcaaggtcaagacgacgaaccctaggaagtactcggtgcgctctgcctccggtgtcgtgccgcccaggggatcctgtggcatcacaataacgatgcaagcgcccaaggagatgcccccggactaccactgcaaggacaagtttcttgttcagagcattgctgtggaggaggggacgacgcagaaggacattgtccctgacatgttcagtaaagcaccaggtaagttagttgaggagttcaagctgagggtggtctatgtccctgccaatcctccctcaccagtgcctgaggaaacagaggaagaggatggatctcttgattcagatgtggaccatgaagtatccacgtccaactctgcaacaggacaagggaatacatgtagatcacaaacatcagatgatgaggtgtccctagttccacctaaatatcatttgtctttgtgttccctcagattcataaatatggatcttgtgctgatcacctgctgcatagcatattatcttaaaaggacggatttaacttcggtgttcatggaaatactgtgctctaaaaattcgcagtagtagcctaatttctttcctgctctgacgtcatcctcctctgggcgacacgggcggctccccatcgaccgcacccaccgccgccggtcttcacccccgccgtcgccggagcagctcgccggaagttcgacgagcagcgaggagggcggcggcgggactgctctctcactcatttccctcccttcttccacccactccactcctccctcttcctggaggtggccggcgacctgatccgccgctgggaaggccggatcggcgggctgactggccggatctaggggctggtcgccgtccgccgctcctccctgctggcatgggcaggtggccttgtggccgcaaccatggtggctcgtgcggctagcccgtggcggtagtgcccgcgctcgcgtggccatggccgtggctggccggcgacgttggcgcccacgcacgcggccggcccgctgcggcggcggcgtggctcgcttgtgcttgtagcgtggtgcttggatcgggggcgttggtggatctgcggctgccagcggtgccttctgcaggtggtgggtcatggtcgtggggctgggggccggatcttgagcctctccggctagatttatctctccgcctctcgtttcggcctgtggtgtgggcagggccggctggctccgtgcgttgcggcgtgtggtgggaggtcctgcgacgaaagccatgctcgcttgcaggcggacagcggtgacgcccgcgggcgccacccctaccctatcgagggtgccgtctttggacctctcgccccatgcgggaaccctcgccttggccttcttaggtctctcgctggtgctcgaccggcgttggggctctgagggttggggctggtgggttggtgcgtcggtggacggcagaaggtgacaacacgcgatggcttggcggggtgacatcggcgtggctgacctttcagctttcttcttggtgctggcgatctacactgctctgctaggtcttcagaggaaactttgcttggtttgtaccaggcgggcggcgacgacttttcgacgtcgtttctccttcttgaaggtgcggcccagaagacctgcagtttgtgtgttcgttcgtgttgtggaggctcttcgtcgctccgcttggctcaatggtgtccgtgttgtggaggctcttcgtcactccgcttggctcgatggtgtccgggcctttgtcgctttaggcgtctgctcgctcccggagttcgacgttgtggatctttgctcgtggtgaagaatcggagctgcctcgtgtgggtgtgttgaggcttggcaacgatggcgcgccgcggtcttattccttgcgtcggtgtctgaatgtaagcgtcgtcgagttgctttggcagtgtgcggctcgtcttgggaagtcggagctgctcgtctcttgtgtttgagtttggcaacgatgactctagatgtgtttgtgtgtggggactgtcattgtctaagttgtttgttaggtcgttcgccggtttttctactgtgcgttctgtgtaggttttaggcccgattttccaaaaaactgggtcaattccattcttcttaattgagaggcagagctcctaccatcacgttaaaaaaaatcgcggtagttctttcttcttttttgatgctattgattacactgaatagtttagttttcatgaaattttatcataatacctgcacccctcctcgctcaaccagaaaacacacacaaaaaagaggacagaaaaaacctatcattagaagaaacatgctcctggataactgtaatgtgaacacctttctctttacaagttattgtatcagaatgacatttgacaattgacagatttgattccttacattatttctaccatgattgtcggcaccattagcctaagacgttagaatttcaaatatttgtctatgtctgccctgaatgttatccttgacatgccactgattgttttgtgactcttcaggatgattctacatccaagttggaactggaaagaagatatgcagaggaaaacaagaagattcagaaagagctggatctcctccggaaaacaaaggcgtctcctcggggcttctctgcgtttgtgctgcttgtcttcttgttatcctcacttcttggatacctgatgttcggaagcagagcttagcaagttagcagctaatggctgcacatcatttgcggcaccggcagcggcacggctcttttagtacagtgtacagatatatacattaatagcgaagtagtcagtacataacagatatatagggctttcttgggtttcaagtgtccataggaatatatcttcagttttgaaatatgtgtgagtaaccgttcatgtttatactctatcatccaaatatatgatgtttactatataataaagctataaaagtgagacaaatcagtgttggagaaagacaaattatggccttgaaactcatggagaaagacaaattatcacgttatttaagttaacacgccaaatttcctctacctaataacattgctattactgtagctgtatgcagaaagtataaacacctaggtgctaggctgagcctcatcgcctagcatttaaaaaaacattgagtatttgctgactgaggtatactttgagagttgggcttagatatgttacagatgatgctaatatatgactttctttgaggggtcctcgtaaaccaatcgggcattgccccaactatccttgattttatttgtctgttctgctgtagccatgtatccattgttgtcgttgagtacctttgccacggtttagttagttatctcactgcgagttgtcctccatcttgaactgtcgttactcacatgtgatgttgtatcatatttttcttcatctatcgctttcgatccttgtaaattattggttccattaaaggctctttgcattggggcattcatttggtagtcatgtatttagttcaaatttatattaagttccagtacgttctggttgaataccccatcttaactctacatgtttaatgatttttatttccttttttgctggtctgattctatgtttgcccccattgctgcttcctaaacctgcaatattcatttcagcctttaattggcactcaaagttcaagatagcttgctgtagaccatcggctgcacagatgattgatgatgaggtcaactttggtaatatctttgatgcctcagaagaagttcaggttactgcaaagtttggtcccaagcaacggcccaaaacccgaaaaacagctctatcatccagatctgcagcgcctaatcctactgaagaaaccggagataggaaagtaggaaccttcagtcaagtcaattcttctaaagagcttaccagccaagaaaggacatccttgatgtgccctagtactgagtcagttgatattatcgctggttctcatagtattctcgatacaccattggaagatgcattgacagttccccagggttctctgtctggtgcttctgctgcagataggacttctcaatatggtgagcacaatgatgatccttctaagttagctacacaccaagaaaacttggtggtttcagatatcaacgtcccacctaacagttcatgtagcaaggctattgatgatatagttgaatttggggacatgtgtgatgtgcaaattgaagaggaaagagttacaaagttccaaccaaaggtgcaaacgaagctccttaaggaaatagccaaatctcggaagactaaccaaaaggtggaaacttccactgtagatgtggttacacaaaatggaaagggcaataatattcagacaaggctccatggcgatccggtacaggatcctaaaagtcatgaaagtgtgcagatcccagattctgaaggattattagcaactgataatagtaaaggttgcaatttagctaacctcaacaatctccttgaggagtcagtccaagaggaaacaatagctaagtttcgttctgatttgcaaccaaatctcgggaaggcttcatcccaggttgctgcgattaaaattaatgttgttgctgttgctccaatagttggagtttgtgacagcaacaatgacatgtacaaagaacctaaagatcaagaaaccatcactggtccagtggcttggtcaccacaggctgtgcatgctgatgttgatttagacaatcacaatgaaccaattaatcctcctattgatggtactcaatcaatgtttggcgaagtcccaggaagagaaaagggaaaatcaaaatctgtatcttttgctctatcggatgtttctgggatagctagccctatagataccaattctgagatgggtaacatcggcgattcctgtagtgacaaattgactgatgaaaatttaagtaactcatctcgtcatatcgctgaaaagcattctattaccaaggaccaatattcaaatgagcaggaccatgagcgggagccactagatcatgctgttcaacagcaaccaaaatcggatgttggagaaagagcatcatctatgaaacgacgttgcaggaaaaaggtgcaaaaagttgggacacctaatcacactgttgatgattattttggtgaagactgtgtcgaaccttcattagctgaagaagataacgatactggtgatcattacactactggtaataagcataaggctaggaaaaagtcaaggggtggtgtagaagagtcacagcagcagaaagctcaaaaaaataaaagcaaggtgtcttcacggggccgcaaacggaccttgaaggatgaatcgacagagaagcctgagaagaagctaacccacagaatacgtcagaggataccaaaagaggttaaggctttactggaaacacctcgtgagcagataaaacccatgaagctttgtgcatcacatctcaggttgttacaagaagctagagagcgtgttgatccaaaagggattccatccgggccatcctctaatacaagaaactttcaactagatgatatggatgatttgggctacagagatgaggaagctaggttctttgacaacgatataacagaggagcatgtacaaaatgcaacaaaattgaactaccattcctacatgaacaaaccagcccggggaaaatggtcaaaatcagataccgacttgttttatgagggtcttcgacaatttggtagcgattttgcaatgatacaacaattattccctgataagactcgccatcaggtgcggcagaaatttaaatctgaggagagaaaaaatccattgctagtccatgatgctatagttcatcgctcaggagatagtttgtatttcaaaaaggtaattaagcagctgaacattgaagatgttgtgctgccagatattaaaagtacacaaaacaagatggtgcatcaagtgaaagaggccctggaaatgagaatgtactggatgatttaaacgaggaggaaaatagttcaaattggttgaacgaagagcatgacgtacagatggccgatgtggaagaagagcatggcgaacagatggatgatgtggaagaagagcgtgatcttggaaatgatggtggtgatgatgatcttggggatgtttttgattggtactagtttatgttaaacacggatgcgagcgtgaatatgagttggtctagctctgcataacaggggtagtttttaggaaaaaaattctttgcatccggaatgcaaagaatcccttttatgactgatttggtgactaggtatcacagagagattggagtggattgagagcctctaatctctccgtgatcctcttacagcctctaacatccaccacctcgtggtccatataagggcttattcggttattcttgtcccatgtggatttgatgagattggaaaaaatatgaaggattttaacttgttcgagatttaaatctatcaaatctcatcaaatccatatggattgagaggaaagcaaacaagccctaaatagaagaaaaacaaattactattggattaagttataaattttgatctgtttttgtggaccttcaagtggtgtatgtgagtggctgtaaaagagtgtgtttgcatctgggatatacagattttttaccctagtttttagatgttgccacagttgtacggttagaattgttcggctggactatcgctt

SEQ ID NO: 34690 - DNA, 584 bp, Zea Mays
cctcacaaatctctgaacctatgatatcaggtcttgtagaaagtgattgtccaactgcatacatagaaaacacagatgtcatgaggcaatccgccaccttgccttgatgctgtcttgccaagcatgactacccaacctttaataaaagtaggcccaaggttaagaaatgtctccttgagaagttggccgaccatatattgagtatcatcaaacccgttgccgctgttaccactactataggtagcatctgtggttaactgagctctttttgaaatccgcatcttcaccacagctgagagaaatgtgaagagtatctgcagagcaaaggttgacagcaaatggaccaattagatagaatagctggaagagagtgtaggttagtactaaaagcaaaggaagagctcatagttaacctgaatgacgcgagaggcaaggatatgcggacgtgaggcgaagtactgggcaaggaggtcaggatcataatgctgggggagcggcgtagtcaggatggccgaatagtagttgatgtacagtttcagggcttcaaggtcagccatcatcaactccatacaggataatcctac

SEQ ID NO: 34691 - DNA, 712 bp, Zea Mays
cactccatcgcccccaggcctgcagcctgttcgacgaaattcctgttagggacgtggtcacctgctcagctgcaatttaccgacatgcgaggagcgggctgttccatgagtcagctgagctgtttgttggcatgatgagggcaggtgaaatgagcagaagcattggtcgtggcatactggcatggaccgatggacatatcaggagggttgcgaagtacccatataggctagtgtttttaatcttgcaaggtagggatcttagtcgaaggcgcctggcaatggcgtgaagggcagcgtggcaaagaagatgatggctatgtttgtcgccccaatttgctcgatgttgaagcatttcacgaggtgcattgtagctttgcagccacctcgtgtgaggccgccttttcgaatgtctcgtttgatgtgtgtgagtgagagagagagactcttcttgaattgattcatgtcaaatgtatccagtaggggcttttcgccccctcctgtttcataaaaaaaaatcatgtaaactgtaaatttgtggtggcaaccgtcactacgcactagtacaacgcagttaaactgtcttcgattcttcatgtcgaagtgaagcatagctacatccgatttttaggatgcagggataacctcctttctctttctggcggcacagcaaggggcggctgcctgcctttgttgcgtagtcgtgtcgtctagg

SEQ ID NO: 34692 - DNA, 1509 bp, Zea Mays
gaccacaagttctaatcgcggcggcggactcgccccgtccggccgcccctctcagggatgatttggtgattagggatccctaggggatccacgggggaggaattcccttgcaattcaattttgaatagcaagaggatttcttcccctcgggatccccggtcaccaaattagccctcacgctctcgctgtctcgcttcctggccgcgaagctccagttcagtctccgccactcgtgctctcgtagcgtagagcgaggccagggcgggaccagcgtggccggcgagaggggatggcgggctcggccgcgtactctgcttccgctaccaccgtggtggcgatggccaagggcaacggcaacagcaagggcgtcagaggcggcggctccgcgggcaccaacaaggtgacacgacctcctaggattacatctaatgttaagcagaacttgaggattctaaaattttggaaggaatttgaaaggaggcaaacaagtggacctcagcctgctactaggtaccgcaaaaagaaagtaataaaagaagtgcttcctgatgacacagacttctacgaggatccttcttccactcttcacttgacaaatgagggtttggaaattgcttcaccagttattctcgtggatggctacaatgtatgtggttactggggaaagcttaagaaggatttcatgaatgggagacaagaaattgctagacaaacactcattgatgagctggtatctttcagtgcagtaagagaggtaaaagttgtagtggtatttgatgctgccaattcagggctttccacacataaggaaacatataaaggggtcgatgttgtatattctgccgacttatctgctgattcttggattgagaaggaggtacatattggaatcgcacatcagaagcattggttgaagctttggtggcagatggctgcccaaaagtgtgggtagtaacatccgatgcactggagcaacaattagctcatggagaaggtgctcttatctggagctctaaaagattggtcaaagagctaaaggaatcggagaaggaactcgatctagaactgaaggaaaccaggtcgacatcgttgcaaggaaaactcctgcagcacaagctgaacccaaaggttgtgcgcgcactgaaaggtcttaggaacaagcttgaagaacaagagcggggaaagaagtgaacaggaaccactggttgacaggaaagagagcaggtgtacagaagtggcgtttgtgcggccgacggacatcaactaacactggaggctggatccactgaaagtttgatgcgaacatcatgtaaatggatctggcttccttttgggtgcagtcagtttggtgtaggcaccatcagagccctgtgaaaaatagaagcactcacgcatggtagcagcttgttattgttgttagctgctgacgctttgaggcatgtcaacaagtagagatggattgcaaatcctaatcaatgtatattactttgtgtgtgttgttattgcgat

SEQ ID NO: 34693 - DNA, 347 bp, Zea Mays
ctccatcccggcaccctgcgcttgtgctcgacaaaaagcccaaacgaatcgtcatgccatcgtctacatcaaatggaaattgcggtgccgacacgtcgacttcgccgttcgtttcctctccgggtctccaacttgtgttcacgccaaaaatccgagaagattaggcgcgaaaggaaacaaattagtacgcggccagagaattctcgatgtggatgaaagaagaagtgtgattcgatgcggcactcaccatgtgttcggtgaaatgctaaagctgaaaggcatcgtcgatttcgtggtttcaagtcggatttaattatggtaagctaattcgccacttccaatgtttg

SEQ ID NO: 34694 - DNA, 1951 bp, Zea Mays
ggcattccgaagagaagcggggggaggcgaaggcaacaggttcgccgttccgagtcgtccgtcgcctgcccgctgcccgttccgggcgcctccgccccgtttcgtcgaccacctctccggcgccgccgtcctgagccgtcgcacgcgccacgggggcgcctcccgcgcgcgctccctacgccggctccgccccgccccgccgccatgggctccagagtccttcacttagacgttcctgcaaattctgaggcctatcttatgagaaatgtaccagggagtgtaagtagccctcccatgaatggtgaaaagggtctctttcgaaatcagaatgcggggttcactgcacttgcaagtcctgtgaggagagaaatcggaaacagatcgtcgacaaggtccttctgtgttgatgacaatgacttggaagatggtaaggcctcaaaagaaagggagagttctgcacagtcactcaggctcccaaagattcagaatcaggctctcttatctggtctggcttactgcatatcatcatgcagcatgatcttagtcaacaaatttgttctatctagctatggtttcagtgctccagtatttttgatgctttaccagaacattgtatcagtgaccatagtttctacactatccctgtccggtgctgttccaactgaaccattgacatggaatttaatcaaagtttggttgcctgtaaatatcatctttgttggaatgctgatcacaagcatgtttagtttgaagtacattaatgttgccatgctgactatattgaagaatgtcgccaatgtcctgactgcttctggggaaacttattttttcaagaagcagcatgataatctctgcagttgcgggaggaataacggatctgtcattccatgctgttggatatatctggcagaccttaaactgtgttctgacggcggcatattcgcttacattgcgacatgtaatggacagtgctaagcaagtcaccaagtctgggaatttgaatgagctttcgatggtgttgctgaataatgttctttcactgccattgggaattatcctcgttcttggtttgaatgaaatggagtaccttttgcagacatcactcttaaggatgcccgagttttggctggtcatcactgccagtggagttttggggcttggaatcagctttacatcgatgtggtttctccatcagacgagtgcaacaacatatagccttgtgggctccttgaacaagatccctctttccatcgctgggatcgtcctcttcaacgttcgtacaagcgtgcagaactctttgagcattctgtttggtctattagcaggagtattcttcgccagggccaaattgcgagataactcaccgaccttgtgatcaccgtgcaggctttatagtttgtagatcatcaatcagctcagaaacactctctggatttgtgcagatgcaatggttgtttcccacctgactatgcagagagacaacacatgcacccggattgggctgggactctccagttctccttctcttccccacaagctgacttgacccacagtggttagtcttctggtggtatacgtcttcgttcttgctgtaaaatagtacccaaaaagaaaattgatggacgcaactgattctcaggcagtttgtgatggaaaggcgggttgattgtagtttgtaaagacacggttgctggatggaaggggatgtaatggtaataggttccgtgcatgggaaatattaatacgaagtatctagatcaggattcaggcgacggaaaaagtaaaaaaatgaattggtttgtttatttcaaacaagatgggcctgaagaagcagagaagtgcaagctaagattcaaatggcaacgggcaatgccggtaggtacacagctatttgtataaaaaagacaatgaaatcgaagttttaaacgggtaaagtataaaaaattcaaag

SEQ ID NO: 34695 - DNA, 2237 bp, Zea Mays
gaatgaccttttgtgttcgtcgtctccccaaaaggacctcccaagacctggcatctccagcgaatgcgacgccgggaaccaccgaccgtgcgtcctctctcctcgtgcgcttcgcccgtctccacagttggtgcagcttgcgacgcaacttggattctctcctctcctctcctctcgttgcaacaaggcagtccagtgaatgagacggatggccccagctgtgcctgtagctgatgcatgatggagctgagcctgtgggtgggaatctcttctctgctggtggccactcgcctagctccaaaaacacacacacacacactctctctctctctctctctctctctctctctctctctatctagtgggaagtttcacatcactagctccatcgcaattggtatgggtggtgcttctgcacaaaagaaaaaagatgtgcctgtctcactccccaaccaacttgtgaattgtcatgcatcgatcctagctagagcatctccgagagcaaaaacccttgttacagttttccaactcacattctactatatattaggatgtgttgggcacacatggaagtaaggcaaaatgatgcatcgacatgtgatacgtgagcacgtatttcagaacccgataggttggttggagtgggcttcttaaaattattactccgaagcgtgcaattgagattgtagtattataatacccacgtatttgtaaatttgttatcgtcgttgctttaaacacccatctatagctcactcactgctgctgttactggcatttctcccctcatcccgttcctgaaaacggatctgaggccgtcgtcttccactgggtcgcgctcctgttcgctccgtcgtcagaaatgcaggcagcgccagcaggtcttgcttcacgctcctcgcggatggtggcccctccggcccgcgccgatgcagttgaagctccttccgaagtgagtgaaaagtgttccttgctccttccaaagtttagagatcacagcagcgaggtataatcggagatttgcactatgctattgttgaagtgacgcatttttaaggtttagggcagtttacggcaatgcagttcaagctcctcctttttattgttcaagtgacataactataatttaagtatttgtttgcgccagtttacataactatacattaagtattgtttatggcagaactataatatttgtgcagtgactatattttaagtatacttcacataaatatagtttaagtatttgttttgcgacaatttacataactatacattttaagtattgttcagtgactatttgagtttacataactatactttatagaatctatcacaaaacacaggcaaaagacattgttgggagtagtaggggcacaaaaaccgtgggcgcctcgctcaacacgagcaacattgtttacggcactagcagaaatgcagaatacgtccgcgccatctattatccagcacacatgatccgatatgttttagcgttaggagcattatatatttggattgcaatactgatgtgtgagagaatctcattcttctatttgtattgtaggcacaaagattaaatagagtttggaatggtcttttagacgccattagacacatgcaagtctcagccgatgagttgaggaggttgaccagacgcaaccatgtgcctgagtatgtagagtacctacgcaaaaatagattatgaagcccatgtgagtgctgttactgaaattgcacaaggtctagaccacgtgagcacagatttggcggaagttcttattggtccgcaacctcttcttgaagattatgaagcccttggtttgtacgatgatttccaatgcgatggtgaagatagctctgtggactcggatgagatcaatgatcgtcgtctatcgcatatgaacgagcgtatatgagatatttgtttgcgagagagttcagtttgccattgatgtctgtagcttatgaagcccttagttagttgccactgttgttcctggtacttgtatgaattgggttatgaaaatgaagagttgtgttatgagttgtattttgtgatcatataatggcttcatgtgataattctgcacctgttgtcactgttgttatgagttgtatcttatgaagcccttagttagttgccactgttgttcctggtacctgttgatcatacaattgttagttgtcactgttgttcctggtgctcatgatttcaagatcattttgataattctaca

SEQ ID NO: 34696 - DNA, 2278 bp, Zea Mays
gttcctctctcccacctctctgcacgatgcgtgcccggacccgaaaattctctccaaaccagctctgagcctctgacagcggtacactcgtgttcctctcccccacgccctccctcccatcgcgccatgcctcctcccccagacctctcccctccccacgatccttctttggccaggcggtctgtcggtgcttgcgcccgggcccctcgcgcgctcgcccggcgtcccacggacagcaggggcggcggcggcaagccggtgcgtcagcttctatcgcacgtcgcccgcacgatgcgacccgcgcccgcggcccgccccctttccctcgccgccacacgatggtcgacaccgggcggagcttcgtggtcaatcaccggggcccgtccgagaagtcccctccgtcaccgccaccgacgcaggcggaggccacgacttccctaacgaaggcaggcgcgccggtggagcccgcgtcgcccccaccgccgtcctagagccgatcggccaagcccaccaaggttgcgcgggcggaggaccccggtgcgccgcgcggcaaggcggtgggcccagccgcggtcgacgtcctcgacagttccgtccgtggcaaacctgcagggcatggccaggccgtcgggcatcaacatggcctctttctccgccgtgtccaattccggaggcgcgtggagggtttttttatatatctttatggttttcttggttacagggaggaggaagaagaataggccggtgagggtgttcccgacggacaaggggacgctctggaagacacgatccgccgatggccacgctgagtcctggggtagattgatttcgcagtctagattggtgaggagatttgtatggtcaggtatcgaatacaattcttccaagagatatacgtgtactgggttggtgtcatgttccagcatattttaatgcaaggttagctatgttccatgttttatatttttcttcttgcaaggataaatgcactattttgcaaacaggcaaatatatgatatatctattgacaagtgttaattctaaggagataaagtgctccatcgttttgtgatcagattattatgtccagttatatgatgatgatactttgtggttgctgattggcacttgatttttttctctcactgctattttgcaaattcacctgtttgagccgggaatatacttattttggaaaggggacttggatctattggtacttacactacctttgatttttatacttgcccagtgagttaagatttgtccatgtctattgagctaccaactttcatttgcaagtactttacatcaatatggaaagtagaaaccttatagcttgtgaaatcaaatgtgtaacacttggatttctattgtggtcaactgatcttgctgcatcaattttgagatgcggtcgctggcgctcatgctgacgtggtccgtcgccaccgtgctcactctcctcgccgtgggctcgccccatccaccacctcagcaatgctagaacggaaaaccaggttgtgcaaaagagtacttgcgactttgaaggtcttatggtcagtaatagaggatatgacgaagtacatatcaccagaggatgcaaaaagattgatatctaaagagaatggaggcgaggtgttctactaaaatgccaagctcctggttgtcctatgtctggtttccaaggtgtttagactgtattttgtaatgtaacatttggtgtggtggatgcaattccatgatagcgaatggcataagatttaatgctaagaagaaacaagttggaaattattactctaccaaggtatatactagagcgaagagcgaacaacaatctaagattgcagcaagaaaggtccagcaagaaccagattatgtacatgtatatgtgtggatagaactaaccgccgatattatcctaaatctaagcacggtcacccacaaaaaatgtgtaatttgcttcttcccagacatacgaaatgtgttatgcggactatgttggctattggaaaggcattctaaatgccgtctgtaatgtttgatggttacaaactattgtcgtgctatgtaatatgcggtcttgacataaccgctaggtttgtgatgttgttgcatgttacagctgcaactttatattattgtgccatgtgttatttgtgttcttttcttttttgctatcattatgtctctctctattacaagagaaaataatgtagtatctataactttggttaagcttcattttcagcggttgatcctaacacctccaactgtaggg

SEQ ID NO: 34697 - DNA, 970 bp, Zea Mays
caccgacagatcatctactgaccagctacttgaatgggaagtactaagacatcatctccctagtccctcccaacccgcgcgccagcccaactgcccaacgaagctatcctcatgcaatgcatagagggctccatacctgtctcctcgagcacaaggtgaataatgccgggtttgttggccttgagtacatccaagatcgtatagatggcacttcaacgacgagcgaggagttttgtggcatggacatggacaagaggctggagctgctgctgaaatggtgcctccgggagacttgcgatgctgggaaggaatgcatgaggataaactaccacggcacgaagcaagtcacccgagcactcctgccactgctgctggcctccgacagcggaaggatcgtcaatgtctcctcggtgcttgggcagctcaggtttttcggcagcgaggcgctgaagcgggagctggacgacgtggcgagcctgaccgaggagaggctggacgaggtggcgggcgcgttcgtggcggacctggaggccggcgccgtggaggcgcgagggtggtggcccgccgggttctcgccggcttacatggtgtccaaggcggcgctgaacgcctactcgcgcgtcctggcgcggaggcaccccgcgctgcgcgtcaactgcgtgcacccgggcttcgtcaggaccgacatgaccgtcaacttcggcatgctcacgcccgaggaaggcggcagcagggtggtggccgtcgctctgctccccgacggcgggcccaccggcgcctacttccaggagcgccagcaggcgccgttcgtgtgacgcgctctgcctctgctctgcttccttcaccacccgatgcttgatagctatgtatctcttgaagttttcgcttgataatagttgatacacattcaatccccgcgcgtaatctctccgttgcaaaaataatggaatcctaagttttggacaagtaa

SEQ ID NO: 34698 - DNA, 2368 bp, Zea Mays
cacgctttgatcgcttcttttttctctccatcatttctccccgtttcgtctcgcttcttttctgtcgcctcccgtttcgtctatctccggccggcctttctgctgcaaggaaaccaatattgtttgctggatctttcaaaaagggaaaccgaattcccgagagcgagcagcagggaatctctgctgaatccgtaggctccgaattggagctggaagtgtagtgatttcctgattggggacataaggtggggtttgtccctactccccagtgagctccacgcggtccctgctgttcttccagtcaaaattctgtacccttcggtgctggggtcaaggaactaggcgtgttgtcctgaactcttgattcctgcttcatggaaattgtatatgtttttctctgaattcaaaatcgtccctattctcccaaagctttctgagtttcaaggccacatgggacataagggagaagcaagcaaagagctgatagtgaaggtgccatgtgtgtttggaacagggaagaaggatattgtccctctccaaaactataaacatgggttggttgagtaaaatatttaaaggtccagtaaatagagtttcaagaggacactacaacgggaactcccatgaaggctattcagctcagcacactaaatcatatggtgtgcatggcaatgaggacgaagacatggatcatgctattgcattatccttatcagaggaagatcaaaggaagggaaagaccattgataccgggcatcatttagatgaagatgaacagattgcacaggctctgcaagaaaatattggtcataacctagctgaagacgaacagcttgcacgggctctgcaagaaagtatgaatgatggacctcctcgtcagcacattccagttgaagatgttaactcagaaagtactccagcaagcatcttgccctcaaatattttccgcacaagtggcttgagggtttgtgctggatgcagaagtccaattggccgcggtcggtttctcagttgtatggactctgtttggcatcccgagtgcttcaggtgttatgcttgtgatagaccaatatcagagtatgagtttgctgttcatgaaaaccatgcctaccacaggccctgctacaaggagcgtttccatcctaaatgtgatgtttgcagtagctttattcccacagataaaaatggcctcattgaataccgggcccatcctttttggatgcagaagtattgtccttcccatgaaaatgatggtacacctaggtgctgcagttgtgaacgaatggagccaaaggacagtcaatacataacattagatgatggccggagactctgcttggagtgtctgcatactgctattatggagaccaatgaatgccagccactgtacattgatattcaagaattttatgagggtatgaacatgaaagtagagcaacaagttcccttgcttttggttgagcgacaagctttaaatgaagccatggaagcagagaaatctgtgcaccaccttcctgaaacaagaggcctctgcctatctgaggagcagattgtcagaactatattgaaaggaccaattggaccaggcaacagaatcatagatatggtcacaggaccatacaaactcattagacggtgtgaagtgactgcaattcttatactgtacgggctgccaaggctgctaactggctcgattctggctcatgagatgatgcatgcttacctccgacttaaaggataccgaaccctgagtccagaggttgaagaaggcatctgtcaggttctagctcatctttggcttgagtcagaaatcacatcaggttctggtagcatgtcaaccacctcagatgcgtcatcgtcatcttcaacatcttcatcatcgaaaaagggcgcaaagacggaatttgaaaaaagactcggggagttcttcaagtaccaaattgaaacagattcttctgtcgcttatggagatgggtttcgagcaggcatgcgagccattgagcggtacggcttgagaagcacccttgatcatatcaagatgacggggtcttttccatgctgaagctggtttttttttacctcggcttggatatgggtatacatattttttttggagaacttttggttcaggttatacatacgaaaagccgaacttctgtgtcgagaagaggcataaggatttagctatactgtccattgcaggaaaaaaaactgtttcccttttcaattataaaatttcacagtgcagacatgaaggtatgtggtctttagcttggccaaccttgtggaatgctgtcacttgatgcaaaagaaatttcgaatacatatgctttgctgtgcttgaaatgcaatggttggatgctatgct

SEQ ID NO: 34699 - DNA, 3885 bp, Zea Mays
gtctactcaggggtataaacggaaaagcaaagtttttagggttgttgctgcccgtgtgccaggcgaaaaacgtagcctcgcactctcgcaggcggcggcgcatcgagaaacagggctgcggctgttgcttcttccacctctccggccatccggcggtccatcgttccgtgccggcggcctcccctcctacgcccctgccgattcttcaatcttcaccaacgtctgcgcgtagcaggctagcagtcggcacggcttcctcagatctgccggacgacttgctgttcgtcaccgactcaccagcaaccaacgtcagccatcagccggcagcaggggaagctgggcggagggtcattgcggcacggcgtccaggcgtacagaaggcaccagcaacagcccatggcaaacgccgcagatgaccctatggcagatgaagccggagtagaagatgccttcacacaggagatcaatcattcgtacgtccctagataccatgtgttgagttggatggaaactgtggaggggatggtggccggtgtggcgtcgcttccgccggtgtatttgatactgaacagagagatatatgatacatgctcctgcttgctcatgatgccggtttggtgccaaagctatcttcttgagacgggatggggatggaagaggctggtgccctacagacctggttatgttgagttgcatgtgttcaagaaataccttggggactatttcgaccataatcgtgaagcttttctttgtgccgagcagaagcctgatccatttggatggattgttgctgaaaagagtgccctgattgctgcagccaaatcgtgcctcaagatggagaaggcacttctcaggtactgtgctagctttctcactcctgacgacaaaaggctgatcctccggatcaaggaccaggcaaagcaaatgatccaatcagagggtgatcaatctttgattgtaactatatgcttggagtgtattgcgaaggaggccgagttaatgtacaattatttgccttgtgattttgacaccaccgaagaagtcgccgtctgcaataaggttcggcggtctgccttgaatcttatgctctacaaaggttctgaatctgctgttgctgctggtgccatgatggtgtgttcctgatactctctccattcattttataggctttattttgactatgcaaaaaccaatattctgctgtaaattctccctatagtattatgttggtagttacaaaatcatagtcagtagcaagtgcttttaattaggaattgttacgtaactcacattttatgggactaatgtctggtcaaagcatgaacttggatagtcaaaccacaccttataaatatgaatatagggagtaattgtgtattttttaatcctctgttatcctgtcaagcttctttaaccaaactgcaaaaacgatgtacttgaagggtatcacaacagaggctaagtccatttttgacttgcttagtcgagaccatgacgtggtcatggaagtttttacttgtgagagtataagggaacatacagcatcagttctgacccagcttgggaaggaatttgcttgcgagactgctactgtgaacagctcatcagcgcggcctatgggggtcagtgatgttagagatctgaactctgaagtatctggttcaatggaagactgtacgagtatggatggagcaaggttttaaagtcggctagtcgactctagtcgcctaagcaccgataaggtgactaatcgcgattagtcgtcgattagctcgattagtcgatcctagtcgactccctagtcgtcctatagtcgtccatctataacaggaccatatatatatatatatatactagattgcaaatctattgacaatattacaatgaaactgtagaatgaatgaatgatcatgttttcactaaaaggtaaagatcacttagacacttaccttggattggagtatacaacagcacactgcaagattagtaggacaacacttctggtatatctccagcagccttactagtgcaaaacgtcatatatctccaacaaagcaagcagaggagggcgtccagcaagcagaggagggcggcggcgcttacagcagcagcaagcagaggagggcggcgctcagagcagcagcaagcagaggagggcggcagcgctcagagcagcagcaagcagaggagggcggcggcgctcacagcagcagcaagcagaggagggcggcgctcagagcagcagcaagcagaggagggcggcagcgctcagagcagcagcaagcagagaagggcggcgacgctcacagcagcagcaagcagaggagggcggcgctcacagcagcagcaagcagaggagggcggcggcgctcagagcagcagcaagcaggggagggcggcggcgctcagagcagttagcagcaagcagatgaagcggtggcgctcaactccagctaggttaaagactgtaacggcattggcacagtttcaggcttttcagcccccctggtgggccggcccaaatagaaaagagcagcctggagcccaaaacaaagcacctagtcgagaacaaccctaatcggacgactaatcgccgactaatcgcgattagtcggacgactaggtttctagtcgccctaatcgcgtcggtggccctaatcggccttgcagcagcgataagtccgactaatcgcgactaatcgcgattagtcggacgactttaaaaccattccgatggagacaatggaaacaatccagttgttggagggggtggctaagaactcgaagaatttaaagttggtggagaaccacgaaaacgagaccagggttgccacgtaagagaagactgcatcagcatcactacttgcctgttttgaaatttaatgtacctttcacggaagccctcactaacattaattgtttgtatgtttcatctcagcttgatgactgaaaataactagggccttgcagggaaaccttcgttgacttctgaggtactgaaggaatccaattcatgatgatgagctacattattcaagtttagcaactattgattgtgtttcccatcatgccttggatgtgtcaaaacttgaacacaccaatttgaagattatcataccctgcttatctatccacatacaaccaaccaaacaaaaatctgctggatcatcccatttgaaaacttgcaaccaaccaaacaagaatttggctcatgcaatccgtccaacctaatgagctaatacatgtaggagcatcattctatgattctatcctaaatccatggatggccctatcccatccaaccttgcctctccaacccatacggccatacaaacttgtgaccattcattgtaattctcatttcattgtcataagtgcgcctcgtttgacactgttgtttctctcgtcatcattggctttgtgtcggacacgttcatgataatttatctgcagcaacggtcaaatttatgaagctacaaggtgcaagttatgagctgctgtaactaaaaggatctctggtttcttttgagcagctgtctgttgtgtcaagttatgtgctacttgtaacactaaagtaccattttaccttatgacatgcagtgcttggttgttctgtcgtagttaaagaccgtgttgcaataagtgctagttctgtatgtttcctgggtttatgttatcaaatggttgcctggtttgcccactaatgtcatgttgctataagtattcctagctgttgagaaatgcgtgcgcgcgtgccgatcgttgtatcattgggtgcaacatcataggtcattgtagccaagggctatgaagaggggagtttcagatagtccaaaaacaccagggtacatagcaaatacgaaggttcttaggaaggaacagaag

SEQ ID NO: 34700 - DNA, 2652 bp, Zea Mays
atggccgatttggggagaagggcggcttgcgcggacaatgtagctcatatagtccatagcctattcgaatgccttctaagccggcccgttggcccaactgaaacattagtccgccttctcccccgagacccccgagagtcccctcgctgccgacgccacacaaacgcctccaccctcatgttcaccggcgctgcgggcggcattggcaacctgccacggccgcgcaggccgcggctcggcggaataggacacgggggcgtcatggtgtctccacagggacaggtggctctgggggcacatccgcacctagccgccccgccgtgcaccgactacgacgtggcctacttcaaggcctactcacacatcggcgtccacgaggagatgctcaaggatcatgtgagaactagtacttacagaaatgccataatgcatcacaaagatcttatttcaggcaaggtagttttggatgtgggttgcggcactggtgttctttcgatattctgtgcttttgctggtgccactcgtgtttatgcagttgatgcaagtgatattgcatttcaggctatggagattgtaagagagaatgagctgtctgacaaagttgtggttttgcatggccgaattgaggatgtcgatattgaagaaaaagttgatgtcatcatatctgaatggatgggctacatgcttttgtatgagagtatgctgggaagtgtaatttttgctagggacaaatggcttaagccaggaggtcttattcttccatcgcatgcatcgctttacatggcacctgttacgaattctcaaagataccatgatagtatttacttctggcgagatgtatatggcataaaaatgtcctctatgatgcctcttgcgaaactatgtgcgtttatggagccatcagttgagacaattagtggagagaatgtcttgacatggccagcagtggttgcacaggtggattgttataccatacaagctcagaagctcgaaaccatcactgctgcatttaaatttacgtcaatgttacaagggcagacctggtgcagtagtgagagctgtttcaccaagtcaccaagtcatgggttcgaagtaacctctccacattttcgtgggaaaagcttgccttggtttatccctttccgagaccccactcatgtgggagcctccgacattgtgtctaccctttttataagcctacactcgtttcaaagcatgcatatactgctttcttcctgttttgcactcggttgttagctgtaattgggattagacatgcactgtgatgagagacttttttcagtgctttcagttaaagggatgagccttagttgtaagttgtatttcccaacgctgagaatgaggatggcatgctactttttccatgtatatcaatccaggatgtttctaatttcttgtaactactacaaatttcctaaaacattatataaggatacaatgttctaatgctttgggaagttaggatatgatgttctaatgcttgagctggaatgcaatcaacaagagcatttgagagaatctttcatacatgtgacttattttgaggtggtgctaataaatccacctcttctgtgtagctaattatggagatatattaatctggcttatcttataattttgtgactgcttgcccagttacaggcctgatcagagtttagtttttacccatgattggtggaatataatgtgctacatgtggtgtttgatctgatacagctccattgcatggttttgcattttggttcgatgttgagttcaatggaccagtacgccagaaatcgaagaagcaacctagtcaatcattggatgagaacacccaaaatgccagcccaagcaataggaagagaaaaccagatgtctctattgttctttcaactgcaccagaggatgcccctactcactggcagcagacccttttgtacttgtttgaacctatagaactaaacaaagatcagatcatagaaggctctgttactatctcccagagccagcaacatgctcgcttccttaacatctgcctgaaatactttactggcgaccaatggtatgtcaaagaatctgtgatgcgataatctgggggaaactgaaacatagtaaccttctttctgaataggctcaaatctgttttgtatgaaggacaaccttgctgctggtcattgcggtttaggagcattctgactgtactgggttgtcgtggtagcaaattgataaaaaatggagtgccatttcgagtgcagcttgatcaaaatggtagtgggcctcgacaagtaatatgtgaatctttggctccaaactcaaattgacgaacaaaacatagaacatgttgacaagagtagtaccgttttctttttttttttgttcttttgaataggtacaagctgctggtactttattccccataatagactgctcattcattgtaacgcttctgcagcgtgtagtgcagcatagacggtatgattttacaaatggtagcattgaatttttacgagtggagtttttgaagagtaaaatgcatgaataaaatgtgcatggtgtctggacaagtagaatgcatggtgaatgtcagtttgtttcaatttggccattagctccttaataatcatacgtatttgatttactaggttccgt

SEQ ID NO: 34701 - DNA, 1473 bp, Zea Mays
cagcacacggatgatgatgcaacttatgtgcatgactccatccaacaatttgttggtttcctccgcgactccgaaagaaactgtgcagaccggcatccctccgacgagcttgaggtcctcctctcagcacaaggcagccaccaccaccaccaccatccttcttcttcagtgatccatcctcagctaagctcgctgctaatgatgcaagacctagggttccaatggagcagctgcggcagcttcgtggacacctcctcgtcgtcgcccatgccaccaccactggtgaacggccagcagcacgacggccacaacaagatcaaggagtgggaccgcccgctcactgctaataactcatcaaggtcatcgtgtgcgagcacagctatggcttgccgagatgtcgtcctcgacggcggcggcggcggcggcctccctgccatggccgccgtcgccgccgatcttgacgacggcaccgtgctcccggcgagcgtcaacgtcccccggacgacgacgacgcgccagaggccattcccggcggcgccgccacctctccccggcgacgcgttcgagatactggcttcgtcgaggctatgcaagaccctgctgcttagccaagcttcttcttcggtactgctccataatggcacgacgatgcctttgttgagatcagagcatgtgccctatggccctcctgctcctgctcatccccaaggaccatccatcggcaactacaagcagtgcatgcagatgggcgcgtcttgtggaggccgcgcgcagcacgaagcggcatgtcaaagcatggcggcggcagcagcacgcccagcactgccagtggtgccgtcgtcgaagaagcctcgagtcgagcagcggtcctccaccatcgtcccttctttcaaggtaaggaaagagaaattaggggaccggatcgctgctcttcagcagctcgtctcaccgtttggcaagactgataccgcatctgtgctcatggaggccatcggttacatcaaatttcttcaagatcaagtcgagactctgagccgcccctacctgaaatcctccagaagtaagaagcccaggccgacaccgcggggttcttcaaacgcgagcgctggggagctggaggaaacgaggcctgacctccgcagcagagggctctgcctggtgcctctctcgtgcacgtcctacgtgaccaacgagaacggagtctgggttccaccgaattttagggcaaactaaagtcatgtcagcgctactagagacacagcacaacagtgtaccaagaactactaatccacggttcatctcagttcatccacggttaataccagttctccgggccaaaagacacccaccatctacctcttgtgttgtctctctttgccactttttttttttgctaagcagtaaataacagtcagatatatacaatctcttctcctgcagttatgcagaggcagagcggctgaatacgattac

SEQ ID NO: 34702 - DNA, 3293 bp, Zea Mays
gtagctcgcagccgactctgttctctgtaccagcccaacccagaagcctatactcgttacgattacgagcccaccagcatctcctctgcacgggggcattccaccgagcacctcacgtgatctccaccccgcggcggcggcgcgagcaccgtctccgcctctccgctctccggcgaatcaaacccctccggcgttgcccctcggttgcctttcccctccgccacaatgcggtttgacctggatggcctgcccgtgcacttcccgtacgcggcgatctacccggagcagcacgcgtacatgggggagctcaagcgcgccctcgacgcgcgcgggcacgcgctgctcgagatgcccacgggcaccggcaagacggcggcgctcatctccctcatcacctcctactccctcgccaacccggcccgcccgctccgcctcatctattgcacccgcaccgtgcacgagatggagaagaccctcgccgagctccgcctcctcttcgcccacctcccgcccgcggcctcccgctccctcctcgcgctcggcctctcctcccgcaagaacctctgcatccacccgcaggcgtccgccgccgccgcccgggactccgtcgacaccgcctgccgccgccttacggcctcctgggtccgcgagaaggcctcctccgacccggactccaccccgctgtgcgagttctacgagacgttcgaccgggccgctgccgccggcgacctcgcctccttcatgccgcccggggtgtacaccctggcagacctccgcgcgctcggaagggagcgccgggtctgcccttacttccttgccaggcagatggtcaagtacgccaatgttgtggtgtacagctaccagtacctgctcgaccccaaggtggccagcattgtgtccagggagatgcagaaggagtgtgtggtcgtgttcgatgaggctcacaacattgacaatgtctgcatagaggcgctgagcgtcagcatccgcaagcagacgctggaaggcgcagagcgaaatctgcggcgcatctcgcaagagatcgacaggttcaaggccaccgatgccaataggcttcgtgctgaatacaacagactggtggatggactggcacagcgaggaaatctaccaatatcggatgcttggctcgcgaatccgtctttgcctgatgacatcttgaaggaagctgttcctggaaacataaggagggctgaacattttcttgctgtcttgcggaggcttgtgagattccttgatggccggcttgaaacagaaaatgttgagaatgaaatgccagtttcctttgttgcctcaatccattcccaggctggaatcgaccaaaaaatgctgaggttttgttatgaccggctacactccctaatgatgacattagagataactgatacagatgagttcatgcacatacagaccatatgtgactttgccacactgattggaacttatacacggggcttttctattataatagagccgtatgatgatagaatgcctgatattcgtgatcctgttattcagctgagttgccatgatgcttcactcgcaataagacctgtttttgatcgtttcgaaacggttgtgatcacttctggaactctcagcccaatagatctttaccctcgtctcttgaattttaatcctgtcataagcagaagcttcaccatgtccttaacaagagattgtatttgtcccatggtcttgacccgaggaaggtatgagctggtcccacgcgaacttcatatttcaaaatctactgtactgtagcatgacacttatgttaagcatggcacttatgttagtctttaaatgctagcattgtcaacatattcttaggtttggaaatgctaacactgtcttgcgtatacatgatacatttttattcctgagaatcatatgacacttatgttaagcttttataacatctttagttgtttccaacatttcatattactggtagcattgtacactgtgtaaacaccaaccattccatcatcttcagtgatcagctacctgtgagtacaaagttcgatatgcgtagtgatcctggtgttgtgaggaattatggccgcctcttgctggaaatggcttctgctgttccagatggcatagtttgcttttttgtcagttattcctatatggatggcattgtcaacagctggcacgaaatgggaattctgcaggacatcatgcaacataaattagtgtttatcgaaacaccagatgtcgttgagacaacattggctcttgataactacagaaaggcatgtgattgtggaagaggtgccattttcttctctgttgccaggggcaaagttgctgaaggtattgattttgatcggcactatggcagattagttatcatgtttggtgttcctttccagtacacattgagtcggatattgcttgctaggttggagtacctgcgggaaacttttcagataaaggagggtgacttcctaacatttgatgctttgaggcaagcggcccaatgtgtcggtcgtgttattcgctccaaagctgattatgggatgatgatatttgctgacaagagatacagtcggcatgataaacggtccaagttgcctgggtggatactctcgcatttgcatgatgcgcacctaaatctgagcactgatatggctctccatatagctcgtgagtttctccggaggatggcacagccatatgacaaggcgggaagcggtggcaagaaaacgctgttaaccgaggaggatctggagaatttggcgcaggatggcatggcgatgtaaaaaaatgagggtactgttgtacatttctttttgtagccattttatggcggtagataacttgtttgaagcatcggtaatgacgtgtggggccaaatcattcttactcgagttcgcacggatttgatcatccgaacatcatggtcgatgttcttctgagtgggtgtgggtgtggggccaaatcatgtcagcgggccatctgcagctacgtatacagacgaggatccaaacataaccgagaggaaacatagatcatgcttctaatcaaagaaaaaaaatccgcactcgatgcgcaggtgacgcctcattacatggctgggattcatatcttggtaaaaaccgcaagggtctgttttagaagtgaattatttttatagcttgtattcaatatcaaggttttggataataccgttgtattttatgacattagatgtttggttgcaattctggaaaccaatttttaaaaccattgtattttctatatatcatggtatttttagagtattg

SEQ ID NO: 34703 - DNA, 2295 bp, Zea Mays
cctcgaggggcttgctgcctatcttaggataagcacattcattatgtgtttgaggatttgccaatactgtgtgaaaggcatactacctcaaagttatctgcatatgaggatttacagaccataaaatctatgggctttagaggggaggccctggccagtatgacttatgttggccatgttactgtgacaacaataacagagggccaacttcatggctaccgtgtttgttataaagatggagtaatggagaacgagccaaaaccctgtgctgcagttaaaggaactcaaatcatggttgaaaatttattttacaatatggtagctcgtagaaaaacattgcagaactccaatgatgactacccaaagattgtagatttcattagtcgttttgcagtccatcacatcaatgtgaacttctcctgcagaaagcatggagccaatagagcagatgttcatagttcgagcacatcttctagactagatactattaggaatgtctatggggcttctgttgttcgtgatctgattgaaatagaagtttcagatgaggatgctggagatgcagtcttcaagatggatggttatatatcaaatgcaaattatgtggcaaagaaaatcatgatgatccttttcataaatgataggcttgtagagtgtactgctttaaaaagggcaattgaatttgtgtactctgcaacgttgccacaagcatccaaacccttcatatacatgtccatcaatcttccatcagaacatgtggatgtcaatatacacccaaccaaaaaagaggttagcctcttgaatcaagagcgtgttattgaaactataaaaaataccattgaggaaaaactgaggaattgtaataccacaaggatattccaaactcaggcagtaaactcagcacttactcaagtttacacgcagaaggacaagggtactgaggtcaaaatggcccctggagtgaaatctcaaaaggctcctgtgagccaaatggtcagaactgatccacgcaatccatctggaagcttgcacgcttactggcatgggcaatcttcaaaacttgaaaataaatatgaccttgtttctgtaagaaatgttgtaagatcaaggaggaatccaaaggatgctggtgatttatctagccgtcatgagcttcttatggaaatagattctcactgccatcctggtcttttagaggttattaagaattgcacatatgttggcctggctgatgaagtttccgctttgatacaatacaatactcacttataccttgtcaatgttgtaaatgttagtaaagaactcatgtaccagcaagctctgtgccgttttggaaacttcaatgcgatccagcttagtgaaccagctcctcttcaggagctgctgctgatggcactgaaagatgatgaatcaatcggtgatgaaaatgacgaggagaaactggagattgcagaggcaaactcgaaaatactgaaagaaaacgctgagatgattaatgagtacttctctattcatgttgatcacgatgggaacttgaccaggcttccagttgtacttgatcagtacacccctgatatggaccgtctcccagaatttgttttgactatggggaatgatgttacctgggatgatgagaaagagtgcttcagaacggcagcagctgctattgggaacttctacgcactccatcctcccatccttccaaatccatcggggagtggtgttcaggtgtacaagaaaaataaagcttgcatggcgagtggtgaacatgttgatagtacagatgaagatgacattgatcacgaactacttgcggaagcagaaacagcatggtcccaacgtgagtggaccattcaacatgtcttgtttccatccatgcgacttttcctcaagcccccaaagtcaatggcaacagatggaacctttgttcagattgcctctctggagaaactttacaggatttttgagagatgttagcccacacttctaactacttacaagaagccaagaaagacaccctataacatgttttgcactgtacatattcgtgtagtgtcgcaaatgttttttttaatagttcattgacttatgagatggaagtataccatgagcatgctattgttttctccctctaagggcttgttcggttacaccaatccagagggagattgaaggggtttaaatccccgtctagtcatttttgactaagaggggatttaatcccctccaatccccatctggattggtgtaaccgaacatgccctaattgagttgtctaatgatatctaaaggaaa

SEQ ID NO: 34704 - DNA, 1715 bp, Zea Mays
aacttaaagccgggggcacaagcgaaagcgaaagcgcatagtgcccgtgctgcctgtcccttaccgcaacggtagcattcgaattctctccccaaatcgccaccctggggcacccaatgctggcagcctcccttctcgctctccgcttcctcctcgtcggcgccactgcggcggggatggggaccgggacggtgggggtgagtggtggtggccagctgtggtgcgttgcgaagaacaacgcggaggacggcgcgctgcagagcgcgattgattgggcgtgcagtgttgacggtggccgcgcggactgtgcagccatccagcagggtggcgcctgttacgatccgcccgacctccagcagcacgcctcctacgccttcaacgactacttcctccgttccggcggtgccgggagccccgccgcctgcgacttctccggcgccgccgcactcaccgcgctcaaccccagtcatgggagctgcgtgtttccttccagtgcatctccgaaaaatggtagcttcacaggaacgacaacctatggtccaaccggtgcagacttcagcagcagtttttcatggaaactcaacttctggccattgctcttgcatatatctacatctgtaacgttttgtgccactcatgtgttgtagttttttcttaaactgtgttctgcgcgtatgataaactatcaggctgcagaatgtggtttgttcgctggtctccccttgagttttctgcattgtttgggagagagaaaactgtccaatatcagctgctccctcttttaccaggcagtcctcttcagttttgtgtggccatgtgatttcatccttctgctaactcacaactgcacaagtgcggcttgatctcttacagctgttgagtgtggagaaactgaagtggccagtacaaacatctgtgacgggcgcgtgaggattcatcttatttgaggggaaggttgagcaagctgccggggcgtctcctggccggcgccgatctcggagggaggaccgaccctgcagcggcagagcgggcacgtcgagcgcgacgagagccacaggtcgatgcagtcgcggtggtaaacatggctgcacgcgggcagaagcttgaccatggcgccgacctggatgatgccgaggcagaccgcgcactcggtcaagcccgcgcccttgccgcagtgcctcaccagccggttgtacatgaacgtggggacggccgcggcaacggcgctcagcggcagcagctcctctggctcggcggagcctcctgaggagctcgtcgcgaggacgtccgcggtgggctgctgcggtcggcggtgcgccaggtgcctgcacagcgcgacgagagcgaaggaggcggccaccgacgccgttacggagcagaagaagaggaggttgtccggtgacattgcaaattgcatggcgcccaactcggatggagatggctcgctggctgtctggttgcgtatgcaggcaggcacgctgcctcaagtacctcttctagttctaggcttctatagcagttttcttgagctgaaatggagtttactgatgattgcagttggtgtgtcggaaggctatgaagccttaacaaacacttttgcggtggttagcatagcaactacagtattcctttcattagtttggaaaactctgccacgtgtctgcatcagaccgagcacatggcaggtatgttgtcggagcggagctttcagcggg

SEQ ID NO: 34705 - DNA, 303 bp, Zea Mays
cgtcgccgtctgagttcaatcagacaagcacgccgcttctcgtcttcctctctgcgcaggttatgggcgcgcgtagggaggtttccctctcccgtcgatgcggattctcgtcgatgcggattcacacggggcgcaacacacacacatgaatgttcacctttttctctcttattcttatcgcacgactcgcagcaagagaaatcgaagaaccaacggaaatcttgtaccttgtttcttgattcagcgaatggaagcgaagtctgtcgcgtaggacagttcggcaaggccggagacctgccggct

SEQ ID NO: 34706 - DNA, 536 bp, Zea Mays
ggcctttcctcgccgcggtcttcttcctcgcacgaatcgcgccccgtgggcgaacctaacagcctccgcgagatcctcgccgcgaccccaacaaaccccccaaactccctagcaccagctgccaatctacccgtccgattcgcgcggcatgaagccttggtccgcaccccgatcctgttaaaaacccgacacctcacctgcctcaccaaaccctagaattccaattccgtcgcgagagagacctcaccgcctcgccattgactgtcgttgcggcatcgtgggcctcagaaagtgctagggcgtttccccaaccattctgcgcaagtgagaaacctcgggggaaaacaatttcaagatcgcgcgggctctggcgcaagatcgacgggaggagagagaaaaagggggcgttccgtgcgtcgttggtgggccctgaccgcacgtttggggcaccacgcgggtccttcatcatcacgttgggcaagctcgtcgtcggcatctagatcctcgcagtgaggtcacgagtcacctgaagttca

SEQ ID NO: 34707 - DNA, 1961 bp, Zea Mays
aagattattcctttcttctcagcgacaccgctcgataccttgcgatcccaagatggcatcgccgccgatacccacacagtaatcctctcctcgctcccctgtcccctctctccccgccgccgacgccgagcctactctgtccatttccggactcgccgtccctcgcgggccggttcggtccgagcctgcgccccagccgcgccgggatccgcgagagaaccgcttgccctccgtgctttgcgggcggtccggtgactggctttgggattcctatgccggggggctcgtgagcgcaatggggctgtttgggtgaactagggcttgcttctgtgaattctgtgagggtgagcggagctgtgggagggaggatgcaggggaaggcacagctctctgattccaaccggcggatcatggagctcgacgcgccgccacggcgggtgtaccaggcgtggaagggcagcaacttatttttccttggtgggagacttatctttggcccagatgtgaggtcactcgtgctcacagtatgtttgattgtagtcccagtgatcttctttgctgccaccgtttgtccacaacttggtcatgagttccacagccaaattggaggttgggtggcatctgtggctgtcatctttacagcatatattcttattgttctacttatcacatctggccgtgatcctggaattgttcctcgaaacactcatcccccagagcctgaagacatcgatgaatcctccaacttaccagattgcccgggtggtcaacaaggttcgacaggtttaccacctacccgggatgttcttgtcaatggtgtttcagtcaaggtcaaatattgccatacatgcatgctttatcgtccgccaaggtgctcccattgctcaatctgcaacaactgtgtagaacgttttgatcaccactgtccttgggtaggccagtgcattggcaagaggaattaccgattcttcttcatgtttgtgtcttcaactactgtactatgcatatacgtgtttgcattctgctgggtcaatctcaggagaattatggacacgcatcaatgcaaaattggaggattgacctcattccacatctatttgatttctacaaatcagactacttatgagaacttcagataccgctatgaccggagaacaaatccttacaaccttggagtgggtcagaatttcatcgacgtcttgttttcaaggatacccagctcaaaacacgatttcagagcaaaagttaaggccgattcttcgaccttcgcgtcatccctcagtatgggacgggttctaagcccacccaagacgagcgtggaccttgagatgggcatgaaaaggcaagcggtggccgcagaggactttgaagacttgcacagccagatcggcagtgctatggggctggagagatgtggcaccgagccgccgcattttgtcggccggaagggctgctctgagatgtcacctgacatagaggcgttcgcagaagagtttggcatggaaggtgggctcagtgagaggaaaaagattgagcggcggacaaatgatgattcgtaggaagtttcccacgtcacaaaccacctcttcggccttcctccaggccccaaacttggtaaaagcttgcaaagaagaaagtgaagtaggacaaaacggacggtagagtgaatcaggcattggttagtttgttttgggtgtcatttctagccaagacttgagttagaagtgaaagatgttccttgacgatatagaaatgatgaatccacatctggtttggacttcttagtctatgtgatgtattggatgtgtggtgtggcagtgttgcttctgattttgttgaaggtgtaatctgttgatttaacttggctatgcattcatttaagcgatcaaatttctgcacttttgcgctaaatctttagatattgttcagataagggtggattgaagggaattaaatcattt

SEQ ID NO: 34708 - DNA, 2312 bp, Zea Mays
cgtctcccctcccggcgaaggaaggaaacgaggcacgccctgacgcccacgcgaaagaaagttgacgcccacgccccacgcgcccaggaacaccaccggtgacgcgtgatcagactcgagaaccaatcccccccgactccctagccgccgcgctaaaatctacacaaagcctcgcaaatctggcctgatctcgcgcccccgatctcgcgctcgttcgcagcccaccgggaggtcctccagcctcccgccagatctcagcgtcgttcgttcgcttttagatttggtggggtaagggaggggaggcgggatgagcgcgcggataaaggagatggtgcgtgtggccacggcgcggctgggcggtgagcaggtgggggctggcggggtttcctcctcgggtatcgcgcgtcgggagtccacggcgcggctcggcggcgggggtacaagcctccggaggcagccgcagccgatggcgccctccgtgcgcaccgtctgctgcaacgaccgcgaggccaacgcccctgtcgggtacaagggaaattctgtgtcgactacaaagtacagcatcctgactttcctacctaaaggattatttgagcagttcaggcgggttgcaaatctttactttctcatgatctctatcttgtctactacacctatcagtccagttcatcctgtcactaatgtcgttcctctaagtcttgtgcttctggtgtctctcatcaaggaagcttttgaggattggaagcgtttccagaatgatatgtcaattaacaatgcacatgtcgatgtattgcaaggtcaatgttgggaaagtactccatggaaacgactgcaggttggagatattgtgaggacagcaaatcttgatggggaaacaaatctgaaaataaggaaggctttggagaaaacttgggactatgtaattcctgaaaaggcttctgagttcaaaggtgaagtgcagtgtgaacagccaaacaattccctttatacttttactggcaatcttatcatggacaagcaaactatacccctctcaccgaaccagttactcctaaggggatgcagtcttcgtaatacagaatacattgttggcgttgtcatattcactgggcacgagacaaaagttatgatgaattccatgaatgttccctcaaaaagaagtacattggaaaaaaagctagacaagcttatccttgctctttttgcaaccctctttacaatgtgtgttattggcgccattggaagtggcatatttattaatgaaaaatacttttatcttggattgcgtgggcatgtggaggatcagttcaatcctaaaaacagatttgtggtgaccattttaaccatgtttactctgataactctatactcaacgatcatccccatttccctttacgtgtccattgagtgcacacaattcattaataacgatcttcatatgtaccatgctgagagtaacacccctgctttggcacggacttctaatcttaatgaggagcttggacaggttgaatatatattttctgacaaaactggcacacttacaagaaatctgatggaattctttaaatgctcaattggtggagaaatgtatggaactggcatcacagagattgagaaaggaggagcagaacgggctggaattagaatcgatgatgatgagggcaaaagatctgctaacgcggtccatgaaaaaggattcaattttgatgacgctagaatcatgcgcggtgcatggagaaacgaacctaatcctgaggcttgcaaggaattctttagatgccttgcaatctgtcatacagttcttccagagggtgaggagactccggaaaagataagttaccaggctgcctcacctgatgaggctgcacttgtgtctgctgctaaaaattttggtttcttcttttataggcgtacacccacaactgttatggttcgtgagtcacatgttgaaaggatggggagtatacaagatgttccatatgaaattctgaatgttctagaattcaacagtacaagaaagcgacaatcggtggtttgccggttcacaaatggaagactagttctctattgcaagggtgctgataatgttgtatatgaacgattggctgatggaaatcatgatatgaaaaagatcagtagagagcatctagagcaatttggttctgctggcttacgtacactttgtcttgcctatcgggatcttagtagggagcaatacgaaagctggaacgagaagtttgtacaagcaaagtcatctttacgagatcgtgataagaagcttgatgaggtaatttcgattaaactttaag

SEQ ID NO: 34709 - DNA, 676 bp, Zea Mays
ggttgatctgatcgaggaccagcaactgcctttagatcaactccatgttactcagtgtatgatgtcactccttttatggatgagcatcctggtggagatgaggttttgctagctgtaactgggaaagatgctacagctgattttgaagatattggccacagtgattccgcaagggacatgatggagaagtaccacatcgggcagatagatgcttcaacaatcccagcaaagcgaacttatgtgcacccccagcaagcgcccagccactcagacaagaataatgatctcctcatcaagatcctgcagttccttgtgcccattatgatcctgggccttgcatttggtatacgtcagtacaccaaatcagagtagtactgttcttgaagacttgcctttggagtctgttttatggtaatggtttggatgagaacagttcagtaattgcttagtgtatttgtcaggtggatgttatctcattggtcatatactatgtattatggacatccatgtgttgccgaaatgtgctcttttccccatgaaccgaggcatacaagatgaattctgactcttccatgaaccgagtagttgataccagattattgcagtaatgtttgttttgtgtatgcgcacttggatgtcgcaataaacagaaccaaaccataaactacgttcatcg

SEQ ID NO: 34710 - DNA, 629 bp, Zea Mays
gaaaaaatcagcagagggcggttgagcggatgagatcggcagtggctgagaaaaatcgcagaatgggatagagatggaagaaggccagctgcgcgtgagaataataacggcgggatttttctgtccacgaactgaacggcggcggtagaaaattagggcgtggagataggaactatgacgccaggaagagatagagctgaagaaaaatatcctgaccacggacggctgaaaagatcagagagagagaacggcagaagaggagataaagagatattttctttggttgacgaatggggacagaattaatttgtttcaagaactttagtcgtcgagttcaaattaatttgtccgggataaaaatcatccgagtgagtcgagcttctgaattcgtattcgtgcgagcgatgaattttaaatatcaccggacgcaccaattttcggaacgacgatgttccgaacatcacgaaaatttcgaaagagcctggatagatagaaataaaaatgatgtcgcacttgcgacaaacgaagcagatgcgatataaaaatcgtgatagcgaaaataattagaatttagcatccgttttatccactgatatgacgtgcttgaatccgtactcgttgtcgagcgg

SEQ ID NO: 34711 - DNA, 1219 bp, Zea Mays
ggcgtattcaacatttcgattagcgaatcgctttctccacgaactcacgaatgcgttggccgctgggagaaggagcagttccgctctctcgtttgggtggacgacgaggaagaggaggccaacgcccacagcaacaggcgaccagcccgcgaagacgtggcaccaggataggtgctcctgtcctgagcttcaaatccgcaccccgcggccaagctgttacttgcgctgcggccttagcatgaggtggccgctggcgatctcgactcgccgccgccccctcctccttttcatccttctcgtcgtcctctacacgattcctgggacattttcatcgagatttgccagatgtgagggaggtgcacacgctatatacctttaagggtgaagaatcatggcagagcttccagaaaagaaatgcaagcgatgtggtttgtatgaggaggacacaattacacctgatgatgtctttgatgaatgggagatgtgttcgagtgatttcaagggtgggaaatacacccggtttaaggaaggccagttcaatgcaacattcctatgtccaaactgcactgcctcaactggacatggaaaccgtgaacctagtgaagatttggaaactaagaagacatctgttgtggtcatcataatagttagtgttcttgcatcagtccttctcaccattgccttgttcgggggctacaagtactggcagaagaagaagcgggagcaagaccaggcgcgattcctcaaactctttgaagagggagatgaccttgaagatgaactgggccttaccaatgaactctaaaacagtgctacagtcttacttcctatgttttcagatgtagtttccacgtatgatgtataggatgtttggttttcactgattttattgtgtatagcatccagtagtttatagagaaatgattccaacaaaactatgattcggttgaatatctgcacggaccgttcggtcgtgcagggctttgcctacgagacttgtggcaggcttagtgcgattccggactgttcggcgtaaggtgccggacgggccgttggaggacggttcggccgtgtccagagccgatgtaccatacagtgaggatggtgatatcattttccccggatatgagtttatcgacataccataatatggttgggactgagaagtcctatttgttgccgatgtttttaacgcaattattttagtgcccaatttatg

SEQ ID NO: 34712 - DNA, 2905 bp, Zea Mays
cgaagacccagacgccagaggggagtgagggagaggggagggagaaataaataaacccgaattcagccaaacttctctctcccaccgcgcttgcatcctctcatcgccaccccaccctcctcctccctgtctttctccccccctctctctccccctcttgacaaattttcctccacccattcccttcctcccctcttcttcttctccacccactccaccgatccccctctttctctctgaattctctctcgtcgtgcccacccttccatctgtctgctgcctctctctctcgcaatcagtcactcggctcttgtttcttccgtctgctgggttgattctttctcttcctctccgtggagaaacaggaggagagaggaaagaagagaaatcggaaccagcctgttctttttgcctggattgcggttcttgcgagttgttcagaaactctgggccagtttctggtcctttaaactactggaaagaggaaccatcagagatgccaaggcagccaacaaattgatatctaattgccctactttggatcatcataatgcaaggacagaggaattctatggagcattttgctgatgtctttggattcgacgttgcatcgagttcaggcaaccctgtgatggatcagcagtcatattggaataatgttcttggatcagtagaatcacataatcttcaaggttatcagatggctcacagtgatgccgccatgccatatggaaatgaaccacagcaagatggtacatttcttggtttctgggaatcaggcgaagcaagttcaagtgccagtgcactaaactatggcagctctaataatgtcaaaacagagcatcttaacattggtggtggaggtggactgaggattggtgaaagccgactggtagctgacaatggcatttctctggatgtggatatcaaccttaacgccaacgttaacgatctttgtggtcaaagttcaaatgttaactgtgcctctcaaggtcctgagcagtattgtggcagtgatcgtaatgctataaattctcagccgactgacctgggattacacccattcaggacattcctactagatgcacagcaagcagaatcttttactttgaatcctagtgaaaaccctttgggtgatttttcatcaatgcaagaaagcattgaacaaagaccaggtggttccctggatggtcgccggctagcgtgcaagagaaaaaatattgaaggagccaatggccagagttcagcaggtgctagtacaagttttccccacaggaacgataatgcattccataacattgcttcttcaagttacaatcctgcacctatcagaaattcatcctctcccaagtgtttgccagttccaagttctattgaagatcaactcccacggtatggaactaatgtagggctctcagccggtacttatgaccttcatggaggggtcaacaatgctgtgaattcacagagaagtttccgagcaagaactaccacatctcaacaggttgctccctgtagtgtatggccctcttcaaatgctatcagactttctaattcatggaatcaccagccacctcatttccaaagtgcatttgatgatccccaggaggttattcctgtggtcagcagcctcaacttgcaataccaacatccaatgaatgttcctggtgtgccacaggctgctaaccgtttcactgaccatggagcttcatcatcgagagctgggagtttggagaacagaattattggtagtgaagaggttcctaggaggtatgccgcgcctaccaactactctgatttagttcccccacctgcagtagacctgagacgtttggtgccagaaccatttaattggagttctgatgtccgaggcactgcaatatcaggaagtattattcctcctgtatcaagaactaataacagttcaacagttaatccaccagcaggattcaatcaccaaaacctcaccagacgccatcctcgaaatttatcagagattggtcgtctatctggagcactccgcggccatcaacccccacgcttaaggtcagggtttctgttggagcgtcagggcgatggtgtttggggcgttcctttatcaacaaggggtagagaaggaagaaggttaatggagattcggaatgcacttgaaatgattcaaaggggggaaaatgtaaggctcgagtctatcttctatggcggcctcgacattcatgacagacacagggacatgcgccttgacattgacaatatgtcctatgaggaactattagcacttgaggaaaggatcggaaatgttagcactggcctcagcgaggaagctgtgataaagttgctcaaacaaaggaaattttcatcgtggagactaaaagcatctttggacccagaaccatgctgtatttgccaggaggagtacgttgatggagacgatctcgggaggctggactgcgggcacgacttccatgctggctgcatcaagcaatggctggtggtgaagaacgtgtgccccatctgcaagaacaccgcattgaaggcctgaaaccgaacaaaggcccgtcagagacacacccatgttccgtgtccattcgatcggtcgcaagatcatttacccgattggtttttactatgcgttttttggttgggaaaattttgccatttcacctgggaaagtggtgggggggtgttggaggtggaagagaagatggcggtccctgtaaactgctgctgctgctgctgcagtaaataatccctggaatttgtctccctgcatttaaacaaaatatttatggctgttataatggacgccgtcgtagggttataacttgaaagatagcattgtgtgccaccacccgccataattctacttgatctggatttcacgtgctgccgctgctggtgcggtgcg

SEQ ID NO: 34713 - DNA, 1992 bp, Zea Mays
gtgtagcactctcctctgatccggagtcgagtcgattcgagtccactccgctgtccgctcgcaccaactcctccatccaattccaactcggcaactcctccaggcagcccggtgggtgggtcatcctctccccacgtccaccacggcgatggcgctcgcgcccccgcattgctgacccactcccaccgcggactctccctccctccccgtggtttggttttggtaggtgggggaggttggtaggcgccggggcgtgcctgtcggctggcggtttcgggaagcgctgccgcgatccttgcccggatctgggcgccacgatggaggacgccggccgcgagggcggcactgccgcggagaatgggaccgagggggagggctacgtcctcgtcaaggccgcccccgagggggagggggaccccaccgccgccgccgccggaggcgatcgcgaggatctcgctgcctccgccccggcgatggcgatggcggtggcggctgcggacgaggccgcggcaccggccaagaagggtggatccggggccacgaaggcgaggctgcagaacggcagggtccccgccggaacttccgccgccgccgccgccgccgggccgagggtgaagaagcccggggtcctctcacagagcgcctccttcccggcgcggggcgcggtggcggtcgcggccaagaaggccgcggcggcggttgctacgcccaagcaggccaagggcgccgtgcccattggatcagagacggcggcaggccgggcggtggagaagaaggcgagtttggcgcggacacctgttgctcgccggccgatgtggatgcggctgccccaaatgacacagttgttgctgtccaagagtcagatgaaaatacggacaaaccattgaaacaaacacagccagggaaaacagaggatgatgtgcactccaccacatcaagtaccaatactccccgtgcagcagctcgtaagagtgctgctgctgctgctgctggttttagtttcagattggaggagcgtgctgagaagagaaaggagttcttccaaaagcttgaagaaaaaatccatgcgaaggagctggaaaaaacaaatttgcaggagaaatctaaggagagccaagaggctgagatcaaactactgaggaagagcctaacatttaaagccacacctatgccaagcttttacaaggagcagccacccaaagttgagttgaaaaagattcccccaacacgtgccaggtcaccaaggctcggccggcacaaggcagccagttctgctactgctcctgctcctgcagatggttctgtatcatgtgggagcccacggagcactgcaaattcgggcaaggtaaatgaaatcatggagaacatcaaacctcgtgtccctgctagaaaatctattcagaggccagtcacgaaaactccattgcaagtgtctgccaccacaaaggctgaaccaagacccatagctacaaagccgaaaatcgcaaactcgaaacctaaggtttcaagggcaaaggttgcgcaggcgcaaggaaactcagctgaagtccctccttcagaaccttctgcctcggaagagctagtagtcgaacatggcgttggagaagctacaggtcctgatctggcttcacaattggttgcttcgaatgaagtcccagtccatggttgatcaattgcgcattttgcctatttatttccttcttgcagttctgtgaatagtgagggtgtgtgcttcattgaaagttgaatcgctcaaagtgccatggtttatcgtttctggagtaggcatccaaatttttttttcagcttgtcattgagcatgccatgtatattgcttgatattgtgttcatgtttaaaattcccaatcttgtgtatattggatttatatgtctttggacatcctaggattgttgcaatacgtcaatgcaatttgtgcattattttgtagtcgttttacttttagccttttccctcattcttgttagttttac

SEQ ID NO: 34714 - DNA, 4524 bp, Zea Mays
ggcctctcctactgttgtgactggtgccacctctcctttcccttcttcctccgtgccccaatccctcttctcccctcgaccagccgagagagcgcccctaccgcagcagctgcagtgctgctctgctctgctctgttctgcccccacttcaccctctcgtctcaccccgcctgcagcttggtcgcttttctccccagtctcctcccctccaccctctcgtctcgtcgcacctcacctgcttggtcgcttttctcccccaatctcctcgtctcccgccggcaccaataccatcctctgtccgctcgctgttgctgttgctattcccgtccgtcccgtgcttctactcgctagtcgtttcgtattcgtatcctctctcctcagccgccctgctcccctcccgtcctctggtgtctggtcaaaccagcggctcccaagatttgccgctgcttccttcctggagaaatcaagcctgtgcggcgagaaatcaagaggaagggggaagagagggagaaagagagaggggcgggggtggaggaaagaaagcctgccccttgcggacgtgcctgctccctcgggggcattcaattggagccaacagtgggcgggtgggcggctgctacagcacggcggcctccataaattagctccccgcgttccggccccttccgccccctgtcgtcgcacccgccccgtgtctcccccgatcggtccgtcgatcacgcggacgcccgccggagcatgcgcgccgcgggcctcggccgccggagaagcagcatcagccgccgcgccgccgccggcgtccggaaggagatgtagcgctagctccccgacccgcgaggaaagggaaaggggaatgaccgttacggcgcgcgggaggagcggtggagccgggatgggggagaagggcggcgctcccgggctcggcttcctgagcctcgatcggatgcgcgtcctcctgccgccgctccgcctgccggagaagctgtcggccaggacgctgcggacgcacctcttcactaactaccggatgcgcaaggtgcgggacagctccagctggctcatcccgctctgggtcagctcttgggtcctcgtcgcctccctcatctacctttgcatgagctaccaggccgtcggcaagcgccgggagtctctcgccagcatgtgcgacgagcgcgcgcgcatgctccaggaccaatttaacgtcagcatgaaccacctccaggcgctcgccatcctcgtctccaccttccaccactccaagacaccctccgccatcgaccagaaaacgttcgcgaggtatgcggagaggacggcgttcgagcggccgctgacgagcggggtcgcgtacggggtgcgggtcacgcacgccgagcgggagcagtttgagcgccagcagggatggagcatcaagaagatgtactcctccaagaccaagaatcagtcgcagggacccgggaacgccgaggacgccgaggtgcgggagccggcggaggagtatgctcccgtaatcttcgcgcaggacgcctacaagcacgtcatctccttcgacttgctatccggcgccgatgaccgggacaacgtactccgagctagagaatctgggaagggtgttcttactgctcctttcaagctgctcaataatcgccttggagtgatcttcacctatgctgtgtacaagtatgagcttcctgcaaatgccaggccacaggagcgcattcaggctgctataggctatttaggtggcatatttgatattgaagctcttgttgataagttgcttcaccagctcgcgggcaagcaatccatcatggtgaacgtttacgatactactaatgagagaccaatcagtatgtatggttcgaatgatacaggcagtggcatgtgccaggtcagcacactgaacttcggtgacccttcaaggaagcatgtgatgcactgcaggttcattcagagcccaccttggccttggatggcaataacgacatcaattggaactctagtgattgctttactgattggatacatagttcatgctaccgcaaaacggattgccagagttgaagatgactttcaggagatgagtttgctcaagaagcgcgcagaggatgcagatattgccaagtcacagttcttggctactgtttctcatgagatcagaactccaatgaatggtgtcctagggatgctccaaatgctcatggatactgatttggacacaacacaacaagactatgttagaaccgcacaagccagtggcaaaactctggtatccctcatcaatgaggttcttgatcaggcaaagatcgagtctggtaaacttgagcttgaggtggtaccctttgatcttagaacagtttgtgatgacattttgtctctcttctgtgggaaagcacaggagaaaggactggagttggcagtgtttgtttctgatcaagttccacaaacactaattggcgatcctggaagaataaggcaaatcattacaaatcttgttggaaactctataaaattcacagagaagggtcatatctacttgacggttcatgtcgttgaagagattatgcattgtctggaggttgagacgggaactcagtatacaaataccttaagtggctacccagtggcgaacaggaagcgcagttgggaaaactttcgactttttagtagggaactgaactcatccgagatgccttttgcacccattgcatcagactcaataagcttgatgatatcagttgaagatacgggtgctggaatcccgttcgatgctcaatcccgtgtcttcacccctttcatgcaagtaggtccatccatcgctcgcatacacgggggcactggcattggattaagcatcagcaaatgcttggttggcctcatgaagggagagatcggattttcaagtaaaccccaagttggttctactttcaccttcactgcagtgcttacgagggtccattccagcagaaatgagaataaatcatcagaatttaaagagatcaatgcattggtggtagatcatagaccggtccgtgccaaggttactaagtatcatttgcaaagactgggagttcagactgaattgacaactgacctagatcagtatatttctaaaaataattgtggatcacagattgcaaagcttgtgctcattgacaaagaaacctggctgaaagaatcccactccatgcctcttttggttactaaattgaggaacaaagatcagccagactctacaaagttatttcttttggagaaccctaaaagttctgtcaagagcaattcacatatattcagggaatataacttgaatgtaattatgaagccacttcgtgcaagcatgcttcaggtttcgctacaaagagcattgggtgggatagataaactgcattgcaggaatggagtagtcggcaattcaacactgggcagccttcttcacaagaagcgaatcatagtggttgatgataatattgtaaatctcaaggttgctgcaggcgctctaaagaaatatggcgcggaagtaacttgtgctgacagtgggaaggaagcaatcacactgctgaaacctcctcacaattttgatgcttgtttcatggacatacagatgcctgaaatggatggatttgaagccacaaaaaggattagagtgatggaaagagatctaaatgagcaaatagaacgtggagaagccccaccagaatgcgtaggggttcggcagtggcgaactccaatattagccatgacagcagatgttatccaggcgacacatgaacaatgcttgaaatctgaaatggacggttatgtttccaagccattcgagggcgagcaattgtacagagaagtagctcgctttttcctaaatcaagaccaagttcagtaggtaggcttatatggagtgtaaaatagtggaggatatcagggttcacccatcgaggctgaaagaattttgtcagagatcccatgttcttgagagtgggcatcaatccccagagttaggggccctattaaaacgctagcaacgctgggatgtggcctccagtggaaaacactttaggctggagatggaaccacctatgttcggttccttggtacatctgaccaagctgcaaaactaaatgtgcaatgtcttgaaatcaaggtgcatgtggagctatttactcgacaatctgaggtcaaggcgtgtgaaaaaaaagcccagctgcattcactaaccgcagatgtcctctgccactacaatatagagtagggagagaaattttccttccccagaaggtaccggctgtacatattaggtattggttgtttgtgcaggcatttgttggcattttgttgtgcatcgtcttcggtctgtattgtttgggtcgaagctgtaaaatgtaaatggcgttttcaaagatggaagttttgtttgacaaatacatcggtcgtcatcagcttgtcttcctgagtttctctcctgctactggttctctcccaaccagccaatcactatactgaaggctgcctgttggtgtggctttatctgat

SEQ ID NO: 34715 - DNA, 2603 bp, Zea Mays
cctagacacgctgtcgggatcaaaacaaggcagaatcgggccctttccaggcccagccaaattttcgttcacctggcttcacccacccgcgtgccctcgccgacaactgagccaccgccgccgccgccctacccccaggtgcccaggtcgtttcggtccctttgccaggtcttcgccggcgacgagcaccagccaccagccagggaatataactttgacctgtaaaatgaggccagttttttgcgggaaccttgactatgatgttcgcatctctgaggtcgagcgccttttcgggaagtatggaagggtggaacgagtggatctgaagacaggttagttcgttactatgttctcaaactttatgatctattttagcaaaacgacaattgctgctacatctatatgttgtttttagtcaaaggcagtgctttatttcatcaagtgaattacaaccagtcatcaactgcagctttggaccattttgtttctttgatttagatactgaagcattactgaatatattcataagacaatgccatctgaaaacataacatggcctttgtttaaattttgattttgaccatttcatatggaatattggtttgatcacaaatacatgatcttcgcataactcctctaagaatgtgatcttcacgtggaaactgctatcgccatgacttggcagagattgtcgatcttccttcagccatgcttggtgttagaagcgacaaacagaccaagttgttcatccgatgtcgaagccagaggagtttcaggaaaatcggcttatgtttatgttttattgttatgtcattggacgagtgtgtatcaggataaatttagaaaaaagaaatttttccttaaaatttggtcatgtactcaattatttctttgccgcaggaatatcatggagcatatgtgctcttcctggttgatggactggttctacctttactgcctctgcctgagcccccacctcatgcctggtccatctccaggagttcactgtccaccacggcatctgtgcacatggaaacgaccacctcgtgaccgatgtcttacttttacgatcaacactgcatcctcgtaccctgcctgatcaccattccttcgccaatccaaccatgccaatctcatgtctggctggagagtggagataagtggaggttgcaccaccaattccttgatgtaccatgaatgtttggattgttgtattctgaaatcatttagttcaacatatacaaggtctgttcctgtttattctagcatatctgactgtagatttgcgaggcggccttagaaaaatttcctgcaaaggctgcatctcgattcatgttgttgccctttctgttcccgggaccatactatgatttctttgaacaatcagtcacttctcttttcaccttgtgttcaacatgaagggtttgcattcatctacatggaagacgaacgtgacgctgaagatgctatcagtagacttgatggaattgattttggcagaaaaggaaggagaatcaaagttgagtggaccaaggaggatcgcactgctgatcgaagaggcaactcaaggaggtctccaaccaatgcaaaaccgaccaaaaccttgttcgtgatcaactttgacccgatcaacacgagaattcgagatctggagaggcactttgataaatatggcagggtcgcgaatgtaaggatcaaaaagaacttcgcctttatacagtttgaggcgcaggaggatgctactagagcattggagggtgctaatgggagccatttcatggacagggtcatctcagttgagtatgcgctccgtgacgacgatgaaaaaggtgaaagggcgacgaacggatacagcccagacaggagaggccgcgaaagatccccaggtgcaagacggtctcctagtccttacggcagaggtcgggagagaggtagcccagactatgggagaggcaaggagaggggcagcccagactacggcaggggaggccgcagccctgataatggcaggggaggccgcccagccggcggtggcggcggcggcagaggtgatcacgccaggggaggaggacgacgacgcagccctgactattatgaccgcgagcgccgagaagctagtcctggctatgacaggccccccagctgctcacctggaactgggagggacgcgagagactagaaaagcgccccatgcctgtgttgtagaattcaagcatcaaagcctcccgcgtcagatgaagttagagttggtgatgttagccagcaggaaactcgtttacttatgtgcgttagctcgtgctgactttgcaagttagcttaccatttcccatttgcgactccagaatgtaactcgtatggtctggaatggtagctttcaggactcgtttgaacctttcttggagtttttttcttcttttccggctaccttgattgccctgtgcatgcgctgatgaatctacagattgtttcgtctgtcaagtgttccgctgtaatgtaagagacgaaattatttgttccttgttgatgtagtccctgttttgtgcagcgagaaatttcagtatcttacgctcagtatgcgcgcctctccagatctgacacctaat

SEQ ID NO: 34716 - DNA, 821 bp, Zea Mays
atggaccaatggggtagcgaaacgcgtcctgacaatttgttccgatcctcttatggttacgacccgcctgccgtccgctgccacacagcagcggagttagtgactacgcaatcggtcgagctcgtcgtgaggctcttccgctcttggtcggtggtgctgtttcgcgtcctgggaaaaatggatgcggaggcggcgagaaggaagcaggtggcgcctccgcaggagaagaggaagcgcggccggctggagctgcggcggatccaggaccggacgagccggcaggtgcgcttctccaagcgccggagcgggctgttcaagaaggcccacgagctctccgtgctgtgcgacgccgaggtcgcgatggtcgtcttctcccccgccggccgcctctatcactacgcctccctaggcaccagcttttgactcgatcgatatggataaactggattttcgtcgagagccgtgcgggagcagtagtttactacttgctgtggctgccactgcaagaacacaccgcagccgcagcagctgcaccgaggcgagcagttttagaccgtcaacaagcacgtgctcatttggtggatccatatatagactagtatatatgaacaagtacgagattaaggttttatacatctatttagaggcatatatatagatataaatattaactagcaaaagtgtcccatgcattgtaacagactctaaatagtatagaaacaggacttcatatcgatgtaaataaattattctaactcgtatgaatacggatcatgagtccggtatatgagacatgaaaggcgtgacccaattgaaatcgg

SEQ ID NO: 34717 - DNA, 2954 bp, Zea Mays
cctaggtttgctcgcgtaccctccccggtctatatgttgcctcggtctagaaatcgacgcgttcttctcgcttctcgtctacatctaagcatgcctacacctgcggtttccagatagggtgtttggtacgatcgagcaacggtgaatctcgctctgttatttgtttgttcgaaacgcgtggttttgtttttgagatgatgtgcaggttccgatctgattggtttgattgatgagtggcgaatcggattgaagcgagacgaggctgcatggtttccgtgctccgaggcttctgatctgcgtgtttgctccgagactattggtgcctgacccggcaaattgcaatctgccgaccttcagagccgggtcgttctggcgagatctagacgtcgaagggctattaaagcgtggctggatctctttctgcaccgcgcctctcgatgatgtctctgtgttgataattattggatgaaatttcgataattattagatctgagagatgttggtcggagcgatccgcgcctaaatggcaaggtaagttaaacacatgtaactacagagttgcgtgtgtgaagtcaaaagagggggaaagatactgagaagggaggaaaaaatatgaaagaagtgaggtgtgacatcttgaaggcctttgccattgtgggtgcgctcgcatggcaggccaccataataaagatgctggttttgtgtgctgggtgggagatcgcacggggagttttcatccctgggttctgccacccttttgtgtccctgtgccctgcttacgattcatcacggcgtgtttcaaatgaatggagctacagcgcaacacaaagatttggagctttacgatgaaatcatccttttgcaagcatgcaattgtcacacagacggaccccaaagaatattgaatatgtcataatcagtgggggccagaataaaatagaagattttgatgttgagtctacagagacgggattgaggagttgaggacaggacacatgagatttctggtgactgcattctttgattgcaaaaaaatatctacagttttggttcaagaagaacaaaacaaagtaccaaatctgcatgctccaagagtgttagatagcagcaaagtctctaacaaaaatgaacagcggacaatgatccgactgatggctcaacgggacgcgacgaaaaaggctgcacgcaccgtgccagggatggagattgtcacgctgttcgtaccgtcgcacagtgttttcgcccatagacaacctacgcccaagcgttcgagacttcgggggtggatcccgagcttccgcttgctacggagcagagagccacgacaggggtggatcccgagcttccgcttgctgcggagcagagagccacggcagagcgagctcaacaagagggcccctatcatgccttttgatggaagctatcctccatattgtgctgctaatataacatctagatattttttactgtaagaaccctcagtgtagtctccaagcgaacactggagatggctacctgaacttatgatgagaatcaagaatgtttgagtgcagtggagcatgattctctattttgtgctgtgacaactgtcaattatggtgaagcaaagttttctttagtaactcgtcttttggtcgatatattgtattgctaccataaacttgttaaaatattttacatgttgttaagaaatggattgtgttcatcaacctttttggtactcttagcctgttcagttcaaaaaccaatacacaaatttcctatattctctagcatttgtttactttgttagggaatggttgcctctcccaaacattattcgttctatatcaagctttagagttcaagttcacaaacagtcatgacgtatgcattggactgtcccattgatctaaaattcatactactctctgtttctgcttattatataaactgtctaatttactatacattagcttctatcttcggtcactatagggcgcccgacgggcccctcatgttctagttcactaaatggatcggaaactttgctgtctgaaggtatatatatgattattaataacacaatttttacttgtcttgttgctttctgaataccgctgatagcagccatttgttactgatactattcatcaaggcgcgtagaaaattgcttgtgcaatttgatttcgtatttgacagcacaattctatcttatataagaattaaattatttaaaaaatggttttagattttgatcagcgaagtgtagatacgctattagtcatgtatgtctcttaactgtggatcttgtctcaacacggtgaggttctctctggactgttcgttacagtcctggacggaaggtggttcgattccaccaagatcctgtagtccttatttaaataaatacacaagataatataccatcagaggtttgaggaattcagacacatgatgtgcttggaagaattcttagacgtgggttcttggatgttgaagtagattaaagaagaaaacttggagagctagaagcatgttgctcgtccaacaagacaaacaagataagtgcatcatttaaagacaacaatcaagaagacgattgaggtctcttcaagtgaagatgaatcaagcttcaaagttgaggacgagttagacttgttcatgacgaaattcaagaagcacttgaagaaggaagatcttcaattatcaagaagccattttctagacctgttgtatcagaatagtttgtgtgcatctattttggatgtgaacaatgttttttttctattgcaaaaaggtcctaagtattgttttctatttaagaaaaagaataagcttaaaagtaggggtagaaatagtctaaatattttctgaccgtatgattcatattcatttacaagagttcaactgtttcagtatgtttgtatcctgagtccagatattcaatattcgatactgaagacatagttaac

SEQ ID NO: 34718 - DNA, 2152 bp, Zea Mays
aagactttacccccacgtctgcaaccctagcgagccgccgcccgccgcagttcgactttagtcggtctgagtcctgcagcccctggcgccgctatgtacctgacctcgtgtagtcgcttggcccagccgtcgaaaagttccgttgctctgccggagtcgggagagtcgatgtacgccgccgcccgcgtggaggtggaagcggatcggaagaaggaaaaggtggatgagacggagaggatggcaagggagaagaaaaatacacatgaaaaggagcagattcgcaaggtggtgatggggaagcggaagcggaacgaggatgagttggggatggaagagaagcagatgatcgcggagaaagagaaagaggagaaggtgaagaagggcaatggaggaggaattctgactaccaaacttttctcagagctctacatatccgagctcactgccaaggcgatcagagagatgaactacagccacctcaccgagattcaagctagatcaataccgcatcttatgctaggaaatgatgtgctgggttcagccaaaacaggatcagggaagacccttgccttccttataccagccattgaactgctgcacaaagcgtccttcatgccaaggaacgggactggagttattgtagtttgcccaacaagggagcttgctatgcagacacacaatgttgccaaagaattaatgaagtatcattcacagactcttggttatgtaattggtggcactaacatgagaaatgatgccaatcagcttctgaaagggatcaatctcttagttgcaactccaggcaggcttctggatcatctgcgaaatactagaagtttcaactacaaacggctacagtgccttataattgatgaagctgatcgcatacttgagcaaaattttgaagaggatatgaaacaaatatttaaacgactccctcaggataggcaaacagttcttttttctgccacacagaatcaaaaggttgttgaatttgcgaattttacgtttgggcaaaatgaagaaagacaaaagaaacttgtttatgttggagttgatgattctaaattaaagcctactgttgagggcttgcagcagggttactgtgtcattcctagcgagaaaaggtttctggttctgtatgctttcctaagaaggatgcagcttaggaaggaggatctgaaggtcatggtgttcttttcatcatgtagctcagtcaaattccatgcagaatttctaaatttcctcgggatagggtgttatgatatccatgggcaacagaagcagcagaagcggactagtacattcttccaatttttgaaggagaaaaatggcatcttattatgcacaaacgtggcagctcgtgggcttgatattcctgatgtggactatattgtgcaatttgatcctccagatgacccaaaggattacattcacagggttggtcgcactgcccgaggtgacaaaggcaaaggaagtgcattattgttcttactaccggaagaattgaagttgcttatttacctgcaggccgccaaaatttctctgactgaatatgttttcagtgaaaagcacgtgccaaaatcgcaatcacaacttgaggacgttgtcggtgggaattacttcttaaaccagtcagcgaaggaagcctacaggtcctaccttttgtcgtacaactcgcattctatgaaagacatttttgatgtccatcaacttgatctcaagttgctgcatccttctgtttcaagaaccctcctaaagtgaatctggacctggacagtagctcatcaaaacatcgaaagatgaggaaagcggacggtgcaaataggcatggaattggtccttcgaccccctacggaaggagcggccgttacggttccaggcagttggcaagattctagaaaggatattacatattgtaggaagataaattccgatgttggaaatagagattctagctaggaaggatattagtaggaagataagttccgatgttggaaatcgtcatctaatttttttttatttagacgatcaggaatttttatagctttagggctcgttcggttattcccaaaacatatggattggataggattggaaaaaattgagaaggagtttgacttgtttgggattcaaacccatccaatcccgc

SEQ ID NO: 34719 - DNA, 2284 bp, Zea Mays
aacacacttacatcctccacaacgatcaccccaatccattctctcctcacacgggcgcgacccaaaaccccattcatcccctcctccggtctcgactgccatggccgccgggcgggccttccttggcgcgccgtgctcctccctcgccgccggcgcccgttgccttgccttcgcttcccctttgccccggaacctcacccccgcgctccgctgcggcgttcgcggtcgctgcatcgcctccgcctcctcgtcccctgactcgccccccttgccggagccctacgtgctcaccactcctctctactacgtcaacgctccgccgcatatgggaagcgcctacaccaccatcgcagcggacgccatcgcccgcttccagaggttgctagagaagaatgttatatttattaccggaacagatgaacacggtgagaaaatatctgcttccgcagaggccagtggtagaaacccaaaggagcattgtgatgcaatttcaagttcatataggacgctctgggctgacttagacatagaatatgacaagtttattcgcacaacggatcgtaagcatgaggctgttgtgaacgaattctattccagagtgttaaacaatggcgacatatatagagctgattatgaaggactttattgtgtgagctgtgaagagtacaaggatgaaaaagagctattggagaacaattgttgccctgtgcatctgaagccttgtgttgaaagaaaagaagataactatttctttgccttgtcaaagtaccaacataaattggaagagctactgacaagaaatcctgattttgtaaggccatcatatcgcttgaacgagcttgtaggtccaaggctggattaaaagcggattaagggacttttctatttctcgtgcatctgtagaatggggcattccggtgccaaacgataccaagcagacaatatatgtgtggtttgatgctctattagggtatatttcagcattactagatgatggtgagcaggcaagtttgcagcaagctgttgatcatggttggccagcctcactgcacttgattggaaaggacatattacggtttcatgcagtttattggccagccatgttaatgtcagcaggtttaagtgttcctgatacagtttttggtcatggattcttgactaaggatggcatgaagatgggaaagtcactaggcaacacacttgaaccaaaagatctggtagaaagatttggtgctgatgctgttaggtatttcttcttgcgggaagtagaatttggcaatgatggggactattcagaagaacgctttatcaatatagtgaatgctcatcttgctaatacaattggaaacctccttaatcgtacacttgggctactaaaaaagaactgtaaatccgtactagcttttgattcaattgctgccgcagatggaggtttgttcagaaataagatagaaaatctggtggacaaggcaaaacaccaatatgaaaatcttttactgtcatcagcatgtgaaactgttttagagattggtgatcttggaaacttgtacatcgatgagcaagcaccatggtcctgttttaagcaagggggtgagagtgctgaaaaggctgcaaaggatctcgtacttattttagagacaatgaggataattgcaatcacactatctcctatcactccaagcctttctctgaggatttacacacagcttggtttcacagaagaccagtttagggtgttgagatgggaggatacgaaatggggaggccttaaagcaggccaggtaatgtcggagccaaagccagtatttgcaaggatagaaaccgaggtggaagaggaagcccaaacaagttcaaaagcagcaaaaggtgggaagaaagcacgcaggaaaggacttgtggaggcatagtttctgttggaacagtgtatcagcatcgttaaaaggagaatatttcatcttctcttttttttggaaaaaaatctttagcctatctgttcctgaaatttgttctttgctaacgtgtcacattgtatcatgtagatagccaaaaaaagaccactattgattctgatgctctgtcagagagagagctaggataattgcgagtagagctagcagcggatttggatcatccaaaatctaattggatatttgttgttttggataaggtggagagcaacttaaaaaaacccaatgtccattagatatctttggacttgacttgtttctaatgtttggagacatgctgatttttatgaactaataacacagtagctggttgttat

SEQ ID NO: 34720 - DNA, 6047 bp, Zea Mays
cgccggtgccaccgctgcccagccagatggacggcgtcactctgcgccacctgctccgccccttcgccgcgcaggaggccgcggcggccggccgagtggcagcagcgccagagcagctgttcgcaagtcattcgaccctgcaatccgggccgcctccgagagtggggccgagcaatgagttgcttactcaagttccggggaactattgcactttcgatcttgcgccggacctcactcgggcaaatgcgagcaatgctgctggtaccattgattttactcgggctggtccctccagcagtgctgccactctgcccaagtatccgagacatggattgccagctagcagtagcaatgagcagtcctcttttggagcgcttttcccgaacagaagtgctaatggaatgggtatttttacttgtcaaagttcggctaacgaaggaatagcaaatgttggtgtgcagtttcaggactcaagtgtccatggactgcagaaattgccattcaaatcgatgactcatcagcatcctacactgcctggtgatcgaatccgtgtcacctgtatgaatgttggcggagagttttttgtgggcgaagctgggctttttggagttatctgcttgtgtcatcggttgcgaatgtctgtagctaaattctgcgagcatgctggaggaattccagaaaaagctggtgaaattgtctgcttggagaatggcatgagtattgcacaatggttcaaattctgcatagggctttttctttgtcggaggatctattgctaacaccaggtgggattggccggaatgggcacatatgaaaagttctccagaagagcacatattgaaaagtcttgcatcaagaaacagtggaacaggaaaaatggggttgttaagtagatatggaaaaatcactggacatatgaacaaaccggcttattccaatgatctgtccgttgagggtggagggcacactaatgttgagaagctagtaaacaggacagatgaaacatattacagaaagagtgttgatgtgcatgaaacttttacaaagaactctgctttacttcagaattccgctgtggtgaatttagggcccgctaaaaaccatccagttcatgcattcgacttgaacccacttaccactcctagtggaagcccacactttgaagcaagcatgggaagacattacaatggaaatcatttggcccatagtcatggaatccatttggagaaaaactttgatgcgtcattttgtaatcctatgccacgttttacaggagttatgaaccatgatagtagggcgtgcagaccaaatttctccaataaaacattccaggacacttcaacgatgattgaatttcagaaaccccaaacacataggcctccgataaatcaaaatccttctccaaagcaagcaacaaagatcagcaaaagtctatccgaacataatgaaccatccattagtaccggaaataagaagcaaccacttgaagttgttaatggcatgaagcgttctgaaggtgatgagcttacagatgatacatccaagaattcatttatctcattatttctttcacaccttgagaggaataatacacccgaacccatcgatgacattctcaacagtaatgagcactatcttcctaaggccctggatgttgcatgtggttctgatcatccagaaagtgccactagacagattgaaacaagggtgcctaatgataagcactcaaagttggcctcagccattgttcatacgaaaaggagatcagagggcatttctctttcagtggcttcttctggatataatcctcaagatgcatcccatgctaatagtcaggaacacttgattcatggtgattccttgtcacatttgctgcctagtcaacctaacaccggaatctcgaaaatttctgcaagggtttcatgtcatgcaaattgcatgagctgcattcacgtgggtaataaatcccatcaggttgcacatggtgagattggggttccctgtttctatgataaaatggccaggggccatggtacttttgagcgagttgatgactgcacacatagaagtttgagagctttcacaaaaatcagttgcgataatgggaaatcttgttgttcttctcgtgagcttctacctagcttttgccaaaatgatcagccaacattgggaaaatcgatttgtggatgctgttgcaaaattcaggaagatgcttccaagcttggttttatacctggtcacatgtgcagaactcatttttctagtgatgttggtccagttctagccaataagcctactattgaagggctagatgaattttgtgcttgcagttgctccacttttacacaacgatcatcattatgttctcgggaatacgtcttgcagtcttcctgtgactcatgtcccattaatggactgcactgcagaagttgtatgggacatgcagcagatagcttaacaaaacactctctgtttgatcctcttaatacaaaagaacgaggttcttgttgcaatggaagatgctgctactctgtagtcccaaaatgtttgtctagttgtgactttacaaaacactgtgatgtcataattgaccaaataggtcatgctgcacctaaagataaccatcagctgcaaatgcctaccagatgctgcacactgggggagaatgagaagttaatatgccaatgcttaagcaataaaatagctgtaagaaacttgcctcaaacttctcattgtaaagatgtctctgagaaagtaatgaaccagccttctattgctataacggagagactggagaatgtatcagaaccttcagtggctgatgacagttcatccaaagctgtagcagagaaaaaggatgcttatagagattctgcagtatctaaaggacagccaaattttggtttctcatctgggtcgtccagcattatagtgacaaagttccagaaatcacctgaatttaacaatgtatcctctactgctaaacatagcaaacataaaaatctgtgtgatgaaggatcaagaattgagaaaagttcagcatccagctatgtgcctaccagtacaggatgtgaagaacccctaaatagttctgccaaatctgagctgggtccatcaagagtgaagcgcaaatgtaatcagatttctgagggaaggagactggaagaaacagataatgaggaacattgttctgaactgctaaaaaagactagaacactgaggtgctctgttaaaggttctgaatcagatgattgtactagggctagttcccagtcgtcccagaagggggtttatcaaccacaaaatgaggttaactcattttcttgcagggtgttgagaaccaagcgaaaacatcctattatgcatctaaataagcatgtgaaacagcttcacagacagaccaagttttttgaaggtgatgagcaaccagatgccaagggcaattttcttggtggattagattcctatgatagaaagaggcaagtagaggatatgagcactctggataaaacaagacatcaccaggaagggagtcgagcatttgtccgcaaacttcctaaatatgtgtctctgaattgcattgttaatgaaccgaatactaacagtgaaggtgcttgcagtgggagtggtgggattgattctagtttaattgctacagggattacaaacgataacaggaaatctcccaaaattgttcctctcaatctggttcttaaaaaggctaagagatgcaatgctgttaaactccgtaagacagaaagcacccacttgtatgaggagaaaagctcagattgttctgtgaacagctcagattattctatagaaaagtattccgttgatgatgaaaattgcagcccacaagctgaatatgaactgcaggattccaaaaggagtaggtattcatctaatgatctgaggtcacatgtggctctccacaaaagaacatctggtggaaccaagaatcgaagaacaagtgtatcccttgccaggattaagaaattcgggagcaaatcagtatgctattctggcagtgacaaagacaatgctgtgctagcccatgaagtgaatgctaggagatacagtggaagactcagctcaaattctccatgctgtgtttgtgggatctcagacctggagccttgcaatcgattaatagagtgcagcaagtgctatatcaaagtgcaccaagcctgctatggtgtactaaaagttcctaggggtcaatggttttgcagaccgtgcaagaataataccatggatacagtctgtgtgctgtgtggttatggaggtggagctatgacaagggcactgaaaaccaagaatattttgaaaagtttgctccaaggtttgatgaatttagaaaggtcagaatattatgttgattccttaggaaatgcaagcagtgagtgtacaagtaagtagttacatggggaacgtgtcgaacatatcttattttgtgcttccaaatcaacaagctttgaacattttatctgcaacaggcttgcaaaatccagtagacagtgcacatggggataacattatgaatgcgaagaacatcaccagcaattcctggacctctggaaaatactattcgagtttacttggaccacaaccaatgcagtgggttcacatggtctgtgggctgtggacacctggcacaaaatgcccaaatgacaccacaatgagcgcttttgatgtttcaggtgcttcacctgccaagagaaatactgcatgttcaatatgtgacagaactgggggctcatttgtcaagtgccgagctgtaaattgtttggtattctttcatgcttggtgtgcacatcagaggggtttgctgcaaagtgagcctgaaggcgagcacaatgaaaatattggcttttatgggcgatgcgtgtctcacgccattgttttttctagtcacgttaatcctaagaaagaatactttagaaacaacaattggacatgtgcacgtacagagggttttaaaggccgaaagggagaaggcttttctgatagtagccataaaaaatatgaagagtacagtggcgagttcggtgtttcccaagaacagataaatgcttggttacgcataaatggttcaaagccctgcggacgaggacagaaggagtacatccattacaagcagttaaaagggtggaagcatttggttgtttacaaatctggcatacatggacttggtctctacacatcagtctttattccacgcggctctatggttgtagaatatgtgggtgaaattgttgggcaacgggttgctgacagaagagagatcgaataccagtccgggaaacggcaacaatataagagtgcatgttatttctttaagattgacagggagcatattattgatgccacccgcaaaggtgggattgcaagattcgtcaatcattcatgccagccaaactgcgttgcgaaaataatctcagtcaggaatgagaagaaggtaatgttctttgcagaacggcacataaacccaggggaggaaattacgtacgattaccacttcaaccgggaagatgaaggccagaggatcctttgcttttgtagatcaagatactgcaggcggtacctcaattagtttccggtgggcgtaacatgtctatatataacttatatatctatatgtatatcttatatatttacaaattacaattgcgattcatgcctgctgtatatgtaggaacttgcatctagaactgcctgtttatcttttgtgaagtcaaatgagttatcagctgttcatgtgacactgaataacaaaagcataaaaagtgtcactatctcgtttatgagaaatcatgcgcctaatctgaatgatggatgatccagtgatctactttggcaagaagggcttgaggtcagacttgtccacctgaagctttgttgagatggcctcgatctgctgattcctgcaaatccaagagccatccatctttgggaaacagaatatataaaaaaaaatgaccaataacagagttctttctttgtgttttccaccaggaccttcacttcagtaattccagatgaaa

SEQ ID NO: 34721 - DNA, 2144 bp, Zea Mays
gcggcctgcggctctctctctcctgccccatgttcatgttctttgcttgctcctccgccatggattaggctaggctaggccatcaaggacgttctagcgcgcttctgcggcaggatcaggaggctggtggtcgccggcgcagcgtctgcggggcggcgtccgagggtgactctgcaaggactccccggtggccccgaggcgttcgagctcgtcgcgaggttctgctacaccgacgacggcggacggggcggggcggtgacggcgggcaacgcgtgcgtgctgcggtgcgcggcggagttcctggacatggcggcggcggacgtggccgcggccgaggccgaggccgaggccgcgccgagcctggtgcggatgacggagaaggcgctggaggagatgccgcactggccgtggcacacggtcgtggacgccgtgaagcagtgccagcgcctggtcccgctcgcggactccaccggcgcgttcgacgcggccgtggcggcgctggtgtcccagatggccgtgcccccgccggccggggacgccacgcccacgggctcctcgccggagagcaccgcgttccggttctcgtgcgacaccaagagcagcagcctcagcctgcgcggcgggtcctgcgtcagccgcacctggtggttcgaggacctcgtcgcgctcggccctgccacggtggagcgcgtcgcctcggcgctcgtggccaggggcgccgaccacggcgtcgtcgcccggttcctcttctactacctaaagtgccgcgtcgccggtgcgagcgccgaggagaagaaggcgatgctgcaggcctcggtcgccgtcatggcgaagctggaccgaagcgccgtctcctgcaagggcctcttcggcatcctgaggatcgccgcgccgctgaggctggccgacgcgtgccaggagcggctcgtggccatgatcggccgcaagctggaccacgcgacgctcgataacctgctcgtcccggcgccgcccgggacgggcagcctgtacgacgtgagcctggtgctgaggttcttggccgcgttcctccgcggcggcgccagtgacgagccggcgaggctgaagaaggtgggcaagctcgtggacctgtacctggccgaggtcgctccggacccgtcccttcgcccggccaagttcctggagctcgccaccgcgctgccggctcacgcgagggactgccacgacgcgctgtatcgcgccatcgacgtctatttccaggttcacggccgcctgacggacgaggagaagatgaagatctgcagggggctgagctacgagaagctgtcgcccgagagctgcaagcacctggcgcggaacggcgagttcccgacgagggcggcggtgcaggcgctggcgtcgcagcacacggtgctgaagagcatcgtgctgcgcgagcccgcgggccagctgaagcccgtgtcgctgtcccctcccccgtccacgggtaagcaccgcgacgtcggcggcggcgagaacgacgagggtcaggtggtcctgtacgcggggcggctggacctgtcgctggagaaccagaacctgcggtcgctcctggacgggatgcactggcgggtgatggagctggagaaggtgtgtagccggatgaagacgcagatgagcaagatgaagcagcccaggcgcggaggcggtggcggccgcgccggcaggtcgtcgctccccaggatgtgctcctgatccaccacctcgcctcctcgcgctgccgttattagcgcgcgctttagcggtgaccccgcaacactgtaccatagcgacgatgtacataccgactgccgtgctaggaggaatcagtgaagcgcggcgcggcgcggtgcaggcggcagagcatcgtcctcctccctgcatcttgtcccttttttttttttgcctagcttcctcccgtgtatgatgatgcgtgtatcggttctcggtggtggcaatttgaaaagaagggctggctagcagcgtcagcctgagctgagtggtcctgctggttgaatggatgtggtctatctgaaataataaaaaaaggggtactgtgtggcatgcttcgtgcctgaagaatctcgcaatgctgctacagcagcttgccaggtcgagcatacagtaactgctcgcattcgcaccag

SEQ ID NO: 34722 - DNA, 2231 bp, Zea Mays
ctgttgttagcaagttgacctcaagcttggcttcagttttttaaaagttttgaagtgaccagttggcaattatgtctattgcaaggagaaaaagcctcctgaatgataaagttttgacttctcttgctgaaagctcctggcaaatcctagatatatctggatctgatgttactgatgctggtttggctactgtagcaaatgtttgtagtaatttacgggcagttgatattagtcgctgtgaaaaaattactactgctggtgtgtctgagattgtatgccactgcccatccttggagatattgagataggctgtccaagaagtgaagtaacggcacggaggtgcttgaatctcttgaaacccaaattgaatgctcttgaagaggactcatgggaggaacttgatacactagatataggaggcggtgcagagtccttaagatggcttgtttggccaatgatagatgataagtcaaaggtgactctagctgtcgaatgccctcgtgttactgtcaacccacagccatcgctgttcgacctctccggatattccaaagtcccaatagaagcattgtcaagcgtaccactggaccattctgtggttgaggacattgatcccaaaacatgggctgtttctgctgctcctccaagagctgttgctccagcgaatccaaatgttccaagtgctccgcctgaaataccgatggcagaaaggttcaggctggcctatgtggagagggaagcgaggctggcacccaagagggccaagcgggaaaggcagcggcgtcggcgcgctgagagggactacatgatggttgacatcgacgcaaggtcggtcgcacttgctgctcaagcaagcaggaacctgcggaagagctgattgtttcttgtctacgctatctgtggagacttgagagtagagaatcatgaggcaagaaatgctgttcaatccttctactttcaaggcaaagatagcatacatatatggacacagtattgtatagttgtattggcagtagcggtagcgtttacactgccatgtactagtaatagaaaaaaatctgagtgggaataacagggaaggcgtgccttatcaaatcacaaatgggttgccacgaggatttgtgaacatgctcgtccagatttctttgaatctggatgatgcggttatgtgaggttcctcacgcaatttgtttaatccgaacaagattcgtgtgaactgttgtatacgtaatttttttcttggaatttgagaatgtgtttggatgcactcgtattcaaactaattcactgaatatgaatgtgtccaactctccaaacaagacctaaattatctaaattatgaattgaggttgatacaagtgcatcaaaacaaggtccaaattagaataaaaatcggagcacaaacgaaatctgtacgcactgggaacaacagttcttagatagttagatttatacgaattctagatccatacaagaagctagcagaaacataaccggatccgtctgcacactatatataatataccatatatgtatctaataacttggcaataatgccaagaatgtcgacgagcaccgagcgcaaaagctaccgctcactcgctcagtgcgcagcgaccacgtccggcgacgccgctggcgcgaacgcgtccatgaacgcctccacgacatccagcggtggggacaggagcaccacggctcgggcggcggccagcttcttccgcaacgggtaccgcatccccctcgtggcggaggcgggcccgaggaagcatggcacgccgtcccaggcggcgggcggcgcgggcgagcgaggaggcgaggagggcggcgcccacgcccgcgcggcacagcggagggagcgggccaggaccctggagtcgcggagccgcgcgagcgcgcccgggcggaggaagcggtgcgggctgccgctgcccgcgagctgctggcgctcgggacggcgcgccggggagcggaggcgtcggtccatggatggctggcgtcggcggatgggcggatcgggagggagattggaattgcgcgcgggtttggggaaacgggaggggggttttgatttttatgaaatcatgagatgagatgatggcgagcgggacgaggggtggacggtggagggaaacgaaaacaaggccgggcccgggcgggaatggaatcggagggtgatttggaaaatggcagggaagcgtaggcgccactccataaatctccagcagttt

SEQ ID NO: 34723 - DNA, 375 bp, Zea Mays
actatacgggattgatttctagtggaggctagtgcggggcggaattttctttgcttgttgattcttgattgttgtagcggtgatggagggtacttcaatgcaataatgagcttcccagaaaattacccaaacagcccgccatcagtcagatttacctctgaaatgtggcatccaaatgtttattcagatgggctggtgtgtatctctattcttcatccacctggtgaagatccaagtggttatgagctcgcaagtgagcgttggacacctgtgcatacagttgaaagcatagttctgagcattatatcaatgctctctagtccaaatgacgagtctgcagcaaacattgaggcagctatatccttcgattgttaa

SEQ ID NO: 34724 - DNA, 5894 bp, Zea Mays
cactttaaaaaaggacatccatgggctccatctcgtcaaaatctgggcggtgaaaccctcaaaccctaatcctttggcccctcaccatggcggacgctgacgacgcgccgccaacgccgcctcctgaggtagtagcccccgaggagcatcccgcggtcgccgaatccgccgttgccgcgcagcaggagggggcagcgacggcccaagtcgataacaagcggaagctcgaggaggctggcgccgacgcggaggcgaacggcaccggcgaggacgccaagcgcccgcgcgtggatggcattgagcagcagaacgatgggtcctccgtgaatgtctccgtgaatgtggaggaacccgcagctgcagaggaggataaggttgctcccaccgatggggcagcgacggatggtgataatgacacggccgctcctgctacggattcgcaggcgggttctgatgacaaaccgcttgaagcagcagctgaagctccacaaccggaaagtgatgcagcagctgttgcccaggagatctctcgtatgatcgaagtacccaacagcagggtcggtgtccttattggaaaagctggtgagacaatcaggaacttgcaaatgagctcgggtgcaaagatccaaatcaccaaggacgccgatgcggactcaaatgccctgactcgtccggttgaactagttggaacccttggaagcgttgataaagcagagctgcttattaagagtgtcatagctgaggctgaggctggcggttcccctgccttaatagctagaggatttggaagtggacagcctgggtcagagcaatttgagatgacagttcctgataacaaggttggtctcattatcggaaaaggtggtgatgcaattaaaggcatgcaaaccaaatctggtgctcgtattcagagggcgttacattgactgaaagaattgtacgtgttactgggaataagaagcagattgaacttgcgaaggatttgatcaagcaagctatgaatcaggtgatgtgatcttcctttgtgcctttttgtagtctatttgtgttttcagttctaagtgttgctagatgctggcatataactactttatgcttttgattgttcattcattctgtgattttgctctgatggttgctgatgatgtgatcatgcttcacgattgattgttcttggttcatgatatggttacttttgtgattgtagatgccaaaatcatgttgtctttaatatttgtgacccaacacaaattaatgacatgcctattgagaacatggccttatttcaatcctattatggaccaattggtttcttagctttgggtttcataatacaccttctttatcattgcatgcaatttgtaccatctttctgatcaagccaagttcgagaattccctgataagctttgctgcttctgtaggtgtcccaagtgtactggtattttttgctataaacaaacacactttgcttttgtactttgttgttcatactatgaatatattgccatctctcttgtgttacggagtgttgggccctttaagatttgttataaactaatcactcctctacaattggccttgtatgaagtatctatcttgatatatagcaatgcctaattgggctggaaggtaagtttttcttcatgtttgagttttcatcttccgatgaaagacaaacgagatgccattgctgtcaagatcaatgatgtaaaatttgtaaatcagattcattacctcaacaaatatttcacttcctttcccttgccaaaatcccttatcctcggtgctagcactgtgaatatggtgtatttttctttctcgtttttactggatcatgcatgcttccattccattacctgtccattggagcaaaattcttgatttatttatttaattaataatatggattattgaagggtcaaaaggagtacatgattatacaattcagaaatgaacttttgagctgtaatacatagcaaatgatatgtctggagatctgggtactgtttagattcttgatcccattagcttgattattcttcgtaggacatacactatgagtaggactttcctcatctatcaccattaacaatgtccatgactataggtttgcaagtgctgtcttaccataccagcggattatcgagttgctagataagagatattattctgtttcctacataagcagtctgaactgacacatcaagttcactcgcttccagtttccgtcaattatttttgttgaaggtgccaattggagttggttgggcatcctaatggagatacagctagctttcttcatgggcgccatcgttcttcaacatttacttgcaccggagagggatattgaccattatcccttacccttgcatggtttatgtagttggtaactggtaaggctgtctattgtcgaaaggaaacagaaactgtatggcattggaagactgcaacaagtgtttcattgccatgacaaggctactacagcaccatgtataggtttgctaaactgaatcgtttgtgactgtatgttgtttgcagaacaaaacttacatatgctatatataaatgattaaggatttacacatcgttacttacatagtgttgtactcttaactagagtttgggttacttagcattattatttttccccattagtaacggttgctattggataatgtgcgatgcagtgcatttaatctcgatactatcgtgttttctattgaggctgtttatgtttatgagatgcatctatatgttaaattctgaagtaacccttctttttattctaaatttcttgttgcaattctcaatgatggttaaccaacaattgatattcctattgtattaatggtgttgcataatgttgtccacagaaatttgtggagattttaagggtttattttcttgaacattgtttcttgaacgatttagtgatcattactggacagtgtttactaagtattgagatatgagctactatgcaggcggatattctcaatgctgttcttatttaactgcattgtgaacagtctgtttcccattgatggattcctattacagttggctttatgtttttctgcggtgtctgttatttacttctctttttggtttcttacatggtttcttgtacagacattttcaaggcatacaaaccagtctggcggatatggtccacaaggttaccgccctcagggtcaaggtgccgcttctcagtggggaccacgttctcagaatcatggctatggatacccacctagaggtatgcctccacctcaaaactacaacacaccctacggcagctacccgccgcagcagggaccaccaagaggtggcatgggctgggaccagaggcagggccctccaccccatccttcgtaccagggtggtgcttctgattactacaagcagggatctcagccatatgatagccagccaccgagctaccctcctgggccagggaattacaacagttatggtcaatcacagggtcctaactatggccaacctcaatacccgcaacatgcgcctcagcagaactacagccatgggtatggtgatcctagatacaatgctccccctccgaaccagcagtactatggtcagccgccaatgggcccgcagcaaggctatcctcaacagccagatccctatgctaggcctccatacagtggacctggtcaatggcctcccaggggtgctccggctgcagatggctcttaccaggcgccagctgcatcttatgggccgccttctcagcacccttctgcttatgggcaaacgtacagtgcagcaactggatctgatggatatgctcaacagggttacccacagcagggtgggcaggcaccagctccatatggtcagagtgcaccagcagctccaggctatcctcagcagcaaggtggctatgcacagtacccacagacccaaccagcatatggtgagcaagcagctcaaaccaatgcgagctatgggtaccagggagctccagcagatcctaactatggaagtgcctacccacagccaggatatggtcctcctggtcaggctactggtcaggctggttatgcctcctcagcagccagccagcctgcgtatggccaggcaggatacacccagccgcctacaaatcctccaggttatgagcagtctgcggcaccagcaacaacccagagcggctatgctgcgcccccagcaaatccacagcagcctgctgcagcaaaaggggtctcgccacagcctggtggtggtgctgctgcatatggtgctggtgggcagtggacagcatgaccctcctcgaacctcaaacatggctcgctggtagcaatatcgtgctcaatatttgcaccttccggatgcatccttggttatcggaagagattgtgtaactccttgattagtgatacttggcatctctgtagtagcacctactagtagttcgttggttaactgtgactataaacatcctaattcctattcacttcgaatcaaacttcgcagcttgccaagtaatttttttggatttgtgtttattcatgtaaaatagttactggtttggctcacagaatgatgattctgtttctgcagttcattcaaatttggttctgatggatgttaaacctagtgatgacaatttaacccgcaaatctgaaattcgataggtgcgtgtatgtgtgaagattttgacccgtggttgcaacccatacctaacctgaagtttcgtgggtgttagatgcgggtttttatttcaacctgtatttgacccgaaattcaacccgtatttgactccaaatttggtttactccttattttgcgcaataatgactaaagatacaatagtaattattttcaattagtgacttggttaatgattcatgaagtgttttgttggtgcttaacgtaaggtttaaatccataaatataactcaattattgctggtatttaaatacttataactaaattattgcttgaaagtgtataatgagtaaaacccacgggtgatcttaaacccactcgaaacctgatggatttggatgtgggtttaaatttgcacccgcgtgtgcgatcgcgggtgagtttaggtagatttcacgagtttgatcgcgaacatggtttttctccaccgactcaaatctgattcattgtcatccctagtcaagccgaacatactatccctagtcaagccgaacatactgttgctcttgcaatgtgagaagcgttatgtacatatggatcgattagcggttgattgcaactatagtaagatcttgtccagtagtttatccatatggtcacctaaaatactgttttgcacctaaaatattgttttgcacggtagaccgcactgttcgcagagtggagtttaaaataggagatcataaggaaactgtaccattgtcgaatagtattctactccctctattttcgaatatttgttagctgctagtttatttttgaactaaaacacgataaataaaaaaactaaggaacatactactaagattgtctcaacgggtaatctaaaataggggtcacaaaattgtagatgacattgtttgatgctgtttgtagagtaaagtttgaaataggagacacgatagggaatctgctagagatagcctaaggtcttgatcggttatttccatgccatatgaattggagggaattggaaaaaaataggaaggattttgatttgttatggatttaagtccatccgatcttctccaatctatatgaattaagataaaaatgaacatatgttgagtgtgggggtgaagtagatggtgagggttcccatgctccaagtagatggtgagggtgaagtagaatgtgggtggtgaccccactccaaattgatggtgagggtgaagttgaagatgtcgatggtgatt

SEQ ID NO: 34725 - DNA, 3319 bp, Zea Mays
gcctcgcctattgttggcacatgtcttcccgcggccgttgtttacgcagaatcctcctgttccactcctcgccaaatgtcttttgttagagttcatatgaaatttctggtcgttcaattttagatcgatttctttacggcgtattttgattgcatcgcgaccggctccggagccatccggtcataagaccgtaccaacgcatttctttggtttgaggtgcgggacggcgggcgccgaacggtcgtgtgccgtagatccaaagtcgcgggaaatctctggtcgaggagtcgatttggatccgtttatcgctagtttggtcgtcgttgatctgaaaggtggagctttggtcgattttctcttccagaagcatttgtgtttctgaggtgctaaggtgctatatctgaagcagccgacgaggagctgagtctttgattttttttttaccaatttctgtcgtcgtttgttgatctgatccgatggaggctatgacgggtggcaaattccttcaaaagtttcggctctacgaaaccagatcgaaattttatcttattggaagagacaagagcaggattcactggagggtgctaaaaattgatcggtcggagttcactgagttgggtgtcgaggaggatccaactatttacacagagaatgaatgccaagaactgcttcggcggatccatgaggggaacaggttgaccggtggactgaaatttgtcacaaaatgttacggaatagttggttttgtaaagtttcttggtccttattacatggttataataaccaggagaaggaaaattggcacaatatgtggccatgaaatttattccgttggcaagagcgaaatgattgcaattccgagtgttacagtctggcccaacatggcttattctagggatgaaaacagatataagcacctgctttgctcagttgatctttcgaaggatttcttcttcagctactcttacaacatcatgcacagccttcagaagaacataaccgagaagaacattgggcaggtttatgaaacaatgtgtgtatggaatgaatttatgacacgagcaattcgggatcatctcatgaatacctgttggactgttgctttagtccatggattttttaagcagtttgagctgtttggggctttcctgagttgaaacctttgctttcaaggttctctgtgtctgggaaggatttttggctgacgcttatagctaggcgctcacgccattttgctgggaccagattcttgaaacgtggtgttaatggaaagggcagggtagccaatgatgttgagactgaacagattgtttttgaagacacatctggtggaatcccaactcagatggcttctgttgtacaacatagaggatcgatacctcttgtctggtttcaggaaacttcaagacttaatattagaccagatattatatgaaaggcaccaatgtgcttgcactgttgagcaaggtggcatcagatgtgttggatctaactgaattcctccactgcgaaataagtacatcaacaaaatctgatgacatctcaagtgaagaaaaaactgttgccaaaccacgtgatgacagaagtagcagagatcaaactgaatgtgcagctaaggcgtcaacttcatgcactgggacttgctgaagcacataaaattgaattgcatgatcctctggttgatgatctgatggatttctatgaacggatgggtgatacattagctattcagtatggtggctctgctgctcacaacaagatcttctgtgagcaaaggggccaatggaaggcaacaacccaatctcaggagttccttcgaacccttcaacgctactacaataacgcctacactgatcacgagaagcaggatgctataaacatgttcttaggtcatttccaacctcagcaagggaaacctgcattgtggaagctggactcagatcagcattacaacattgggaggcaaggaactttaaaagaagagattggaagatcattcataaagaggtcactatcagatggtaacatactgttggagagcagcttgcctgtaactatctgtaacaatgaaacagacaacacagaattgctcccagtgcaacagctggatgatattagagaagcttctgattctgcgccagagatctccatatgcgaacctaacctgtgctccagtatgaactatggcacagtgcctggaagacactccatgtcagaagagcggcagagttatttgaaaagattaggttaccctgaattgcactcttcaaatttctttgaccttgatttgttgtcatcttcaggaaattcgtttgacgaggaagtttttgagaggtcattactgatcaattcacctatggatgtgatcagtcctgaatcatctatgtcatacagtgaacaaggacacactgatgagggaagagatgacacggatctttcccgttctagcagccagctctcagacattcgggactactctgaccactttgcgcagtgggtcgtgaatggagacacgctttgctactaggccctggacttttgtcttggtgacagctcagtagatgtgacacggcaggaaatggaagtctgacggatagagcagatgaaatggctgacgactagccgggctaggtgccgtgcatctacctgcagaggcggcgtagcagaagaggtggtggacatgggagaagtctcgcatcggcatgcttgtggtcactggaaggcttgaacgatgaacgctgatattcgtcggatgcagctttcggtggggtacatgattcaatttgctatggtgaaaattttgaccgtagcttagacaataaataggcaaaatatatctgttcttttagtttagcttaccttgcgtttcccttctccatagaaaagtatcaaaaggaaaaacaatggaaaatctattaggaaaaggaaaaaacaaacaaaccataggtaaagaacacttctgttgtaaatagttagtttgctacagaagtataaatatctggtacttgttgggtttcttggcggtgtctgtttcataattgtttctgtgaaaaagctgaaagaaactcggtatgtcttttaatatgcaccatttttgcttgaggactctccatgacattgcgcagagaggagtgcaagaacttgaatgtctcatgcttctcttgcggtggacatccacgtcgatgacaaaattctagtatatggtacgtagttcattcgaaaggtgcaaggtatccaatttagttttggatatctagagttcacaagatagtacttatctgaaaaatgaaatcaaattaccattgcaaaatataaataa

SEQ ID NO: 34726 - DNA, 2728 bp, Zea Mays
aaactctctgttctctgaccgcaaactgggcttttaattgggttgctgctatttgcatatgagtttaggcactagcagagtgaagtgctcaccaaccgttggatgagaattagatgacatccaggtgaggtaaagtcgaccgtaactttaccagtccgcgccggcggcaacctaccctgctttggctccgggcctccggctgggtggctagcgtgcctctttttgttgtcgtaaaccctctctctctctctcgcgcagtctcgctccctctgtctctctcttagcgacgactgggcggccgtcgctgctggcctgctgccctacgccaggtgcccaagtcttcttcgggctcgtcgtcgtcggcgacgaccaccaccaggtccctgttgtttttaagaaaaacaaaacaatggaggcaacattagcattctcccaggacagcccaccaatttcgataatttgtgcagcaaagtttgtgggtctacccctaaccattgatcctagccttgcttctggcttggcacccaccctacgttttgcttctggagaatcactccatggtgtcaacccaatcctcctgtacattgccagcggtgcaacaattccctgcttctctgggaagaatgatattgagtttgggcatgttgttgaatggcttgaatatgtccccatctttctttcaggctctgaatttgaaaatgcctgcttatttgttgatggattcttggcctcccggacctttctggttggtcatggcctcacaattgctgacattgtagtttggtcaaatcttgctggaattggtcaacgatgggagagtctaaggaaatcaaagaaataccaaaatcttgtccgctggttcaacagcatagattcagaatacagtgacacactgaacgaagttttggctgcatatgttgggaaaagaggaattggaaaatctcctgcaccaagccttaaggaaaaggtacatgtttcaaaggatccatcagctccagaagttgatctccctggtgcaaaagttgggaaagtctgcgttcgttttgccccagaacctagcggttacctccatatcgggcatgcaaaggctgggctattgaacaaatactttgctgaaagatatcaagggcgcctaatagttcgatttgatgatacaaacccttcaaaagaaagtaatgagtttgtcgagaacgttttgaaagatattgagacgttggggatcaaatatgatgctgtcacatacacatctgattatttcccaaagttaatggaaatggctggaagcttgattaaacagggtaaagcatatattgatgacacaccgaaggagcaaatgaggaaagagaggatggatggtattgagtcaaggtgcagaaatagtaccgtggaggaaaatctgtcattatggaacgagatggttaatggaactgaaaggggtatgcagtgctgtgtacggggtaaacttgacatgcaggatcctaacaagtcactcagggatcctgtttactaccgctgtaatattgatcctcaccatcgtgttggttcaaagtacaaggtctatccaacatatgactttgcttgcccatttgttgatgcattggagggggtgacgcatgcccttcggtccagtgaatatcatgacaggaatgcacaatattatcgaatccttcaagacatggggttgaggagagtagaaatttatgaattcagccgattgaatatggtttacactcttctaagcaagcggaagcttctctggtttgtacaaaacaagaaggtcgaagattggactgatccacgttttcctactgtccaagggatagtacgtcgtggcttgaagattgaggcattgatacaatttatactccaacagggtgcttcaaaaaatctgaatctcatggagtgggataaactctggacaatcaacaagaagataattgatccattgtgcgcaaggcatactgctgtgctaaaagaccagcgtgtcatctttactcttacaaatggtccagagaagccatttgttcgaattttaccaaggcataagaaatttgtgggtgctggaaagaaggctacaaccttcgccaacagaatttggttagattatgctgatgcagcagccattagcaagggtgaggaagtaacccttatggattgggggaatgctatcgttaaagagatcaaggtggagagtggagtaattactgaactagttggagaattacatcttgaggggtctgtgaagacaacaaaattgaagatcacatggctagcagatatagaggagctagtccccctctcattggttgaatttgattatctcatcagcaagaaaaagctagaggaagatgatgacttcctcgagaatctcaacccttgcactcgacgagaaaacccagcccttggagatgcaaacatgatgaacctcaagcgtggagagatcatacagctcgagaggaaaggctactataggtcttggcctagagatctttggaaaaggtattacaaagaataagttgttttatgaatggacaatgagaatggttatcacacatgtttttttttgtttctagatctttttttcaatttcttcaagagacatggttggatgagtttttttgtgatggatgcgtagtgtgtgcactgtggcgcttacaacgacccaaacaaatatcgctaagcgcgcgtaatattgtactatgatcatttggcagttgattgtattaac

SEQ ID NO: 34727 - DNA, 5507 bp, Zea Mays
atggcgacgccgctggccgggaagggcccgatcgcggcggcgatcccgcggtccccacccccactggccgagggcggcgcgggagggtcggcggccgaggcgcccgtgctcatcttcgtctacttccacaaggcgatccgcgcggagctggagcggatgcacgccgcggcggtgcgcctcgccatggggcgcgcgggcggggacgtggccacgctcgaggcgcgctgccggttcctcttcaccgtctacaggcaccactgcgacgccgaggacgcggttatttttccagcacttgacattcgagtgaaaaatgtcgcagggacatattctcttgaacataaaggagaaaatgatcttttcgcacatctattcactctgctacagttggatgtgcagaatgataatgctattaggagggaacttgcatcctgtactggagcaattcggacgtttgtatcccaacacatgtccaaggaagaagaacaggtcttcccgttactcatcaagaagttttcacacgaagagcaagcagatttagtatggcagttcttatgtagcatccctgtaaacatgatggcaaaatttcttccatggatttctgcttctgtttctacagatgagaatcaagatattcttgactgcctaagtaaaatagttcctgaagaaaaactcctccaagaggttgttttcacgtggtttggagggaaatcagaaagcagttctacatgtgagtctagctctggccaaacagataaacatgcacattcacttgaacacaccaaaattggaaagaggaagtctatagaatcaagtcagcttgtcactcatccaattgatgagattctgtattggcacaatgctgttctgagagaactgagtgatatagcagaggagactaaaaggatacatcagtctggagatttttctgacatagcaggatttaatatgaggctgcaatttattgcagatgtgtgcattttccacagtattgccgaggatcaagttatattccctgcagtggatggtgaattgtcctttgtgcaggagcatgctgaagaagaacggcgattgaataaatttaggagtttaattgaacaaattcaactagcaggagccaagtcaactgtagttgattttcattcagagttatgctcacaagctgatcaaataatgcagaaaattgagagtcacttcaatgatgaggaaataaaggtacttcctaaagctaggataaagttctcaccggagaaacagagggaacttttatatcagagtctatgtgtcatgccactaaagctgttggagcgtgttctaccatggtttatagtgaaactgaatgatgcagaggcagtgtcttttcttcagaatatgcggttggcagcaccttcctctgaaactgcattggttactcttctctctggctgggcgtgcaaaggtcgtctggaggacacatccaaccctggaaagttcgtatgcatggcatcaggagcggtcacttgtgcgtcagatgggaatggtttcaaaacatgccagtcactctgtccatgttatgtaagtagcaatggagctttttcaaaaccagttaagagagcaagtcaaggagaatctagcacaaatactgacagaaatcatagctcacacaatgctgctactgaagcatcgcaatgtaacaacagagcctgttacattcccaggttaagagtagaaagtagctaccttggtgttcattcatctacccctacaaaatcctttcgccctctgtctttcaattatgttgcaccttcattatattcaagccttttctcatgggacacagatacactagtatccggcccagataacatttctaagccaattgataccatattcaaattccacaaggcaattcgcaaggatttagagtttttggatttggaatctggaaagcttattgacgggaacgagtcttgccttagccaattcattggaaggtttcgtttactgtggggtctatatagagcacacagcaatgctgaagatgagattgtatttcctgctcttgaatcgaaggaggcattgcacaatgttagtcattcatacactcttgatcacaagcaggaagaaaaattgttccaagatatatccactgtactatctgaactttctcaactacatgatggtttgagctatcctcttgatgttgaagctggaacaaatgatatttcaagtaatgagattgattgggctagaaagcgtaatgaacttttgacaaagcttcaaggattatgcaaatctatccgggtcacgttgtcaaatcatgttcatagagaagaacttgagttgtggccattgttcgataaacatttttctgtagacgagcaggataagattatcggtcatataattggaactactggtgctgaggttctgcagtcaatgttaccttgggttacatcagcacttagtttagaggaacagaacatgatgctggatacatggaagcaagcaaccaaaaacaccatgtttgatgaatggctaaatgaatggtggaagggaccttcaacttcatctgacccatcagacaaggcttctactccttcagaagaaagtcattttcaggagaatcttgaacaaaatgaccagatgtttaggcctggttggaaggacattttccgaatgaatcagagtgagctcgaggctgagattcgaaaggtctctcgagattctactcttgatccaaggaggaaggcctatctgatccaaaatctcatgaccagccgttggatagctgctcagcagaaatcaccacaaccaagcgtcgaaggacataatggatgtacacgacgacctggatgtgttgcttcgtaccgagacccagggaaacaaatatttggctgtgagcattacaaaagaaactgcaagcttgttgctgcatgctgcgataagttattcacttgcagattctgtcacgataaagttagtgaccatacaatggacaggaaatcagtgatggagatgatgtgcatgcaatgtctgaatgttcaacctgttggtccaaattgtcaatccccttcttgcaatggactgtccatggccaagtattattgtagcatatgcaagttcttcgatgatgaaaggagtgtctaccattgtcctttttgcaacttgtgtcgccttgggagcggattgggcactgatttttttcattgcatgaagtgcaattgttgccttggcataaagatgatagaacataaatgccgggaaaagatgctagagatgaactgtccaatctgctgcgactttttgtttacatcgagtgcaccagttaaaggccttccttgtggccacttcatgcattcggcttgttttcaggcatatacttgtacccactacacttgtccaatctgctgcaaatccttgggagatatgacggtgtattttggcatgcttgatggtttgctggctgcagaacagcttcctgaggaataccaggaccggtgccaggatatactgtgtaacgactgcgagagaaaaggcaggtcacggtttcattggctctaccacaagtgtggtttctgtggttcttacaacaccagagttatcaagactgatacggcagagtgttctcgccctctataatttcttttatgcaatccatttgtatatatatatcgacggggtagaaaccttgtgaccgtaggtgtgatagtttttttatagagtgaactgggggaggaaccccacctggatgtattatgaggaaaaagtgactgtgcacatgaggagtctgagaattactcgctcccgtcccaaactaactgtatttctacgatttgaaatatattcgctcatatatttcctgtgttgcccttcagctgtttcctgggaacatctcggtttgtatcagcgatacagttggagaccttctgaacactgtccccaactcaagccgactcagttgagctgaagagcaaataaatactcaggttgcgattgacatgggcgtgaaaatgtcaacaagctctttgaaagaacccaatgtttctcaatcaaaagacgtggagaatggaaatgacaattctgtgaaatcctgcattagcaagcctgtgttgaatggcaacaaatgtgccaacaaggaacaaaatgttccgtcttgttgccctggcgctgtgacaaatggaaacgaggctggaaatgcagacgtggagtacattgattctgagaatctagtggatctaccagatgttgatgcagctctatgtaccttagttaaaaggttggattcaaaggactgggttatgacatgtgaagctctcaacaatgttcgtcagttggcgatgtatcacaaggaaagattgcaggagctgctggagcctctagttcctcttatcgtgaaatctgtgaagaacccaagaagtgctgtatgcaaaacagcactgatgacttgtgctgacatctttaaggtctatggtgacctactggttgagtctattgatccactgctagtgcagctgtttctaaaggcttcacaagataagcgttttgtctgtgaagctgctgaggcagctcttacatcgatgacaagttggatctccccattactactgttaccaagaatgcagccctacctcaagaacaggaatccgcgggttcgagcaaaagcatcagtgtgtttgagcaagagtgtaccttgcttagatgtgcagggaatcagagaatatggaatggataagctcgtccagattgcagcaacccaactcagtgaccagcttcctgaatcaagagaggctgctcgcaacctggcactggaactacaggtattatatgagaagtctcaggcctccacctctgacgaaaatgagggtgaaccttctgtctcacaagatgctgagtcatgggaggctttctgtcagtccaagctttctgccttaagcgcccaagccatccttcgcgtgacctctactactccaaaagagggtgtcgcctctacttcaaatgctacaaaagagggtgtcacggcggccccaaaagaaggtttggatgtggattgctagcatgaggcacacaagcccacaatgagtttgtagatgcgatcagagcgcgattgtccacccccttcggtttttttgatgtacatgcttatggctggtccttggttacatccagttgggaatcggttgattattggttcgggaattcaggtgtgaccgcggtgttaatattggttgggacatatatctgctatagttgattgtataatcattttgttccactacttggtatttgtttcgccaggtgaacgtagaatttgacccacggtcagtgttatatacagtcctctttctgccacatcgggtgcaggttatgttatttttgaaggagatgtcattggcattcgtgcgccacccttatgttgtactctctctccgttttaaatcataagtcgttttgacttttttttaagtatatagcttttgttatgcatctagatataagttgtctataaaaggcctataactttggaggga

SEQ ID NO: 34728 - DNA, 3092 bp, Zea Mays
tgcgcaggaaaacgcagcctcccctattcgctggaatccaactgaacatttgacttgcttgttccgggagatctcttgcctaactgtgagcgagcgagttgtcacagaacagttggctgctcacaatggggacactttcaatgtccgacgccagccctatccctgccaagaactgggatgcttcccctgtcaagctcgaggctcaaggtggtgacgccatcctcggcatgaaggaggaagagcgactactggagctcgtgaaggatgagcaggctgatggaatcttggattcattaccaattgacctggaggccaagaatggcgatgcatcactcatcactgaagccatgaaaaaggaggaggagcagcttgaagacacccggatcaaggtgcaggaagaagaggaagccaggaagagggaagaggctgctagacttgcttttgatcctgagacacagtataacaagttagatgagctgctgacaaagacacaactcttttcggagtttctacttgagaacatggatcggattgccgatgaaagtgttgaaactcaagctgaacagccacaggtagaagagaagaagaaagggcgcggccggaagaggaaagcaaagccacagtacaatgataagaaggctaagacggcagtggctgccatgctcacaagatctcgcgaagaacgtcttgcggaagattctactctctcagaagaagaaaggtgggaaaaggagcaggctaatcttgtgccgttattgactggtggaaagttgaagtcatatcagataaagggtgtcaagtggcttatatcattgtggcagaatgggctgaatggaatactggctgatcaaatgggccttgggaaaaccatccagacaattggatttcttgctcatctgaaagggaaaggcatgcatggtccatacttaataatcgctcctctgtccactctctcaaactgggtgaatgaaatctcaaggtttactccatctctggttagtatcatataccatggaggtaaggctgcccgggcagagatccgaaggaaatttatgcccacaaatgttggccctgattttccgatagtagtgacttcatatgagatggccatgtttgatgctaaatttcttgctgcctataagtggaagtatgttgttgtggatgaggggcatcgtctgaaaaatgctaagtgtctattattgaagcagctgaagcgcataccaatggataataagctccttttgactggaacacccttgcagaataatcttgcagagctctggtcactattgaacttcattttgcctgatatattctcgtcacatcaagagtttgagtcatggtttgatttttctggtggaaatgaagaaactgatgagaagaaaaggctgcatgttgtttcaaagcttcacgctatcttgcgtccattccttctaaggcgtatgaaggaggatgtggaacagatgcttccacgaaagaaagagataatcatatatgccaacatgactgagcaacagaagcaaatccagcatcacttgatcgaaaaaacatttgacaactacttgcacgaggaatcagatattatattgaaaagacctggcattagggcaaggttgcataatctaatgattcagctgaggaagaattgcaaccatcctgatcttttggaatctccagttgattcaactggtttatatccacctgttgagaagcttctggaacagtgtggtaaattccaactttttgacaggttgctaaatttcctgatggcgcaaaagcacaaggttcttgtattctcgcagtggacaaaagtgctggacattattgaatactaccttgattcaaaaggccatgctgtttgccgaatcgatggtaatgtgaaactggaagaaaggaggaggcagatagcagaattcaatgacgtgaatagcagcatgcgtatcttcctcctgagcacaagggctggtgggcttggcatcaaccttactgccgctgacacctgtatcctctacgacagcgactggaaccctcagatggatttgcaggccatggaccgatgccaccggatcggccaaacacgcccagtgcatgtgtataggctggctacgtcacactccgttgaggggcggatgatgaagagagcctttgggaagctgaagctggagcacgtggtgatcggcaagggacagttcgagcaagacagagctaagccgagcgccttagatgaaggtgagctgctggcgcttctcaaggacgagcagaccgaggaggacaggatcgtccagaccgacatcagcgacgaggacctccagaggctgatggaccggagcgacctgatgggcccgccgcctggcgctggcggcgcaaacgcggcctcgcctcttgtaccgctgaaaggcccgggctgggaggtggtggtgccggccaagagtggcggcggcatgctgtcgtcgctcaccagctgagccgtcgtcgctgcggggatctgttgtgcttttggttggtcgcacgcactcagttttggtttgccccccccccccccccccccccccccactggtgctggtggttttggtggcagctgttgcgctgctcaggcgatggctgttgaactggggcgttgcccctgcagaagtagcttttagtttaggatcagcaacaaaacaagcaggactctaggccatgtgtggtcgactctccgtacggtacccaggtcgtttacagtacggaggtcgttgcgttagattacgtgggtgggtgatggcctcatgggggatgggacggttggttgaaccagacacatgccggttgctttgtaaagtttgtatcacgtcgtccgtgatacaatgcggtcctccgtctacaagcgtgctgatcctctcttgtttggctgtcttgtgatgtttgttgagaacgctgaacgaacgcccgtaccgtgacaaagatcggttcctggtcttgttactcttgtacagtctacaaaaggagaaggcgaacgctgcaacaaggttggttcctgtatactatactctctgtcagtggcacatgagtgtacaccaaatacgaaggaaagatataaactgtacaatcatc

SEQ ID NO: 34729 - DNA, 3502 bp, Zea Mays
ctgtatctatgatttgtgggtctgagtttaaaatagagaagttcacaactgagagtgacaaaatagcaaattttcctttaaaatgaccgcgcgttttttttaaaaaatgaccgcgcagtagctttggctgaaaaagaaaagaaaaataatcttccttcttccacgatagtcgatacggagcacccataacgttacttttattttgcagttcagcggttcagccccctcaagtcgaggtcgaggtactccgcctccgcaatgccgcccccttccgcctccgcctccccctccgcctcccgcttcgcgaagcactggatagctgacgtcctcgccggcgaagaatccgtcgacttctccctgctcaaggttctggtgggggcctcgtcgaagcccctcgcgggcgccccggaggccacgcgtgagcgggtcgcgctccggtccattcaggaggtgttgtccgtgatagccgctgggggtgatgccgcggccacggcgggggtgcttagtgttgatggcgcccggtcatgcgaggatgggctgtttcggcttatcagagaggttggaagtttcggagaattggagaaggatttgcttccacctttcagtcaagacatccaggaaaatatatgtaccaagaagtttacattaccaggaatttctttccagttggtaagttaaaagaaaatctcaatattataagtagaacaatggcaaattgaatttgtaattttctcttcagctagaaagagttgagccatggatagcatctatggccccacaaccccaaatggaacacaatggcactgaacaatgtgtcaatgatcagtcactgcgcagcagccacggatgtgtaaatatagagaagcctgtgttccatacagacaatgctggggttcagcaagagaccatggcagatgtagtcaatgaaagtgaaacaggaaatctccaaaaggatccacctgcaccaacttttatttttcaccaaccgtgtatgcctgaaagcaggtcttacgtccctccgcaagaagatactatagatgctgttggtctaggcgctaggtcctcagaaaggagtcctattgtggaggggaacatgtccgttggatctgtgcttgcttcagatggctgtgatgtacctttgcagggaagcattactgagccctttttccagcaggataaacatgaccatactgttatagttggaccaaaatcttgtaagcgaaaatctccaattccatcttactgtgctcatggagatggggcagatggtggtggctccagcaatcagtcatctaaggtttccattcgtgaaggacctagcactcatgccacagtaacttcaggttttgacagaatcagcgatgtcttaccaacagatgcacctgaatctgagcatttgcctgagtgcataactgcacaggatacaaccatttcacagcctgacagcaggaaagctcatttgagtgctctgcaacaggaaaggggtgagaaagtaacccaagatctggaagatatctctgcaaatattgggtcagtggaaaaggaccatattcatggggatctgactttgccatctgccagtgttttactttctataagctgcaatggtgctaatcaaggaagtaaatatgaaaccaaccttcaaccagggactgctacagaggatatgatggctttcgaagagcagaatgcagacaagtctcacttagaagtcagtggtatcaacaaggctaatcaagctctgcatgatgatggcggcgtcatgaaaaataatacagtacatggtgggttgattgtgcagactgctccagtgtctcaaaattgcaatgtaaccttacatgataaaacttcagagcaggaaaatgaaaagaacattcaaaaagataattgccatacttatgttccaggctcttctcaggataggggtggagaaagtgcaaagaaaacaacaaatgaactaaagtctggggacatttcttcaaaaatatgtgttcatttcaatgttcaagacatcaatgatactctggaggacttgtctcaacaaggtttgtgcataaaatgtggtgaaggtggtcagttgttggaatgcaatggctgttttttagccgcccatagcagctgttttggttcatcggcgacatttgaaggaaccaattttttctactgcccggtatgcttgtataagaaagccactgaagcatataaaaaggcaaagaaaacatattgtgaaactaggaagaaccttgttgctttccttggcacagcacaagccaccaatcaacctgacaaacaactaaatggagctcagccaggagctgccaacagagatgaagagcctcatgatgagcaacattctaaagggtgtggcgcatcaaaaggggcccatgaaaatgaagtatacaatcttgctcatcaggatgaagagcatcatcagcagaggaagaagcagaaaataaatgctataggtaagagttatcctaaggaggtactcactgagaaggttattttccagaactctgatcctgcatccattaataaacattcagtgctccagaataacaataaaacaccagttaaggatccagagaaaaagcagcaagcggtcaacgaagaagctcgcaaagaaggtggtaatgacaactcatctcatgaaacaggagcttcatctccgagaagatgtgatcctccttcgaatcaggacgttgaggctgaccaggacgatagccttacaacttctaatcaatctggtggttctgatgaaatagaagctacatcttctaatgactctgccaagcaatcatcacccccttggcgtggtatgggacacaacaaaaaaggattgcacgaaaaggagccagctgtatcaagtaaatctggaaaaggtattgggaaacaggatcaacatatgcatacttcacgaaggaaaaaaaaaatgcacacctgcaaaagcgctattccaatcctgttgcgccacctggaagacgcaaacaactctgttggacagaaaaagaagtagctattttgaggatctgatgccgtcgacatggaacactgatgtggtactagaacatagcggaacactgatatggtactaatagcgaatggaggagggtttcttctaaaatagtattttgatgcacagggtgggcatccttttgtgactggttgtgtcaacctagacctactatgcccgtgagagagattgctaaagagtcaactttcttttggaactgaaccctgcactctagatgatgataacatccggtagctgtgtttcttaaggcaactgtgtgtgtttcatccggcagctgccagtgcctcgcccaatgttctcgaatgaggtaggcgtcgtatgctctaaacacatcacgaataatttcttccagcgtgttttcttcttcttcatctttttagtgaacgcaaccttgtaagtcacgttgcagaagctataaaaacagttagtgaaacctttaaccgtagaaatgaaataccctataagcat

SEQ ID NO: 34730 - DNA, 2239 bp, Zea Mays
gttcctcctccccacacttttgacagaagaacctccttcctggatttgattccccaaacctcgagagcacaatatgaggattagggttacatgggaattctgaagcagcagaggacgacgaaccaggagctccccattcaagaaccctacccgcaggaggcatggacggacgtcaaagtgacttcccctcaactctcgcgggtggccacatataaattgtccctaaataaaacgacgctgcaattgacgtcttcaagggaatcgacaaacccttttgtggagcaggccatacaattctccgtagcagctgctaaagcgaccattattgataaggagaggaaggatgtggtagataagttactgctgcaaggtctgaacattacaattattggtcacaatgatttctattcttatagaaagcagattgaagcacgtggtctccctcttactccggaggtactgctttcattgcctccattctcttcaattacatttaactcagaggttgctaatggaacaatgactggagagaaatgtaaacctgaagtagccaaaactggacttgggtcatcagctgccatgaccacatcagttgttgcagctcttcttcactatcttggtgctgttaacctctcatgttcaggacaatcttctggcgacaatgcaagtggacgagaacttgacttggttcacgctattgcccaaagtgcacattgtttagcacaagggaaaattggcagtggttttgatgttagtgctgctgtctatgggagtcaacgctatgtaaggttttctccagaaatactctcctcggctcaggctataggtgggactgtcttgccagatgtagtatcagatgttctaacacaaaggtgggatcatgagaataaacagttttcattacctcctctgatgacccttctccttggggaacctgggaccggaggatcatctactccatcaatggttggatctgtgaaacggtggctgaagtctgaccctgagaaatccagagatacatggagtaaactggccattgccaattcaacgctggagaaccaactgaggatcttaaaaggactttctgaaaatcaccatgaagcatatgagtccatggtgaggtcctgtagtcgtctcacatatgggaagtgggcagaggtggctactaaccaacatcaagaattaattataagatcattgttggctgcaagggatgcttgccttgagataaggcttcacatgcgagagatgggcatagcagctggtgttccagtaaggtcccctatacataactgcaagtactgtagtatagcatgctcgaaggaagtatattcagtatgacgtttggcataatcacagcagtatgggtgactaagttacgaaattgtaggtataatataacagggtcaatattcttattcaatcttgtttgacatctttgccctaattttgtagattgagccagattcacaaacacggctactagatgccactatgaatatggagggtgttttactggctggagttccgggagctggtggcttcgatgcagtgttctcagttgttttgggggatgcaagtaatgctgtagcacatgcttggagctctgttggcgttctgccacttcctgttcgagaagactgccgtggtgtttcattggaagacgctgacccgagaacaagggaggtgtcagcagctgtatggtccatccaaattaactgattctactgttaatagttctgtttatgcatggtgtaccaatatcatttattaacgatgttcgcattgctgcagttacaattcatagagacaacatagtataaatagtagaagccgttacggattaaagccaaactagcaggctctatcttttataagtacaaaattgtgccgaatgctctatcttttataagtacaaaattgtgccgaatgctaggaagagttcgaggtatgtggttaaataagtgctgcacttgcagcaagatagcacatgagcaaattagtgcagaaaataaggaattctatggatttccatggaattagtgcttctagttgtagctgtggaatatacgtgagcaaatgtcaaggtatcaacaaacttattttgcaccgtgtgttcaggtgacggaggaaccagatgagccttctcttttacataggtaagctggagtaaggcaatgatggaggaaattgagtctatcactcacctcattgacctttcgcccaattatcgagcgat

SEQ ID NO: 34731 - DNA, 670 bp, Zea Mays
aggaccccggattcttctttccaccgctgttaagctggctcgttgccattctgccattgtcccgacctgctggctgctgccctctaattccttttactccccgccgagcgaaacaaacggccttcttggtcgcctcccccatttcgccgctgggcgctggctcaccccactggctttctcaagtttcaagcccctgctgcatcttggccagttgaagatgagcagggcatcaatcaaaatcatcccagagtgctacagcatgatagattgtatctctctgcattgtggtggcttggttgggcagactagtgatggatcttgattctaatttcttcaagaggaaggatgctaggggtagcatgttgcttgcttactccatgtcaacagcaagcagatcgaagttgttcctgtggatgctacaagcaacacttttggatgcatgctactttgctttgcattttgtagcagaggataaagttgcaagtgaactaggttcctgaacccaaaacatgtggttgcaacagtagacatttgatctatgagagctttgacaagccaaacttgttgttgcctacttattacgatttgaaaggtgacaagtagactcattattgtgaccgattattggcgctaatggaaatatgacctacgctttggctatttctgtgta

SEQ ID NO: 34732 - DNA, 379 bp, Zea Mays
gttgggccgcaattggtgtttcggcccattcaccctcccaaaccctagccgcctccctcctaactacccccccatgtgcagccgcccccactcctccttttccccttggccgccgccccccctgcccatctcctcctctctccattgttgcagccaccaaaaccctagcccccccccaatcccctcctcctaaggtgctactccgtgccgctcggatcatcgtctcttggtgcgaatctccaatcgttttggtggagggaagaagggaggaaggaaagggggagaacccaaggtgatttttcttttgtgttcatcccttgttcatttgcgctgcgattcaattgattagatgttgcgtttgcgattagatagaaggggg

SEQ ID NO: 34733 - DNA, 2172 bp, Zea Mays
cttggcttggccgctgctgcccgtgcgcgcaccggccgccccacctccatcttcccatggtggtggtgtcatcccccttcctcttcctcccctcgtgcaagtgcaaccacccacccgctctcccaccgccctcctcgcctatccctgccgccactgcggccgtcgatgagccccatgcccaccgcgccgtacacctccgcgacctcgctgctgctgggcagccgcaggctcccgcggttccagttccagtccctccgcacccccaccaagccccccttccgccgcccggcctcctcttcgtccacacctctccctcgatgccgcgccagcgcgaccccccgccctctggcccccgtctgcgcttccgccctcgcgctgcccgtgtcggtggcggccgctcccccaccgcaggtggacggtggctgggtgggagggacggcagcagccgtgaggagagtagctgtggcggttgcgtgcggggctctcgcggcggcgtggtgccgccgggcgatggctgtgggggctgccgcggcggcgggagccggggccggggcgccggggacggtggaggctgctgcagggattggatggatggcgctgcgcgggggctggcccagggtgctacagattctgcagctgctcagggagcacggcttgattctggccgcgctgcttagcctctctgcgttcttctccatggcagaaacttctatcacgacgctttggccttggaaggttcgtgaactagctgagaaggaacctgagaatggtgttttcaaaatgctccgaagtgacgtcacccgtttcttgaccaccattctcattggcacaacagtggtcaacattggtgcaacagcaattgttactgaggcagcaacagcaatgttcggtgaagcaggcgttagtgcagcaacaggtgtcatgacagttgccatcttacttcttacagaaatcactcccaaaagtgttgcagtccataatgccaccgaggtcgctaggtttgtggtaagaccggtcgcatggctttcactgatcctctatccagttgggcggattgttacttttctgtcaatggggatgctaaagattctaggcctgaaagggagaagtgaaccatatgttactgaagatgaactgaagttaatgttacgaggagcagagttgagtggtgcaattgcagaagatgaacaggatatgatcgagaatgtcctggaaattaaagatacacatgtgagggaagtaatgacgcctttggtggacgtagtagcaattgatgctatcgcaacacttattgatttcaaaaacttgtgggaaactcatcagtactctagagttcctgtatttgaggagcgcatagataatattgttggaattgcttatgcaatggacatgcttgaatatgttgaagaggttgagaaattgaatgcaatcactgtgaaggaaatcgcacatatgcctacatactttgttccagatttaacattagaagacgtagtggaagaaatagttggtgaaatcttcgatgagaatgattccaaggaggaaatccagaagaaaacaggctatatagtaaggcggggggatggaacatttgatgttgatgcaaacacatcgatagatcacctatctgaagagcttggtatcaaaataccagagggacatcagtatgagacggtgtctggttttgtctgtgcatcttttggctatattccagaagaaggtgggaaaatgcttgtgattcttgaaaagaatttcagagaagaaaacggtgaatatcaggaggaaggtcctgatcgccaagatgatagagaaaaaactcaagcttatgaactcgagatagtggaagctaatgcaaggaaggtgggcaaagttctattcaagccaataagcagtgaatgtgttgatgtcgacaacaagggtgtgaaccgcctcatttccaagaagatcatcaagcggaagaagaaaggctctgatgattcctccaatgatgacgagtgtccagacgtaacagagaatggttgccctgcagagttactctcatactcggatgataacagtgccttgttggaagatgcaagcagttctagtgccaaaagatgacaagaaaggaactgcaagaccatcgtactactggtgaagtctatgcaaaattatctaaaaaaaatatagaat

SEQ ID NO: 34734 - DNA, 4544 bp, Zea Mays
ctttttggaagtttggctctgttttctctcaccgcctgttctcccccgcgcgcgatggcggcggctccggcgagcgtcggctgcggcggcgcgtactcttgcgagacggcggagcgtacccgcgagtggatgcaggcccacgtcgtcaactttttcaaggacaggctgtgggagctagtggacgccgagtggatggagtgcctccggcgggagcccgtcgagagcttgctcaagctgccatctggatgcgtccaggagcactggcctgctacactgcgagagtttgtgcttactgctaggtcgcttgtgattccacgggagcagaaggctccgcaatcgcttgtatctgacattcatgtagccccagttggcactgttctcgctcagggcatgaactcaaagaagaagcacgaagtagattgaaaatctagctgctgtggttcatgcaattgcaaagaggtgtggagccaagacagtggttgatgtaggttctggccagggttatctcgcacaggccttatcttttgagtaccaactccgtgttgtagcaatagatgcttcatcacaccatgcatcagttacaattgctcgtgcagaaagaataaagaagcactatgctgctaaatgtgtggagaagcaactgctcatggtacctagggcagtcacctgtcatgttctttctagtgacacattggcagcagtcacattagatgcatgtaaggatgacaatggagaacatgtgagagatactaaaacatctactaagaaaatcactcaaatccaggaatcaactcagggcacccctccattaatcctggctggtcttcatgcatgtggtgatctttcagttaacatgctaagagtttttgtgtcctgtgaacaagtaaaagcattggtaagcattggctgctgttacaacttgctttctgaggatacttatgaggacacagatacctgccctggttttcctatgagcaaggctgccaaacattctgaattggtacttgggaaaagcatccgtgaccttgcatgtcagagcgcagagagatggagaaatctcaccatggacattgcattgcaaaattttgatgtacatgccttccgagctgcatttcaaatggtacttgagaaatattttccagaagtgtcaaggttgagtccatcaattggaaggcaaggaaaagctcttcgacgtcagaggcttcgaaaagttgtggaatcacaaatgactacaaagaaaaatgatgatttctcctgttcaactttaaaggaacaaaacaagaacacaaacgatgttcatccagtcatacatgaagttgacacagggccagatgacatccatcagaacgcacatcaaaagttcatcctgttcaaagatttcacattatctggattaggtcgccttggctgtggctcagtggaagacacgagtcttcttgaaatatggaaggacgtgcaacccttctctgaatatataggtcccttttggtgccttcgagctgctttaggtccactggtggaaacatatattttacttgatcggttattgtatcttcaagagcgaagcaacctagttgaagcattgctgtttcctctgtttgatcctaccatttctccaaggaacatggccgtaattgcttggaagttatgtgcaaattcttcagaagcatgacatggtaaatcttctgatgataggatatgcagttgatgggatggtgtgttggtaccaaactataagccagactattgtcttatggcagaacttcttcgatttagatacagttattgtattgctgtcccttttagaagggcaggcctgatacagaggtgagagctgtctcactgaatcaccaggtcacggtttcgaagcagcctctccgcatttgcgtgggaggcttgcctcggtttatcccttatccaagcctctagcactgggtgtgctttattttaattgtattgctgtcctcccatataaaaaaaacctgaagatagtattgtctttgaaattgtgagggcaatgcatttccctttcaaatcacctggtacatgtcttgtcccccccccccacttcccccagagcctgtctatatgtacttgatccgctttttttgcatcctagcttctcccggagtgtattttgttgcttgtgtgatgttcagatctttgaagaatgtgacaggctatctagcctacttgagacgttcagtatttctacaggtaagaaaggaaaactcaagtagacaagatcttccaaatctagttgcaagatattgcccttgaatagtgtgcctttatccactaaatgctaggtcaacaatctatccatggtgcttgcttgtttcctgaagtgatcatgaaacaagttgctatggaacgatgatgtctctctctctctctatatatatatatcctgcaatgtgtataaatgttctatgcaagtatgcaactatgtgagaacttgtgtacatattatccctcattatttttactgcttccattggttcagttgagcaggggttggcagttgaaacaagttatgtctgatccaagaaccagtgatctggagtcaattgagcaggggttggcaggggtcaaggggaggagggacagatcatgcctaaaccaaatgaactatttacctgcaaacctactgtgacgtgtcataaaagaaataaaatctaaccacgttgactacttacatgcaaatctacaaaaaaaatcaaaccctgcaggatctctgatgtgatgccatgccatgccaccaatgtgggtaggctggctgaaagacggaccagcagaagaggttgacttggaatttattgagcatgtgccgccgcccacgtggtttcatttcatcagcatggtttgtggttccgggtttgtcatcgctttgcttatacaaattttttttagtgcttcggtggtctgacttacttactgttcttgtcatatgaatagtctgtagaccaacctagcaaacctgtgagatgtttctgctcttttgctgcaggcttggcaccgtaaagaagaaaaaaaaaggagtttggtgaaatcactgccccaggaaaaccttccaggcgcaaaaatcctccatgttgaccgaccagccgtttatttgggcttattcaccactcgtggtcaagactcaataggaaggagggcatatgtgtcttcagaataattcctggaccaccggtagaccgataaaggccctgtactgaccgtgctctcaccatggtggtagctcatgagcaccaatctgtcatttgttctatcaactctgggcaatgattgattgatttttggccagccgctgtcacgagcacgacggcgcctgtacttgcgacgacgatgacgacgacggatcagcgtccagtggacagagccgtcgcagcccttccgtcctcgaacccttatccagatatgcgcacgcggaggtgcgcagcgaagccgccggtcaattccagctgcttttcaccgatgctgccagccagcagcgtcggagcggggggagaggtaacggacggacggcacacagctcttgacctggaagctccccgccctcgtgttgatggtagcgcaatatctcatggtgagacgagatctggagcgtcgtttttatcccactgtgcgcggaaaaggccttgcgcgtgcctggcgcgagctgattggctggtccaggttaaaagttactgcaaatggggggtgttaatgttattaggccgtgcagaaacggggacgagggtcgcgctgtcgctgtcaggcctccattcacttccgggtcgctctcagattggttgcataaattcccctcccgccgttgctgctgctgctgctgctgctgttcgttttcatcgcgaggccaggccttgcaggaacagttgggtgtctctacttagggcttgttcggttattcccaatacacatggattggatgggattggaaaaaattgtgaagaagtttgagttgagagctaaccgaacaagcccttacttgttggattggattggatagatccgcggaatggcatctctccatttgcgtgccgccatctactctattcttcttatcgccgccgccacccttttgggttctctctcggcaggaattatgtgccggaaaaggagttttaccgctttttttgttttgttttgttggtgggggagctcgcttgacttgtccaagatggacgtgagcctggaggagctttcggaggagaggagccacggccgcgctcactcgctgctgctgggtgctatgggttaggtcggtagtggcttttgataatgatcatgtgtgttgtacaccctacccgttggtgaggtgacttgactggcagaggaatctccgaatctggcagtggagactgcacacgggagacgggactactccctcccatgtgttggtcaattccagaagaccggccggtcctgtctggacacgggacctctgttttttttttgctttttacagtgtggtttacttgtttgtgcaatatatttttttaaaacaaaaacaaatattatttcttcttcgaagcctg

SEQ ID NO: 34735 - DNA, 544 bp, Zea Mays
cccgactcagccccacgtggccacggcttagatggcccagccacgcccagtgcccccatccaccaccatgccctagccccaccggccaggagcatcttctccaacttcctgtgcccatgccgccaggaagagcagtgcccgcctcacatctcggccagttcaaccccccaattgcccccttccatgcgcagaaaccacctccaccgcccatcgcccagaccgctaatgcccacacacgcaatgctcagagttgccctcgcctaggtagcccccacctgcgtcgatctcttcccgccatgcacgaagtcgtcctcacctcaccggagcatcaccttgccatctatgcacggaagcgctctccatttctgtcaagtctcgttctaagacaatgagcagttcgtgtttctcgaaggagtagtgggagaagttcctaagcagcattttgtttggtgaaggcaagtgtactctaacgtattatgtcatgttcataagagaattcatattcccgcataacatgattccaatctaaggattgactagcttt

SEQ ID NO: 34736 - DNA, 3430 bp, Zea Mays
accgtggctccgcccccgagattgtcgcgcccacagcctcgcctcccatggatcctctcgcctctgcatctcgccattgttgccgccattctcgcgcccgtgcccctccattctcgcctccgcccccggatcctctcgcccccgcgaccttcgatggaagcccgcaatctgcgcccttccatcgccgcaatgcatcgatcccattccattttgcgagaagggcgggcgcgtgcagggcttcgcaatggctgacggttcaattggaagatcaaccacagggagtaggactcctaaatgagccgccaactgttcttctccttcccaatcatcggcaatcccacacgctctggtggctaaggctgcgggattcccaggtgcagcgtgctggggtcgcccaggcacggagtcggccaccacgcagcagccgtcgcccctccacctcgttgtcgtccgtccatgatcttgttgtggttcatgagcactgagctatacttcaacttaactggtatgattagttgaaagaaaggtacaacatcaccttacgtgttgaattgccttgattaagaaatttatgggtagccttccgtgtgtgtatgtgtgtgcagattcagcccttggctttctgggcatgtttgacaaagttgaatagctatgaaaccgaaaacaactgccaaatgtacatgttctgaatcaagttatgatgctaatgtctcagcgaatgtacatgttctgaatcaagcaatggcgaattttgaagcccactttagattaatcggtatatatggatacagtagcatgtgttcaaatgatgcttatttctcaacgaatagtagcaatcattggtcaggacatgtagcttaatgctatcttgttgttattacatgggtgtcgtaacaccttgccgactgttcataaacgcaggacctgagatctagaaggacacaacaggcaaggtggatgtattcgtagctggttcaggcacagaaggcatagtttattgtttcttttacattcagtttactgcttcttaaggaattattcaactaggaacatgtactgaatatgggattcaggttgaaataaagcgtatattttctgtttgttggtgaatgtaaatgaagataaatatgacctttgctcttagcctttctgtcattctttttttaatatgatcatgagaatgtgagtgaattatggcaacatgacctgcaagtcatcataacaaggaataatatttataatgttttaattggagctacacacaagagtgtttcaaataacctatcttggtctgtatctacatgcattttattaaagtttcttgtattggttcgctttaactgctatttgttttagttttttctattgctgcaatatgtgaaattgcaaacatgtgggatgtgtttgactgctacgaatacgacattgctaatagtggcaagaatccaacagagcgtctagctcactaaaagcaaaacctttggcgccatttagggtcgttttgagatactctctgtctgggtcgtttcttcaataagataacggtggccatcatagtcgaattggtgggcctgctagcgtccccaatggtcgtgtcctggcctgtgtggtagtgttgccggacttctgatagttgcttcgccagtacagatcatagtggaaccatcatggatgtttaatattgcagtccaaggtaagaaagtattgcagaaccaagcacaaaagcatccaggaagaaaaatagaagggacaagctgaatgagagaggaattaggtcagcaattttgaagttgggttaaggtttttgacacttccatcattccctccatctccctgtttacatatttgtcatatcactccctaattatttagttgggatctcggtaattgctacttgtaatagagctctacacgccaatcttgttacacttttttacctcatagtgatctttgtgtattgcgcacaacattatgtaccttactacgttttctcagtaattgctacttgtaatagagctctacacgccaatcttgttacacttttttacctcatagtgatctttgtgcattgcccacaacatcatgtaccttactacgttttcctgcttattgaaatcctgtgagccctactcagtttttacctatcttttgattttacccatggagaaatattggctgggtgactgccatgaaggcatgaaccttaaaaaaagtttgttttttcaattctaaatatcttgtgacttatttatattgagcatgtgtttacaaataatgttctcatcagctcatgtggtattttaagctcgcctctacatggacgccggcctcgcttccgcagtcaccatgctccggacctgcaccgatgtcgtgcacctcgcgcacgttctcgagcagtttcgccttgcctggtgcggcaagctcgttcgggacacccgcgccgtcgctccgtcaagggcctctgcttcgacctcttcatcattaggggtggaaacagagctttcaatgtatgctggaggaaacaaaggcgccatcgccggttgcaactccaacccaccgaatccgtttccacaaaagtcaaaacaactccgccatctcgatcaaacaaggcggacaatgtcaacgcccctcggcaccagcacaaatttctcccctccgaactccatctatctatgcccgttgtgcacgggagagggagacagagatccgcgaaacgccgcgcgctgttcttcttcaggtcaggttctatccggacatccggagaactgggcaccggtgatcggatggcggcctccggcgctaagatctggcggtcacaacctagccgcgccgtcgacgagcaccggtaccgcccccgttggcgcggacgcctgccatcggccgcgagctgttgatgggggaaacaaaaataggaagggacatcggagacaatccctgccgcgttcatcctttattaacgagcagaaaccatggttcgggacttcaggtgcagatgggggacggaggccgggcaacgcaactaactaacccaacaaaggcaaccaaccactactcgcccgttcctcctgctgctcagctcatgctcctgagtcctgcctggatggtctctttcctttgaaactgggcaatgtttggaccaaccaaccaacaaccgagatggttattcgtcccggaggataggacgcttgggcttacatcagcctccgagtcgatcggccggtggtcaactaatgaaacccgtttcatttttgaactaatgaaagagagtatatattagtgaaaaaggtacataaacggaatattatttatttcttcacgtaacaaaaaagtgcataacatgctacgaaaagacaaagtaaaaatatatgtatgtatgaaaccccatgcatgtgctaattattgcaagttttataaaattagtgggtgtgca

SEQ ID NO: 34737 - DNA, 2351 bp, Zea Mays
gtgacgtcacctcttctaaggcccctgtggtgccaattcagatgggctccaggatgaggccaggcccatgggggcacgattcggccttttcttgtcttgctcgtcaaaagaataaaatcccaacccataggaaagcgtagcatagcaggggaggccgggaggggagaaaggcgaactcgaattgggggaagagagcgagagacgaatcgcatcgagccggagaggaagtcagagacagggaggagggcggcggaatcggcgccggcgggaggcaggcatggaggacctgagcgtggaggagctcgcctccaacctctccacctacaaagagcagctacgcgaggtcaagaagcttatcaaggagaagaaggatgatgctggaatttctgaatatattgatatggagaaggagcttcaagaggtcagttcatttcttattttatcctgtaatgtgatccctcatgctcgtgtagctacacgtcagatacatcggattaatgattttcacaaatggatgcttgatttctcctctgatttttggggcatgttgctatcgattcctctcttctttgttacaaggagccatgcccagcaaggtagcatgaaaaggccgcttgcaacagaagatttgttttggggaatttagatttttgtaaccttgaaaggtgagaaggttaattatggcaatggtagggactgtccgagcaaccatattaataataatgaacaatatgtaaaaattcagtggcttcaaagttgtccattaccctttatcttgatttattgcaggtttgtactactacaaatttcggtgttgctgctgctgttctaagttggatcttgaaatatgggcacatgtttaatactactgggaggttgcttgtgtttatgatgcttaatatcattttttgtgtttgctgcaggtcataacgttaaccgaagagattttggcaactgcaaagcaaactgagagtgcccagaatgttgcaggtctatcaccgccaagctattcagctggagtgcagtctgagggactggatgacctttcacattcccataagtttgccgttggtactagagttcaagctgtgtggagtgaagatggagaatgctgaattgccaggtataatgcaaccgttgaagctttgacaccaaatggatactatgtagcctacgatggctggggaaacagtgaagaggtggacccagataatgtgaggctgcttgaggaagaagcagctgatgccttgggacaagctgaaaaggaagctgaagctacaaaaatggcaataaagaggaaaattgaacaagcagcaacatctgattttcaggcgcgtagcttgccggccaaacttcgtatcgaaccaagtgaccctgaggatgttgtaagtgaatctgccctttgttgcaagtcgcaagtaagctaaattttgtggtatcatgtgttcttactgactcttcttctgtgttgtagaaagctgcaaagcgtaagaaaatacatgctttcaaatcaaaatcccgctttgagcagcttgaatttgcccaaaacaaaaggcagaatgcatggcagcagtttcaaaccaaggggaaagccaaaaaggtagcttcttggcccccacgtaatttttttttgctttcttaaaaatggctaggcactcttccattgagttggaattctgaatctcaaggtactacatatggccatcctcagcattcatgttatgatggaggaccaaaatggaacaaattgtctgacctttcccagcattccagttagtcgagaaacagattgtgtgaatttcgatggtttgtttgccaggtggggttcttctccggtcgcaagaaggagagcatcttcaagtcaccggacgaccacagaggtaaggtgggtgtcactgggagtggcaagggcctgaccgacttccagaggagggagaagcatctgcaccttaaaggtgggtccggggatgcagcggatgatgacgaggagtaaactgaagaaccgagcctctgtttgtatcccgccgaacagacatttccatacctgttctttagcgccgacatggcctcgaggggactcttgacttaaaccagaaaatttcaatgtttgtcccattctcattgttgaatgtcgctgccgttttggagctgcattctggtggcgaggtcacgctgctagaggagggcgtcctgagcgtacagatcgacttgtcttgctagtctgtagtgaagtattaatccttaaacgtttactaaaattgtcaccggcctaagtacagatcctttgccccaaccaagtccattgaagaagatcaataaactcgctactgctgagtgtactctacaaaccg

SEQ ID NO: 34738 - DNA, 3127 bp, Zea Mays
tgtctttatgcaatatgcttatggggctacaagattggttttgatggattatgacaagtctagaagaagtaactccaagaagaggacacattccaattctgatgacggaaagagaaaacggttaaacactaggcatgatgacacatctatgttctctgagccaattgaaaccatctacaggatattgtgcccggtaaaaaagataggcagtgtcttgggaagaggtggtgacattgttaaggcccttagagaggaaactaaagccaagataagggttgctgattccattcctggtgcagatgagagagtaattatcatcttcaattaccaaaatgagcctgaaccgactgatgaagcagctgaagaaaaaaatagtgatggcttagggaacttcaaatcccattgctttgcccaagatgcgttattgaagatacatgataagattgtgtctgatgaaattcatgatgaagtcgccaatgatgaaaagtctgaaagtgcagatgatgtgactgctcgaattttggttcaaggcaatcaagttggctgccttctaggaaaaggtggctccattatacagcaactacgaagtaatactggtgctggaatccgtgtcttgccatctgaaaaccttccccagtgtgcacttaaaagtgatgaactggtgcagatatctggagcaccttcccttgtaagaaaagctctatatgaaatatctactcgtctccatcagcatcctcgtaaggaaaatagacctcttgaagaaataatagatgcaagcacacaaaggaaacgtgaatctccaacactacaacatgaatattcaatgttgccgcacctgcatagtgatcatacacctccaatacccctgcttgatccatatagaagtggaccacaatatcctgttactgaaactgaagagttctctatcagaattctgtgtgcttctgagctcattggttcagttattgggaaaagtggggccaatgttaggcgtgtagagcagcagactggtgctcgcattaaagttcaagagatcgacaaagatgcttctggagaaaggctgatcattatttcatctaatgagataccagctgaaccaatatccccagcaattgaggcactcattttgctccatgataaagttagtgcaccctctgagaaacaccattcaagtacaaggcttgttgtaccatcaagcaaagttggctgtattattggggaaggtggaaaagtgattactgacatgagaagacgaactggggctgaaattcgagtttactcaaaggcagataaaccaaaatacttgtcttttgatgatgaacttgtgcaggttgctgggcctccaactattgcaagaggagccctcacagaaattgcttcgaggcttagaactaggactttgagagatacaagtaccgccaataatcctccaccttttgccccttttgatgatcctcctgttgatatgcctagcagaaagttgtcactatatggagggcctgccactgatccaccgtatggaaggcctgccaatgatccactgtatggaaggcctgccattgatccaccattcggaagacctaccaatgatcgaccatatggaaggactgctgttgctcccccatttggaagacctgccaacgatccaccatatggaaggcctaccaacgatccaccatatggacgaccttccggtagtataccatatggaagaccaaacggaagtgcacctcgtgagccttccgatgcatatcctgtagactacttttctaaaagagaatatcctagtggaagtcctatgtttactagtaatgccccatcagctgcttatgagagatatgcagcacccacacgctttcctactagagaatttccctctgctttcagtcctggtgtagatcatatgcctcatcattcctatcgtgaccatgtgcctactgatagctactctagtaggggtacacagcaattaggcatcacaagaggtggaaattcagatgcttatgactataccgaggtacatccttgacgtgagcttccctcttttgcaaaaggccatcacctaaatttttcattagaagcttgagactttacacatgcctgctccattgcccctgttctgttatgttctgtattaggtggtactcctaaatattgcaaaaaagtcatatgttggtgtcttagctgtcacttctgtggcagcaatgttcaccctataatgtggtcacatggtgcaactcttttcatttgttgtcactcacaacttggttcaatatatatttggcagctgggatgtactctgctgctcttggctttaaccaatttttctttattttgtggcctatcagaaaatctcaagttctgtacatatttaaattttatcattgcacaggctgctggacaaattcatggacgtgaggattacagagaaccgacaagtgctaccgggttcttgagcactattgaactaaggattccaaatagttctttggggtctatcgtcggtgctggtggggtcaatctagcagagatccgtcaggtttctggtgcaagactgaggctacatgaggctcatgctggttcttctgagtctgtggtggagatccagggcacactggaccaagcaaaagctgcccagagcctcctgcaaggctttattagtgcaaacagccggcagcaacagcagccctattcttctcgcatgccactttacccaagctggggatagcttctggtctcatggtcgtgtcagaggaaaacagagtcagcagggtttgtcatgtggctgtagatctcggactgcagattagctgtagcgatgatgttgttgaaggaggctgtttaacagtgcaagcaagataacttatacttatgccttaggacaagtaatattgttttcctctgatgaaatacttggtaacgatctgtctctgtatttttatatttgattctgaatgctttgaaccctagtgttacaaaagctgctattttgaggtcagactacggaggccgaataattctgttatctgcagaattgggcaaaaaagcacatcttgctgaggttcctatgtcttcacccatatcgtttcatattttgtccagaatattggaaaccctaactctagaa

SEQ ID NO: 34739 - DNA, 3081 bp, Zea Mays
gtgccaaataaatctgattagatatctaaacccgtgcaaaattcattcaatcctggacgaaaaaggcaggcagaatcacaagctgtcgtgaaattctcatcgccccttccttccttcctgctcctcgccaaatcgccgagacgccgactacctcgcgctcccatagatctggtagaataggtgccggtggcctcggacgtgcagtggtagaggcttctgcggtggcggcgacggaggagaagggggagcgagcagtgtccgcggggcgcggtgtctgtgtgctggggctcgggttccgaggaaccctagccgccgcgcgatggcgtcttacaggccgtacgcaccgccgcctccgcagggcagctacccgccgcagatgaatccgtacgcgccgccgcaggcgccctacaacaggatgccggcgccgccctaccacgctgggcccccgcccccgccgccacccggtccgccaccacctcaccaaccgcagttcaatttcggtcccgggcctccgcagcagcacccgcccccgccgatgtactaccagccaccgccaccaccctatggcgggaacagtaacccgcctcctcctcctccttcagcgccacccccgcctccgtccccaccccctgctgctccaccccctccgcctccggcccaggcaccgtctgctcaggccctgctgccctcaaaggagcagcagcctaaggcaacgctgccaagagaggagacggaggaggagcgtcgtgcacggaagaagcgggagttcgagaagcagcgggtggaggaacgcaagcagcagcagatgatgcggcagacgcaggccaccattctgcagaagacgcagcaggtgcgtgcttctcagcagcagccgcagagccgccaccaccaccaccagcctccgagtatcttccgggcagcagcaattggctctcgggcagtggcaactgggtctcgcccagcatcagcgccgaatgctgagaggtttgagaaccggttaaaaaagccaacaacgttcctctgcaagcacaaatttaggaatgaactcccagatccaagtgctcagttgaaatggctacccttgaataaggataaggaccgatataccaaatacaggataacttcattggagaaaaactacattcctaaaatgattgtccctgaggatcttgggatacctcttgatctacttgacatgagtgtatacaatccccgggatgttcagtcgcgcatggctcctgaagatgaagagctattgcgtgatgatgaggtcctcacccctattaaacaagaaggtacaaggaaaagggagaggcccactgacaaaggtgtttcttggctggtcaaaacacaatacatatctccactaagtactgatgcaaccaaaatgtcccttactgagaagcaagcaaaggaaaggcgagaaacaagggagggtcgcaatgctttcctagacaatcttaatgatagagagaaacagatcaaagccattgaagaatccttcagagcagccaagtcaaggcctgttcaccagactaaacgtggcatgcaagctgagtgggttatgcctttgctacctgattttgataggtacgaggagccgtttgttatggtgaattttgatggcgatccaactgctgattctgagcagtacaacaaacttgagagacctgtacgtgatgaatgtgaatcccgggctgtgatgaaaagttttagtgtcagtggttcagacccttcaaaacaggagaagtttttggcatacatggccccagcaccccatgagctcgccagagacttggatgatgaaaacgatgatatccagtattcctggctaagagaatatcactgggaagtgagaggagatgataaagatgatcctacaacataccttgtcacatttgataaggaggagggtgcaaaatatttgcctctccctactaagctagttttgcagaagaagaaggcgaaggaggggaggtctggggatgaaattgagcattttccagtaccttcccttattactgtgaacaaaacaggtcatgttggtaccatggagcgcggagaatcttctggcatgcatgtgaattcaaagccacggagacctcatgttgatgatgatcttgatgagcattcaaagcgttctagggtagaagatattgaccaatatagtggagaagaatattctgagtgatgaactgtaaatcataattatcttgcaccaacgaattttatcagtacatgtgaagccttaaaaggtttcaagcaataggcacaagtggtttcatggtgcatggtcatgcagtgaaagaaaatgtctgacaacaagaggacattggggcttggccaatttgttgatctctgtagtgataatagaaagcgtcacattgttctaaagaagttgtcttcaaagtcttggatgatgcgtatattgcagttgctccacatgttccaggatagtgaaattttattcatggttgcctgataaagtgtggaattatataaattttcagcataaattgttttattattaacgttcgtttttgcctaaaataatgcataagtatatgagatgataaaagggtaatcatgaagcattctgtggtccggtggcccttaagttgcaattctattccagcacaaagtgacaatgatatgatgacttttggtctggtattattaattctggacagtaattcagtagctgtggtaacggcaaaatacctcagggttaagctggcatgcaggttattacacttggtttccattgctgtgtgattgtgtttgccttagctttgacacttaaatattacgtaggttactgttttcattttatgtagcctggaggaccattttctgctggcagccaggtttggctgagttttatggatgctaagatatggttcccctcaagtgacagcattgtattgtggggaacggtgccaattgctggaacaaattcgggtaaggtgacgtggtgagctgctgtctgtagtgtgtggacaactgcagtagtaccatggttcacaggcagtgacaagcttcttaagcatacaaacgaaggaagatagacacaacctaaca

SEQ ID NO: 34740 - DNA, 2149 bp, Zea Mays
ggtgcctgttagttttttctcatttgctatttatctgtgaacactgttgtcaagttcaatatgaatctatagttctatacagcctttgtacactaaacacggccattgtttgactatttgttagtcaaattttgcaaagttacattttctgaaacagcatgttctatacctttgtgtatggagggagtagtatcttggtactgtaatgccacttcaaacagtatttctatatgcaatcgttattttaaactagttacctgccactgtttgaatgttgttgttactagtcctttctgtttcatttttctttgtctatttcatagcttaatgcctacatactctggtttgtaggtgtatggaagcatgccaagagtgatgggcatgaggactatggtctccttgttagtgacaaagcaaggaaatacgccataatcaaggagcttgatgagccagttaccttaaatgatgggacagtggtcctgcagtttgaagtgagacttcagaatggccttgaatgtggaggtgcctacattaagtacatccgccctcaggatgctggatgggatgccaaggagtttgataatgagactccatacactattatgtttggtccagataaatgtgggtcaaccaacaaggttcatttcatccttaagcacaagaatcctaagactggaaagtatgttgagcatcacctcaaattcccaccttctgtcccatacgacaagctctctcatgtctacacagctatcttgaagccagacaatgaggtcagaattttgatcgatggggaagaaaagaagaaggcaaacttcctttctgctgatgactttgagccagcacttatcccatccaagaccattcctgaccctgatgacaagaagccggaggactgggatgagagagctaaaatccctgatccagatgcagtgaagcctgatgattgggatgaggatgcccccatggaaattgtggatgaggaagccaccaagcctgagggatggttggatgatgaacccgaggagattgatgatcctgaggcagccaagcccgaggactgggacgatgaagaggatggtgaatgggaggcaccaaagattgacaaccccaagtgtgaagaggcacctggatgtggcgagtggaagaggccgatgaagcagaatcctgcttacaaaggcaagtggcatgcacctatgattgacaaccccaactacaagggaatctggaagcctcaggagatacccaaccctgagtactttgagcttgacaggcctgattttgatccaattgctgctattgggattgagatctggacaatgcaggatggcatcctgttcgacaatatcttgattgctgatgatgagaaagttgccacctccattctggagaagacatggaagcccaagtatgatgttgagaaggaaaaggagaaggctgaggaggctgctgctggtgcagatggtctttctgacttccagaagaagatttttgacgtcctgtacaagattgctgatattccgttcttggcaccctacaagaccaagattattgatgttatcgagaagggagagaagcagcccaacatcactattggcattttggtctccgttgtcatcgtgttcgttaccgttctcttcaagatcctttttggtggcaagaagccggtggcacctgtgaaacctgcagctgaggcgaagaagcccaaggccgcggagacggacggtgctggaagcagtggtgacaaggatgagaaagaggatgaaaaggacgagacaggcccacgtcggaggacccgaagggagacatagacctgtttttgacgtgttttagctcttctggcgtctgcttattttgagaactcttaatatttgtgagtgtataataggagcttatgtcacctctgcggcttcccccgctgctgatttgtttttaatggttagaccaggacccttcacgagcgtagaatttagttcttgttggtcatttatgtgctgtgcctgacggtgttcaatcagatagaggtgatggtttttttggtagatcaaatcaaggaatatttcatatgcctttttggcaactgtttcagttgggtgaatgcctggttaagctttcgcttgtgtttcggaatgttgctggctcaccatttggt

SEQ ID NO: 34741 - DNA, 6860 bp, Zea Mays
aaacaaacaactccaatacggtttagggttcttttggagtacagtctacggtgaagccagagtccaaaatcaccctgctctacaccgcaagtcccagatctcggttgaacaagacaacactcgagcaccagtgacgcattccctctcccaccctctaggcccctaccctcccatggcgaagggcgtcggtggcggggatcccataccgctgtcgcggttcggcgcgctggtggcccagctggagtccgtagtggcatcggccaggcagaagacccccgacgcgctgctctgcttcgacctcctctccgagctctcctctgccatcgacgaggcccccaaggagaccatacaactttggcaaaggaaatgtgaggatgctctccaatccttgctcgtccttgggacacgacgtccagttcggcgcttggcgtcatcagcgatgggccgaattatcgagaaaggcgatgtgatatctgtatattcaagggcaagtaacttgcaggggtggttggtcgatgtgaaaagggctgaggccactgcatgtgcaggtgcagcacaatgtctgggggaaatttaccgtttatttggacgcaagattactgcagggctgattgagacatcaagcattgtagctaaactcatgaagtatcatgaggactttgtgagacaagatgctcttctcttgcttgagaatgcattggaaggctcaggtggtggtggtgctgctgcagcttatcaagaggcttttcgtatcatcatgcgaggtgtaagtgataaatcgttcattgtcagagcagcggcagcacgttgcttgaaggcatttgctaatattggtgggcctgcattggggatggctgatttcgattcttctatgtcttattgtgtgaagggtttggaagatagtgtatcttcagttagagattcatttgccgaagcacttggtgccatacttgctcttgcagtgaatccagatgcccaggtgaagaaaggcgggaaaaaacaaactgcttctgcaaagaaaattgaagatggtgtgcagaagcatttgattgtgccatttgtcaaagcaaatggagcaaatgcaaaggaactccggattggtttgactttatcatgggtgttctttctgcatatgattcatatgaagtatggcaccccagatagcgaacttcaaaattatgccatacaaacgatggaaattctccaggggaatgattcccttgatccacatgcgctggcatgcgttctgtatgttcttcgagttggtgtcgcggatcagatgactgagctgacacaacgcgattttttgctatttctgggaagaaagctggagtctttgaactacacagctgcaacgagagtggcaacactacgcattttgtgttacctattgagaagcgttggtgaggttccagctgaattcaaggatgttcttgataacacagttgttgcagcattgtctcattcttctgctcatgttcgtgtggaggcagctttaacattgcgtgctttagcagaggttgatcctacttgtgtaggtggtttagtttcatatggtcttacaacattgcaagctctacgagagactgtatcatttgataagggcaaaagtttgaaccttgagctcgactcactacatggacaggccactgtgttagctgctcttgttgcaatatcaccaaagttgcttcttggttatcctgcgaggctgcccaagtctgtacttgaattatccaaaaaaatgctgaatggtttcagtcgaaatccagtggctgctattgcagagcgtgaagctggttggttgctattagcttctcttctagcatccatgccaaaagaggagctggaagaccaggtgtttgatgttcttttgctatgggcgggtccttttactggaaatcctgaatcttaccttcgtcatatacaggattgggcatcagaattgcgggttctgtcagttgcagttgaggcgcttactgccttcataagaagttttgtttatccatctatcacaactactgattgtggaatcttgcttaatcctgtacttgcctaccttggcggagctctatccctcatatcttcgttgagatctaaacaagtgcccaatgtaaggtctgcgctggacctactcacaactagaacattgatggcttattggtccctttcgaatccagtggtatataaaactgagcaccagcagatacttcagctatgctcaagtccgttcagtgatccttctggatgggaagaaagctcatgcttgaagtttttgttggataagagagatgcttcactgggcccatggatacctggaagggattcatttgaggatgaattacgtgcttttgatggtggtgctgatgggtttctaccgtgtgtgtgggatgatgaaatcagcaacttccctcagccagagtcaattcggaaaatgctcgtcaaccagatgcttctctgttatggttccatatttgcatgtcaggaaaacactgtcaagataagcctcttgaacaatcttgaccagtgcctgaagtctgggaagaagtacctgtggtttaagtttctcattacaaatgcatgtgttgctctattgtcagggttaaaggaattcctcgctttacgtggtgctcaatcattgccaattgatatattaagtatgattcagtccattttcaaggccattttagtagagcctgaaatttctacagcacagcggcgagcagcgtgcgagggtctcggtttattagcacgagctgggaatgatatctttacagcaaggatggctcgctctcttctcggagagctggtaacaacaacagatctgagctatacaacttctgttgcattttcattgggttgcatccatcgaagtgctggaggaatggcattatctactctggttaccccaactgtgagctcactatctcatttgagtaaaagctctaatttcaatctgcagttgtggtcactgcatgctcttcttttaacaattgaagctgctggcttgtcttatgtctcgcaagttcaggggacacttttccttgctatggagattctcctcttggaagaaaatggatatgttgatcttcgacaaggaattggtcatcttattaatgcaatagttgctgttattggtccagagcttgctcctgatagcacattcttttcacgatgcaagtctgttattgcagagataagttcatcaaatgaaatggctacacttttagaatcggttagattctcccagcagcttgtgctttttgctcctcaagctgttcctgtgcacttgcacgttcaaggtcttatcccaatgctttactcaagacagccaagtcttagatatttagcagtgtcgacactgcaccatctgattgaaagggacccggctgcaatgattgacgagaatattgaagagaatctgttcagtatgcttgatgaggagaccgattcagaaacagcgatgttggttcgtgcaactattattcgcttattgtatacatcatgtccagtatgtccatcacggtggctggcagttttacgaaatattgttcttgctacgtcaattagaagaaacacaggtgaagttctgtcatgttttgggcataatcctcctgatagtacatctgagaatgatgtgtactatggagaagatgaagacaacatgatttccagctcaaagcagcagcaaatccgctgtgctggttctatatccagccagtttcctccaaggaataaacacctcagatatcgtaccagggtttttgctgcagaatgcgttagccatgtaccaattgcagttggagcagaacctgctcattttgacctcttgttggcaaggagcgcaatatctcaaggcacttatttgtcaaatgattggctagtgcttaaactacaggaactggtctcactttcataccagattagtactgggcaatttgaaggaatgcaaccaataggtgtgaagcttttgtgtttgataatggacaagttcggcaaggcagtagatccggaatttcctggccatatcttgctggaacaatttcaggcccaacttgtttctgctgttagaatggctataagcactgcttctggtccacttcttttggaggctggacttgaactcgctacaagggttatgacgagcagcataattggtggggatagactagctcttagtcgcttgttttctctgataacacgcccgttaagtgacatagagggcctactatatccatcttttgctgactgggtagtgtgcaagataaaagttcgccttctaactgcccatgcagcagtcaagtgtaacacctatcaattcttgaggatgagggaaaatgctcctaatgaataccagcaattggcaccttcacttgtaaacagttcaactctattaggaaaatactggattcgagcactcaaggattatgtttctataagttttggtttgcactcaaaaatcaattacaagccattccttgatgggattcagtcattattagtcttgtccaaggtgcagagaactgaattccaatttctttgggggttatctatccttgtgctgttccattcctgccaatcaatgaagaataattctttgaagatcaaccttgactttaaacaagacaaaaactttggggaatttattgttcatggacttgatgacaaaagaccgtgtgatcaggtcttacgcgtgctttcgtccctcacaacagaagtctttttcagcaataattttatttcagtggatatttgccagcaactcctccaggcacttacatatgcagattgttcaagcgctcctatcatccacctattcacccagattatcagattctgccctgacaatttttttgaggttgaagcctttgtcttctctgcaatagagttattgtctcagtatctgggtctgatacttcaatgtagggatgggagttctcagaataattcaagtaacactttgatttctgagttgtctattgcaagcgagacgatggcttatcggatcaaaggagagtatttgtggaagctggtgatgttagtggtatctacttcacaccaatcatttcaacaagtttcaactaatttatgcttctcaaatattatatgcttcctccaaaatatcttccctttcatgaggaaaatttttagagaaagagtcgaatcagatggtgagtgcacaagtcctaaagttgtctttggtgctatggttggcctagtgggatacttctatgtagagtgtgataaaaagatctcattgctcgaaaacaagatttctgattcctacaagctgttgaataagatactacttttttgcttgggagaagccactgctcttgcaaaacttgttcctgagatcatttatcgaagtgaaaatgtaagtaacaatgatgtgctcctttggggcagcttcaggctgtgcgtacaggttattcaaggttcatttcgtagtaccaacatacaggtgcacatgctgggtctgcaagtactgagaagctatgcacagaaggagctaactgaaggttcagaaacaaagttggattcttttatgatgttgcttacggaattgttgggagacttgtttttggtgatggagactacattgaaggaatgttcaaacaaaaaatctgtcagtgtcgttgatgaatgtttgaaacttgttttcctcttccacacactagcacaatcaaagaaataccgacaagatgctacaactcttctgctggaggccttgctgatggttttctctctgtccagtgatactgtttcacaggagcttgctgaagtgaacaccatttccagaaagttgttctctcattttattcagattccgtctgtggctatacagatcaaagacataatgctttctgcaccagctgaaaggagactacagcttcaggacatggtccgagcttcagtcagtcaagggcagataacggtgccagtggctacgagtgcacactcagaacagaatattcaggatagttgcagtaaaaaccctgggtccacatctgaagcttctgattgtgttgcaactcacgggaataatgacaatgaagttgttgatgatgactgggatgacgattgggatgctttccaatctcttcctgcaattgcaaatgatggtgttgattctggagaaatctctcttacaactaggtacaatgaacagatccctcaagaaaatagcagttacggttcttgtaatgcggatattacagctcgtgctatggaagacataacttgtgtggacaaggaacttgaggagccctctgatttgcaattctcaagtactgaacaacagcctaaacatgatttaccagggtcatcccacgaaggttgtgctaaacttgaaagacatccatctgttgattgcaaagagcaattagctgatgatgagacagcagatgaactgcagcagcaggttcatgaagacactgatcatgtaaataaagatagcgaagttctctctgcagaaattcatggggttaaattggatatccttgatgaagatgttgaagatgattccccaatgaattcaaacaatctatcagatatcgcagaggaagagtcctagggttggtacaatgcaacgagggtggaccgcaagcttgtcgagatagtagagaagagctgtccggttcctctgatgctggcataccagattttagtatgtcaggacacgtgatgagcaagagcggaggaaatgagcaaaatgttattttgcctgtatcaatatatattgcacgagataaaaataatataaggttacaaccatgatttttattttgtgccttcctccgcccctccgcttctaaataaatagttacctttgaatgaatttcaagaaaacccaatcaaga

SEQ ID NO: 34742 - DNA, 1011 bp, Zea Mays
cgcgccgtcactcccctccccttactcgcaaccgcgtcgtaaggcactccggcggcggcgatgattacgtcccccctcctcccgccgggtaagcagccatgtgatcccaccccgccgccgttttgtttctggcgcatgacgtgcgtgcggggcacgatcattggctacaagcgaccccagcagtgtccgactctagaccgagatgcatcctcccttgttaatgtggtccaaaccaacacttgcaagaactcccttgtttaagccaatggtagttgaaatgggccattgagggaggccagcattggtacacctgcaagaatggggatccaacagacatagctgcaatggcggtcactgttttcaagtcatctgattaatcacgattagtcgcgattaatcgtccaagtcggtttgaatcaatcatgattaatcgcccaaattgtccaactaaatgtgattaatcacgattaatcgtccaagtcggtcagttagaacgaccagcaagttgtccgacttgaaaacaatgatggaggctgacaggggtcccccaaagtagatgcagaagaaagcagctaaagaggcagttgttaatgttgtacataagaaaagaaagaggcaagccccttcatcatcatgtgtgaagaaaaacaagggatcagttacaaatacaacatcaactactactcctaatcctctgtctagcaagtataattttcaatgtgtccattcgttgtcgatacttggcaatgccagttatcataactgaactgagttttgtgtttctttatcacaatatatggaactggatccaatttcatcacctgttctcatccaagttgtgtaccttgccacatgttgtccagattgatggcttctacagaatcctcctttaaacactattcaatgggttagtaaagaaacccacgaaagaaattgcatattagtaagggagtttcacagcaaaacatagcttgcaacacaaatttgtgtgaattttctaccttatgttgg

SEQ ID NO: 34743 - DNA, 391 bp, Zea Mays
ggccaggacaggggcgggccgcaatggtggtgatggagggtaatggcggcgccggtaggatcaccattggcgtctgtgtcatggagaagaagcgcgtgcgtctcgatttccagcgcgcgttctcttctccaatggagcagattctcgagcggctccgcgcgtttggagaattcgagattataatatttggagataaagttattctcgacgatcctattgagatttggccaaactgtgattgcttgattgccttctattcctctggttttcctctgcaaaaggttcaagcatatgctgctttgagaaggtatattttttattctctatttctttatatatctctttcaaatggtaactattcttgtaagcacgtctccattttcttaataat

SEQ ID NO: 34744 - DNA, 4746 bp, Zea Mays
ggacgacgaccctgacacgcactggcaggggatccgactgcaggtgatcggcgacgccgcgaagatgccagcctctctgcggagcgcagcggcgcaggccgacgaggccacgaggcaaaactcgcagctgcacgtgatgctggccatctgctacagcgggcgatgggacatggtccaggcgtgccgggagctggcccgggaggcgcaggcgaaccggctcagtccggacgacatcgacgagtcgatcatcgccggcaagctcgcgacgagcgccgccggcgagttctcctgtcccgacctggtcatcagaaccagcggcgagatgaggctcagcaacttcttgctatggcagtcggcgtactcggagttgttcttcaccgccaagatgtggcctgactttggggaggctgagtacctggaagcgttgcgctccttccagggcagagaccgccgcttcggccaatcaaaattactctaaggcctcgtttggtttaagagtccctctattttagttttatttagttcctaaattgtcaaacagtaggattaaaacagagactaaactgatttagtctctagtctctcaagatatggttaaaaagactaaatcatattaattctacatttgcccttcatttagttcaattgtactaatagcaggagaatattaaaggctattttagtcttcttatgagtcatttagtatatttttactaattttagtccttagaaacaaacatgttagagactaaattttagtcccctaactaaactttagtccctagactaaagaaaccaaacatggtctaacttgatggagtgttacacctgcatctccagcgtcagcacccaaaagaccgtcccgactcgcgtgcaagggcgtccaatcgtcggatccacaacagcgactatgtcctgtaaccgtggcccatgagccgatatggagtagcgtgtgtgtttgcagccagttgtcacgacgcacaaaagcgcgccactagcttctgtaaggatgaatcatccagagaattgcaaacagaactattccccccgtatctcatcttcttcctctccaagcattctcttcttccttccttcctccccaatctatcgtgttaacaagtggtatcagaggggtctgatcctcgtcactgttccactctggatcccacaacctcccacccctacgacactcgtcttcgtcgccagcgcgccgccatgaacgtcgacttccagcacctgctcgacgaaatgtccaagcgcttcgacggctacgatgcgaagctgacgcagcgcctctccgactacggcgtcaagctgcagcagcgaatgctagatcgcaatctggaactggagcgtcgtatggcggatctcgacacacggatggacgacaagttggcttcgctctccacggccaacgagacgcgcttgtcgcagctcgagtcggtggccatctccttcgacggttggcatccctgcatggagggttccgtcgacgacatccgtcttcacgtctccaagttgaccaatctctacgaacggtcggcagtggagcaccctaccgtcatgactggtgtgcttgttccggctccctctccggccgtgcgcccatctgctgctgcctccacggacgctcaacctgacaggcaccgcctgaatccatcaatccgggatgatggttgcggagttgtcacaattcttgatcatcacccggcaaagggaggaggtctcggagtacggcaagaggccaccgacccggcaacctgatccattctcgagaactcagtcaacaccaccagcttctcttccacttccaccacccccgtggaaaggagagaaacagacaactctgggcgaggaccgtcggggcgctaactcaaataatatggaggacaagtggtctacccttcgggcttatcggcgtgcaaggggctgtgtattaagtgtgcagagaaatggtctaaggatcaccgttgtgctgattcgattcaactcaatgctgtgcaggagatatttgagctgttttagtgggattcggatgctcaatcagaagggaatgacccaatccaacctttagagcagatatttatgttcgtgtcggtggctgctgtatctagaatgccaggtccacgtacattttgtctgggtggcattattcatcaccaagctgttcgaatcatggtggactccgacagttctcattctttcttgaaaacaaaattggccactcagcttcaaggcattgttcctctatcagttcctattgttgttcaagtagctaatggtgctcggttacagtgttcagcgcattgtccagccactgcgtggtcggtccaagagttcaccttctccacagacttcaaaatcttggatgtgttttcttatgatgctatattggggattgattggttgtctcaattcagtccgatgcacatacactagcaacatcagtggatggtacttccataccaaggagtatcagtcttattgcaagggtccaattgttccatttctaagggtactgtggtccaattatgcttgttggtcgcgtgcctagaattagatgccatggtttctgaggccccctgccattcaagcagtgttatcagagttctcagctttgtttgctgtgcccacataattaccacctacccgagcatgtgaccatgcaatcccattgttccatggtgcttctccggtcacggtccgtccttaccgttatgctctagcactcaaggatgaaatcgagaaacaattttgtgacatgttggccaatggcatcatccaacccagagctcgtcccttctcttcttccatcacttgaatgctatcactgtcaagggcaagtatccagtaccaattattgatgaacttctggatgaattattagcaacatcttggttctccaaacttgaccttcgtgctaggttccaccagatctgactgaagtagggcgaggaaataagacaatgtttcagacacactatggacaatatgagtttaaggtcgtggcgtttggcctcacaggtgctccaggcacgtttcagtcggccatgaactcaactttagcctcttgcctgtgtcagagtgcactggtgtttttcgacgacattttagtctacaactcatccttgtctgaccatgtaatacaccttcggatagtactacagctgttagctcgagacaagtggtgtattaaactgtccaaatgttcatttgcacaacaacaaatcagctatttggctcacattatcagtgcccgtggtgtagctactgatcccgaaaggtgtcagccatcgctaattggccttgtcctcaaatagtgaaggaactacgcagcttcctttgattggctggttactaccgcaaatttgtccgtaacttcgaagtcatatcaaaactttgactcttctcctcaagaaacattcagtgtttgtgtggacgtcagtacatgatcatgcttttaacgtgctgaaacagtccttgtgcttggcgcatgtgttgaagttgcccaactttggacatccattttcagttgaaattgacgcagcaacaactggagtgggtgcaatattgattcaggatggtcacccaatagcctttatcagcaaggcattaggccccaaatctcaaggcctctccacttatgaaaaatagtatatggccattctattagcagtgtctcactagtgcgcttatttgcatctcaaagaattcaccatttttactgaccaacgcagcctaatatcattgttcgaacaacgcctccatacaatgtggcaacaacgggtgttttccaaactcttgggcattaattaccatattgtttacaaacgcgacactgagaattgagtgatagatgccctttcacggaaatcttctcatgaagcttcttgtgcagctatttcatcagctactccaaagtggtttgccgaggtgattgctggatacgatcaggatacccatgcaacaaacctacgagctcaattggctgttgatcccacattggtgcccactttcgcattggtggagggattactgcgctacaagtccaaagtttggattttccataatgtgccactacaacagaaaactgctatcagcttgttacgccagtgcattaggtggccattctagattcccggtaacatatatgaggatgaagaagctgtttgcttggaccgacatgtgtgttgcggtgaagcaatttgtgcaaacatgtctggtatgccagcaagctaaaccggacagaacccgtttaccaggtctgctacagccgttaccaatgccctcatcagcttggcagattatttcggtggactttgtggaaggcttgccgacctcttcttcatacaactgcatcttggttgttattgattttttcacaaagtatggtcacttcattcctcttcgccatccgttcactgctaccagcattgccaagttattcttgctgcatgtgtatcgtctccatgggatgccttcctcaattgtttctgattgggacagaatattcaccagttcgctttggaaggaactgtttcgtcttgccgaagtttagttacaaatgtcatcatcttatcacccacaatccgacgaacaaaaagagcgactgaaccagactgtaatacccaaacttgtaaactatatcaaaggaaataattcgcttatgtgatatgtctctatttcttaaaacatgtgaacaaccatttccaaaatgattaattagctaataacctataaaataaa

SEQ ID NO: 34745 - DNA, 3864 bp, Zea Mays
gacagcactccggagctccaccattcgattgggcaactcgtcaccgtaccaaccaaaccatcattccagccgcggcgggacacaccgcctccgccgaactaacgcgacgacgacgcacggcggcctcgtccggcaccggcaggagcgcgatggggcagaagcgcgccttgctggtgggcatcaactacctgggcacggacggggagctgaagggatgcctcaacgacgtggcccgcatgcgccgctgcctggtgggccgcttcgggttcgacgaggccgacatccgtgtcctggccgacgccgacccgtccacgccgccgcccactggggccaacatccggctggagctcgagcggctcgtggcgggcgcgcgccccggggacgcgctcttcttccactacagcggccacggcctgcagctccccgccgagactggggaggacgacgacaccgggtacgacgagtgcatcgtgccatgcgacctcaacttgatcaaagaccaagatttcacggatctcgtggccaaggtccctgacggctgccgcttcaccatggtctcggactcgtgccacagcggcggcctgatcgacaagaccaaggagcaaatcgggaacagcaccaagcagaacagaacccagcagcgccgagagcgcgaaatgaagcctcctcctcccgctcccggttccgcactccgcgtctccctcgcgcgaatcgtccgtggcgtgctggagtctctggggtgcatccactgcagtcgttgccgtgtccagcagcagggcaacagcaatagcagcagcatcagcaaccggtcgctgccgctgtcgacgttcatccagatgctcagggacaagaccggaaggcacgacgtcggcgtgggctccatccgcacgacgctgttccaccacttcggcgacgaggcgagccccaaggtcaagaggttcatgaaggccatgctgttaggcaagctccggcacgacggcaaggaagcggaggagcagtcgcgcgttcccagggaggcagaggtggaggagaccctggcgcaggacgcgcacagcgtcgaggaagtgtacgcggggccggctgcggcggcggcggcggccagggtgccgccgcgcaacggcgtcctgatcagcgggtgccagacggacgagacctcggcggacgcgaccacggccgacggcatgtcctacggcgcgctgagcaacgtgatccagaccatcctcgccggggacggcaagaagcgcggcgtggcgctggcggtgacgaaccgagagctggtggtccgggcgcgggagctgctgtccaggcaggggtacacgcagcagcccgggctctactgcagcgacgagcacgccacgctgcccttcatctgctgaagacgaaataaactccgtgtacagtgaatttcaggcttcattagttcattttacgggatgctacgttgtgttgtgtgtgtaacagaattgacactttgtgttgactcgtggtgtgccgcagcctgcgtatgttatggtgttactgttacgttgttacctgatgacgttgaccttcttctcagtccctgctgtcctgctccaaagtgtgcaagtgcgaaggggcggcgatccaagatcacacaaaggacaggggaaatcgaagccaccgagcccccacacgtcgccatcgccgtgatcgattataccgccgtctcctccccccgcagcccgcacccaccccaccggaaccgtcgtcccgacctctcgccagcgataagcaaatccccgcctcactctctcgtccacagacaaagccacgacccacaagtgcccccctcctcccgcgctcccaaatcactccctctctgtctctccactccactcgccgccgccgccgcccgaatctcaatggcgtccgcggccgccccgccaacctccctctccctcgcggcccgtgcggcaagcagggcggccgccgccccgctccgcaggggaggcctcgccgcggcgcgccagccggcgcggtcgctggcgttcgcggcgggcgacgcgcggctcgcggtccacgtcgcgtcgcggtgccggcaggcgtcctccgcgcgcggcacgcgggccatggccaccatggcgaagaagagcgtcggggacctcacggaggccgacctcaaggggaagcgcgtcttcgtgcgtgccgacctcaacgtgccgctcgacgagaaccagaacatcaccgacgacacccgcatccgggccgccatccccaccatccagtacctcctcggcaagggcgccaaagtcatcctctcaagccacttgggtcgccctaagggttttacacccaagtttagcttagccccccttgttgcacggttgtctgagcttcttggcattcaggtgcaaaaagccgacgatgttattggccctgaagttgagaagctggtggccgccttgcccaatggtggggttttgctccttgagaacgtaagattctacaaggaagaggagaagaatgacccagagtttgcgcagaagcttgcctccgtagcagatctttacgttaatgacgcgtttggaacagcccacagggcacatgcatcgactgagggagttacaaagttcttgaagccttctgttgcagggttccttttgcagaaggagcttgactaccttgtcggagctgtttcaagccctacacgcccatttgctgccatcgtgggtggttcaaaggtgtcatccaagatcggggttattgaatccttgttggagaagtgtgatatccttctcttgggtggtggtatgatcttcacattttacaaggcacaaggtctttctgtcggtgcttcgttggttgaggaagacaaactcgatcttgcaacatctctacttgcaaaggctaaggaaaagggtgtctcccttatgttgccaaccgatgttgtcatcgctgataagtttgctcctgatgctaacagccagattgttccagcatctgcaattcctgatggttggatggggctggatattggcccagattccattgctgcattcaacgcagccctggaaacaacccagactgtcatctggaacgggcccatgggtgtttttgaatatgacaagttcgctataggaactgaggctgtggcaaagaagttggcagaacttagccgcaagggtgtgacaactatcatcggaggtggagactctgtcgccgccgttgagaaggtcggagttgctgacgttatgagccacatttccaccggaggtggtgccagcttggaattgttggaaggaaaggagcttccaggagttactgcattggatgaagcagccactgtgactgtatgaagcaagttttcattttgtttcatcttcttttttggaagttaccgggggagggactcccacctgaataaggtgcgcaaggccaggattgttggctcaaccacagggagcgcacgccaccgcatcatcttcatgtaccattgtatacttgctacattcttgcttgctcctcctcagccgctcgaaatgtaggagatcaatgatttatagagctctggaaatcgtttgaacaaggagtaagcgacccaagtaatatgcttactgagtcatctttcctttgtgacgtaacaaattacataaaaacccttcgaaggtaacctagcctattcaaccattggtaactaggagttttatcctttgtgcaccaggaccagctttgccgagctaagtgtgaattttcttttctgttctttgtcaaagaagcaaactctagcgtcatgcctcgttagaatctagattttacgttatggagttctgctgctgaatctttttctgggccatgacattgtaaaattactgtttggtctctggcacaattttttttcgcttt

SEQ ID NO: 34746 - DNA, 1023 bp, Zea Mays
gccggtgccactgccagtgcgacacggatcacgcaatgcctcccaccatgctcgcgccggtgcccaccaggccgcgctccaaccccttccgccggcgcagaggagctgctccgctgcttctcgatcagacttcggcgaagcggcccgctgagtcgtccacctcagcctcatcctgcttctacagtgaggtgatctccaactcctccacatccctcgccccgtatcagcgcctggagaagaggcatcgacgccaggacacagacgcgggcgaggcgcggccggctggctccgagtgctcggaggtgatcggcggcgcgagggtgcgccccgccgaggtcgaggtctccgaatcgtcctgccctgtctccgtgctcgagtccgacctcgcctgcccgaagcagctcgccgacgacgctgaggcgatcgagaaatcctccgcgtgcgatgagctgaccccgtcgtcggagcccgatgaggaggaggtgctcagtgatcccagccactcggggtactcccccagtcccctgatcagctccccattgaccgaagatgacagcgacgacgcgccctctgcgaccttctccctctttctcgacttcgccaagcagttcgtcccctgcttgcaccccaaaccgtgcaccgtcaccagttccactctcgatctcctgacggggaggcggtttgaggacttggacgacgaggagagctacgagcgcttccggcggcgcgagcgacgcgaggcagttgcgcgcgacttcactgaggtgtgcagctccacctccatacccgacagctaccgccctctcgtcgtggagcaacgtgtcatcatggtgaactggatcatccagcattcacgtctgatgaagctccagccagttacaatgttcatgggaattggattgatggaccgcttcttgacacaagggtatatgaagggtttgagaaaccttcagttgttgggcattgcctgcatcaccttggctacacgcatcgaagagaaccagtcatacaattgatatcgac

SEQ ID NO: 34747 - DNA, 2291 bp, Zea Mays
atcacggctactcacgcgtggtcttcgctcccccgtcctctcggcatgagtgacaccacccctgcggccacagcactgaaccactggaaccgctcgatccagctcgccgccgcgtcgggttcttacggccactgcctccgcctctacgcgggaccgctcctcgccgcgggcctccgcggtgacgcctccactttcccttccctcgccaaatcctgcgccgcgctgcgcctgccggggctcggccgtgccgtccacgccctcgcattcctctcgggcgctgccgtttctcgcgacgccttcgtgcgcacctctctcgtcgacatgtacgccaagtgcggcaggcttcccgacgcgcaccgcctgttcgacgaaacgccgtgctcgagccggacgctggtcgcctggaactgcatgatctcggcgtacggacggagctctcaggtcgaggaggccgtcggggtgttcaacgctatgcggcgcgcggaggtcaggcccagcgggagcacggtcgtcggcctcctgtccgggtgtgcggactcggtgtccgcgaggtaccctggggtgtccgtctatgggctcaccatcaaatcgggccttgacgcggatttgcttgtctcgaactcggtgctcaccatgcttgtccgtggtggccagctggactctgcaaggctgcttttcgatcgtgtggagaacaagtccgtggttacttggagcgccatggcatctgcttatttgcagacaggggactggatggaagtgtttgcactgttcagcagcatgcgagagacagagcaacctatggattcagtcgtgcttgccaatctaatcacggccgctatgctgttcggaaacaacttggtggctaaaggcgtgcacgcccttgcaatcaaggttggttttgatcgtcaggaggatttggcagcatccttggtaaacttgtattccaagtgtggaaatcttttggcagctagagaggtttttgattcactccagtggaagagtgtaatcatgtggacttcgatgttgaacggatatgtcgaatgtggttatccggatgaggctctggcgacatttgatgccatgttgtgtgccaaggtagagccaaacaaagcaaccgttctagcggttctttcagcaggcgctaatctgggatccgctaatgttgcccaaaaggtcgaggagcatgtgaaagcaatggagctgcagtcagacctgcaagtttgtactcgactgatagacatgtactgcaagtgtgggagcatccagcgtgctagaaaaatatttgacagtgttcctaacagggacttagctatctggagtgccatgatcaatggacatgcttgcaatggagaaggcagtgaggctgttgtccttttcaacgagatgcagagcaaaggtgtccgacctgatgccattgtcttcactcatatcctaacagcatgcagccactctggttcagtagatgaaggtcttcgctgctttcatagcatgactgcagaacatggtatcgaaccatcagtcgaacattacatgtgcatgattgatttgctttgtaaagctggtcatctcagtagcgctataaagttctttggtgagatgccagttcggttgcgaaaccaggttttggctcctctaattagtgcacacagagttaatggtgctgattcatccgtagagttcatgtcagaaggactactgaacctgggctcccaagattctggtcactgtgtcctaatttctaacatgcttagctgtttggggcagtggaagaaggccagaagttataggacgctaataagcaagcaaggattagtcaagaagcctggatggagttacatcgagctgggtggctagctgctctatgtttgtagagaacccaatccaccgaatcctacgagatggcatgagttctttcaagcgcttttggaccaggctcagtctagttaaggcaatgagatttagtatgatgctggagtttgcattgattcggtgtgacaaaatgcaaagacaatgagcacacacaatcaggaaactagtccgtattgagttgaggcttaatgaggataagctaaggtcgtgctcagcagagcgcagagcgtatagttgtgtaaaacacatttttgcgttcagtggagcacgtatatagccgtgtaaaacatatttttgcattgtaaaccgtactgattacatagtggagtttgaaataagaattgagataataaatatgatagaaaggctgtcggagatagcctaaggactttctggatgtagttgctatggttaaatgaaat

SEQ ID NO: 34748 - DNA, 1776 bp, Zea Mays
catccagtgctcctaaatgagtggaatctggggaaggaacaaccaagaggaaatgcaagttaataatgaggcaccactagggtgcctcaagccaaatatttctcagtataactctccagagcagataggtggtgttgaagggtttcctgagaataatgaaaaaaggaatgatattgttgctgcggaaaaaatctgggaggcgactccaaaccaaggccttagcaggcccatctaccgacaagaattttatgcctggccatatatttattcagattatcaaatcgtgcgtcagccactaccttatggttttgacaaccaattttatcagataaatagggaccacggtttccctattgagaacagggttcaatatcttccattcaagatgctccctcaaggtcacccccatgatgcacagcttcaggaatttcagtattttgtggttattgactttgaagcaacctgtgacaaggtgaacaatccatttccacaagaaatcatcgagtttccatctgtcttggttaacagtgcaactggaaaactcgaagaatgcttccaaacatatgttcggccgacgtatcatcaatttttgactgatttttgcaaggagcttactggcatacaacagattcaggtggacagaggtgtgcctctaggtgaagccttactcatgcacgataaatggctagaggacaagggcatcaagaacacaaactttgctattgtgacctggtctaactgggactgccgtataatgctggagtcggaatgcagatttaagagaatcaggaagcccccttattttaacaggtggatcaacttgagggtaccgttccaggaagtgtacggggacgtccgctgcaacctgaaggaggcagtccagctggccgggctcacatgggaggggcgcgctcactgcgggctcgacgacgcccgcaacaccgctcgcctcctggcacttctgatgcaccggggcttcaagttctccatcaccaactcactggtgtggcaacctgccgccgctccgcagtcaaccgccgccacctgccacttctccccggaccgctctccggacccagtcgtcgtccagctccagcaccagcagcagcagcacaagccgaaggaggcgctggggtctcccgcgtcgctggtgaacccatcgtacgccacccccgcgggagggaaggacagagccatgtactgctactgcggggtgctgagccggtggagcgtcgtgcgcaagccgggacccatgcaggggcgctacttcttcgggtgcgggaactggaccgccacccggcgcgccatctgcccgtacttcgcatgggcctcgtgaatagcaaagcaagcagagatctgggctggtgctttaaccgagggaggcgcgccatgttgctgcggctggctgctgcgcctcccagttccgtatatattattattgttattattatggtataataactttgctcgcgagacaatggaggttatctaggtagtgtctctaacctgtcgtactgacttctgtcgatagaagagaatggggccagatgctgcttaggtgtgatctatcctatccatccatggataataaagaagtttgtggattgctgttttattaacttgatggaactcctccgtaggtgtggtttgtgcaacttggattttgaaggcttgtgcgtctgtgagtgtttgatcaaatcgaaggtggtgtttgtttgctgaatgaaatggttatggaaggtgcctattattcctgacaagctctgttcagtgaga

SEQ ID NO: 34749 - DNA, 155 bp, Zea Mays
ccttgatcctctctccctcttcaattcaacgtgttcctcctcttctcgatctttgctgcgtgggggagatctagagggaggaggaatccatggagaggggcttccatgggaggagagggcggccagccaaggggaaagggggaggggcggccaag

SEQ ID NO: 34750 - DNA, 2399 bp, Zea Mays
ctcgtgtggctggctgtgtcctccatcctttcaaggacctcgggaatccagaaaattccggtggtcggtgcccacggacaggcgtgtgcgccacgagcccgacgaacaagggaacgaggccatttccaccggtcaaactaggagaagcaagcaaagctccccgccattagtagaatccgcccgaagtctgccccgctcttcggcctcgtcccttctctccagggccatggatgtagatgatgtgctcagtaacttgcgtgttgttggtgtgccaacaaagagtgcaatttacatatggggttataaccacagtggccagactgcccgaaagggcaaggaatgccacttgaggatccccaagagcctccctcccaaactattcaaattggggaatgggaagagcctcaggtggaccgatattgcatgtggccgtgagcataccgctgcagttgcttccgatggatcactgttcacctggggtgctaatgagtttggccagttgggagatgggacagaggacagcgcgaaagagcccaagaaggtcaagtcattggagactgagtttgtaaaatcagtatcctgtggcgcacattgtacagctgccgtcgctgagcctcgagaaaacgatggcacggtatcgaaaagcaggctttgggtttggggacaaaatcagggttcagattaccctcgtctattttggggagctttcacaccaaacacggtgattaagcaagtttcttgtggagctgttcatgtcatggctctatccgaggatggtctactgcaagcatggggtactgtgcaaccttattcatgatttttaaagcaatgtactggcctgttgttctttactgacttggtgcaaaccttgtcaatcagaagtggtagaacttattgtttgggtatgaagatagcttgttgagagttgtgactgaaaatccttcttttttaaaaaaaccaacaacaggatgcacggccacttgatttcaaaatttatatttctgactattgatgggacgtgctattttcttactaaccaggctacaatgagtatggtcagcttggcagaggtcgcacttctcaaggacttcagggagctcgtgtgttaaatgcttatgcaaggttccttgatgacgcccccgagcaagtgaagattgttagagtgtcatgtggagagtaccatacagcagctatatctgaaaatggggaggtgtatacttggggactgggaagcatggggcagcttgggcattgctccctccaatctggagataatgagctgatccctaggcgagttgtggcccttgatggtatagtagttggggacgtttcttgtggaggtgtccactcttgtgctgtaactgaagggggagctctatatgcctggggcggaggacatgtgggtcagctgggagtcgggcctcagggtggcttcttctcttgctcccttaatggatccgacatgctgctccgaaacatcccagtcctggtgataccctcaggtgttcgtcttgctacctgtgggcactcccacacacttgtgtctatgaaagatggccgcatatatgggtggggctataatagttacggtcaagcgacgaacgagaaatctacttatgcttggtttccctctccggtcgattggtgtgttggtgaagtgagacgactcgccgctggaggtggccattctgctgttctgactgatgcatgttcgctgaaagagctgtgcgaattcaagctcgcagagaccgtgaacctttcaaatgctcagctaatagaagatgttgcatcgcggactggtgcggatgccttggcacgcttgtgcgagaaagtaagggagcatttggataaggaaggagaatgtgaattcctggaaaagcaagtggcagaagaggtcaacactataggcagttaggccactagcaaaacagttcaagcagtctgaggctgaagccagtctgggattaaacagggagtcatctacaattgatagcttgacctcccagtaaagttactgattcggacattaattgttgtggtgatcatggaaaatatgtgactcgtcaattgattctgattggtctgtagacctccattggtggtgagcctctcagctgcatcggggaggcgcagaggctctatatgtgtcatgatcttgttccgaactgtcaggttgctgtaatgtagccaaatggaaacctttgtatccctggaacttgaaaggcatgtacctggtatctgcagccagtaagtttggcaatctgaattcgatgccaattcctgggcgtattcgaacgtcctacgtccatgtatttatttcagttcatgtgcatctaaacaatattggtatagcatgaaatttaagtacatcaacacacatttaataggattaacagaat

SEQ ID NO: 34751 - DNA, 84 bp, Zea Mays
atgtctcaagacaaaaaaaagttgttgctgagacaaagctgagcgaagaggagaagctccttgaggagaagactgctggatttg

SEQ ID NO: 34752 - DNA, 3421 bp, Zea Mays
ctcgtcgtcgcgcgccagcgcagctgctgcagtgcaggaagggacggtgtgaatgaaaggcgctcaggataaaaggcacagaaagaagcaggacctccaggttctcgggcccttcccgggatgcctggggaggatgatcaacatgttagacctcagcaatggcgtggttgctaccaagatgctcactgagaaggcgcatagagatgtttctccggccggaaaagaccggagtaatactttcaagatggcaattaatcccccagctcagactgaagataaacaaagggatagtcagacaagaaggaatttccctactaaaaggtcaaactcgcctactaaaaggactggtgcgatgcctgttaaaatgctgatggagcaggacatgtggaaagaaagacggcctgatgaggagccactgaatgttgttgcaagattaatgggcctacatgagcctccaggtcagcaatccaatttccctttaggaagacaattggataagaaatatcagtgtggtggttttgaagagaactactggaatctcaagtcaaagaaggaaagcaaatgccaccaaaaccaaaaggcagggccacgccatcagcacacttggaatggttctggtgaccaaccatcaagaatcagtagcagccagagcatgcaccaagaaaatgagacttgtgagaagaggatgtcaattgttcgcgagaagtttgctgaagcaaagcgactagccacagatgagaaacttcttcattcgaaggagttccaagatgcactgcagtttttaagctcaaatagagacctattcttggagttccttgacgagccaaatcctctattatcaagcaaccgttatgagttccaacctgttgcaccaccttctgaagtaaagcaaataaccatactgaagccatcagaaccagcaaagagaaaagacagcatctttgtggggagacaactgttttcagatggagatggaggtgaaagtgaacgaaacagatacaggcgccatcagagttcggatgtttccccagcaaattcaaatttgtctgagccaacaaaaattgtagtactaaaaccaggattccccagttctcatgactccaggattgcgaggtcttcattatcatcagcagaagacagtgaagatgaaagtatgatggcggttgatgaaaccatgtgctcaagaaggttggcaaaggagatcacttggcagatgaggatgcggctaaaagacaggcaagacgaagagagtatgctctcatgtgaataccctgacttttatatcggagatgactccttcagtaaatcagaagttgagattccaaaagagatgtgtggtgaaacaagtggggaattggagtttggcactccgacttctggccgctcttgggattttctgagtagaagtggaagtcctttctctgcgtcatgctctagtcaggcatcccatagaagggagccgtcagtagttagggaaggcaagaagaagattttagagagattgtctatggtatcatcaacagtcaatattgaggaagaaatggaaggtcgcagaagtacaggcacacttggtgacatgctcacaatatcgaaagtcaaggaccaggaagaaattggggctgaaacactggggagcccagcacctgagctggaacctgaggagcctttctcatgtttgccaagatctcgatcccttccactttctttgtcctatggagtcgctgagtcaaatggaataacctctggcactcatgaagctgaaaaggaaagaatcaggaagtcgtcatcgtttagggaaaaagtttctagcctgttctctaaaaataagaaatcaaccagggagaaggtagatccatctgtgagcaatagactcaaacatggaggggctgtgactactggtgatgtgaaggaaatctgcaaccatcttgccctagacaatcttcagaaacaacatacttgtctaaacacagatgagaagaacactgtgcaaggactcgtgactagttcttgtgagaccaatagtgcagctgatatccctgccaaggatatttcctccatttcaagtcttggtgtcccaggaatctttggtggccttcaggatgaacctagtcctgtatctgtactagatggaccgtttatatgtgataacaataggaggctactgtactcatctgaaaatttcatcacttcatccccacaagctttgtcaaggtctcccctgatcggatcattttcacggtcactgtcatgggaggatcccccgctggaagtcatgtcgccgaattcgttgagactctcaaggcttttctcgaaggctgatgaagatctagattcactgacgtttatccagaagctggtccactctcgaggcacgggtcgagaaagttgcatattagctgaccctttggacccgagtttgctcgagaagatttcggattacgaagaagatggaattaagtttgggaaaaggcggcccaaacagaggctccttttcgacgccgtaaacgaagcgctcatcgagcttgcttcgatggcggaactggctgcgtacccctggggtagatcatgctcttcggagcacggggattgcaagaacggttccagcagtaattctgcggctgaggaaatctggcgggtcattaggaactggtcgatacttgagaagtaccctcccggtgaagctattgaaagaaatctcttgctggagatgatactaaagagggaggtggcggaggcagccagcgctgacacgactcggttagagacgtttgatctcaacaccacggtctgcgccatggtcttggatggcctggttgaagagacagttgtagatctgactaactactgctagtgaggaaggagatgcttgttgctgttgctgcctggttggattattagggttcctgtgggcttggctgccattgccatgtgggcgtgccacgtgggcccgcatgccaggcagtggagacggtgcacagctgctgcaggtcactggggacctggaggagcgccagcatgcagatgcaggtggtggccaaggaccgggttagctagccctgttcatcttttgttcaccttttcaggggagcatgtgaatttccctggagcatctgcaactctagcagtgtgatttctctcgctcctcgcaagttgccactgtttgtggtctgatgtctgaagaaaacacagcagtgggtctcggctctcttgttctctagctaggggccctcttgcctctccagttaaacaattcaacggtagctgtagttgttgcgagcacgggggactgaactgactgtgtgggtgacagcagggtaaagaaagaaatggttgtgactcctctctgctttgcttcaggctttactcttgtatctattgtgccttttcgcttggcattgcataccatcagctagcatttttt

SEQ ID NO: 34753 - DNA, 1877 bp, Zea Mays
cgcacgcgcggcaccacatctagtagagcctgcctaccgccccactgtcgtcgtcattaattcaccaggctagagctagctagctggctctaccgccgttccccgatcgagcgtccgtcatggagattgatgagatggagagcggtgtcgtcaatggaagcggcggcggcgggtcgttccggcgggcgaggtgctgggagctgctgtgctcggcggcgggcatgctctggggcaaggtcgtcgggttcgcccgcaagctgggcaggatcgcgagggacgacccccggcgggtggcgcactccatcaaggtcggcctggcgctcacgctcgtgtccgtgctctactacgtcaggccgctcttcaacaactggggggtgtccaccatgtgggccgtgctcaccgtcgtcgtcgtcatggagtacaccgtcggtggcacgctgagcaaaggcctgaacagagcgtgcgggacgctggccgccggcttcatcgccgtcggggctcacaaggtggcctacctgtgcggcgacaaggccgagcccgtgctgctcgccgtcttcgtcttcttgctctcgtcggcggcgacgttctcgcggttcatcccggaggtgaaggcgcggtacgactacggcgtgaccatcttcatcctcaccttcagcctggtggccgtgtccagctaccgcgtcgacgagctcatccgcctcgcccaccagcgcttctccaccatcgtcgtcggcgtcggcacatgcctctgcaccaccgtcttcgtcttcccggtctgggccggggaggacctccacaggctcgccatcggaaacctcaacaagctggccgagttctttgaaggactcgagtctgaatgcttcagagagaacgccacgttcgagaatttggaagcaaaacccttcctccaagtgtacaagagcgtcctcaattccaaggccaccgaagactctttgtgcaattttgccaagtgggagccctgccatggcaagttcaagttccggcacccatggagccagtaccagaagctcggcgctctctctcgccagtgcgcttcctcaatggaggctctcgcttcctacgtcatcaccctcacaagaaccgagtaccctgaagcgcggcccgagctacgctcggaggttcgaacagcgtgccgccagatgagcctgcactcggccaaggcgctccgcgagctctcggcggcgatgcggacgatggccgtgccgccgtccccggccaacgctcacatgtccgcggcagccaaagcggccaaggacctcagggacgagctagaggacgcggacctggcgcaggcgatgcacgtcgctgttgtcgcgtctctgctctcggacctggtgaccaaggcgaagcagatcacggaatctgtcggtacccttgcgcgacttgcccgcttcgtcaagaacaacgaccatgagaacaacgctgacgacaaggatattgcggctatcgatgctgtgagctgagaaagctagcagacggtcctgtggcggcaaaaatatatcctaattaaccgtgcatccagacgttcatagctatctaattcgcacatatcgaagatcggatggctctgaacgtctagatgcatggctgcacaagttaatatggatgcacaatatatatgcgttgccggcgatcttttcggtgggacttgactagtgatgttctatatttggcgtggtggggaatacatgtatcagaagcatttggtaaatgggataaaagtaagtcgatatcaattagtacaatgctagatgcgcatgcacagcaagtgactaattcttcgatttgtacaagtcgttaattacgatgctggtggtaaaacttcactgtcttccaccaattaacctctctcggca

SEQ ID NO: 34754 - DNA, 1456 bp, Zea Mays
ctgctacatgcccccgcccgaaaccccctctcggtccccgcttgcgatgcccccggtgtgacgcccgcgctcgcctcctcatggatcgcacgcccaccccgcgtacatctctgggcggcgatgcccgccccatccttgctccattctcgcggtcgtcggtcgaccctacctcgccatcccccatcccattcgcttgcaccagcggcccgagctccaggtcgagtgccgagctgtagaagggcaagatctacttcctcatgccggtcatggcaagttgcccaccccgacgcctgcgcccaataagccgcccgtcgatcgccggtcaatccgcttcggtgcgaggaggcgacaacgtcctcttgctccgatccacctctcccccaacccgctaggacgccgctgccgagagcgagcagaggcttccctcctccgacgggggaggaagatgctcaccaagttcgaaaccaagtgcaaccgggtcaaggacctcgccttccactcgcgtcgtccatggatcctgtctagcctctacagcagcgtcacccagatgtgggtctaccgcatgggcaccatcctcaaccgcttcgcagtggcgtccagttccacgccacataatcgctctttgtatccggagtagtatcgctccccttcctgactggacgtactcctagcccactagcattggccttgagcacgcacgaaggctcattcatcagtaactatccggtgatttgccgtataaactgtcacatgatgtttctacctcacaagtggttgtactcaagcaattgagataatttgctctgtgttagctcgtcatggtgcaaacatcctacttccaagacttggatttatgttctatgaagcgcgtgctgttttcaatggcatggaggccatgtacttcaaacagcgacgtcaaggaagatgatgatggtcgtagggatcgacgatagcgagcaaaacttctacacactgaagtgggcacactgcagcacttcttcccgccaagcaagctgcaacagtactgccttgtcgtcgtcaccgtcaagccctctgccgcctccagtgtccgccctgccagcccagaactcaaagagtaaatgaagatggaagaccaagatgatatttatggagactattctgatacattgtcaagcactgagttcgacaatatgaacatctcaacatactgatccatggaagaacatgtatcattgtttaatgatgaggaaagacagggatttctcttaagtacaatgcttgctagcgtgtgcgacatgccagatcacccaaaagattgacaaatgatgtgtatatggttgattcatttaattttgttatgcattttggtcactataagaatgcattctttatgtgtgctaatatgacatcctaggacctgacgcttcaattttcaaattggttattgatgtatctttttacatgaagaggtaat

SEQ ID NO: 34755 - DNA, 950 bp, Zea Mays
gggaactgatgtagagaatttattttttgtcaaacattgtatcctcgtgttactgaatttgctggggtgtctagggtgtgcactatgcaggcgtgcccaagtgcagcagtgccatccctgacaacagattcggagaagaagggcccagtgataatggaaattccactggaccaaatccggaggccactgatgcgaacgcgggccaatgatccagtcaaggtgcaagaactcatggacagtatccgtgtcatcggcctccaagtacctattgatgtgttggaggtcgatggggtctattatggcttctctggatgccaccgctacgaggctcaccagcgccttggtctcccaaccatccgctgcaaagttcgccgtgggacaaaggaaacactgaggcaccatatgcgatgagttatattttattcagttacaaagtgatctgtgtatctagagctaaaacagaagcttccatggtcttttcgtcgtctcgtctgcaattctccatacctgtaaatgttgtccaaacagagtggtgaatagtacttctgtacccagcagcatcagaaaatgttaattttgcctacaacactcttttcgatcagtggatggatgagtaccacccgctcagtagatcattccatttctacgagatttttgtaaaaaaagaaaaatgcagcagcagtcggcacgctgtgtcatttagatcatctagaaaaccagaaaaaacgagtcatgtaacttgtttggctcgtgcaaaaaaatattcaaaaccaagtttgcttatactggatgctgatgtgtcatgctatgttggggcacactaatgaaagtttggagatttaatttatatgtcaagtttgggagctcaaatgctaagtttgatgatgcaagtgactctaacatggtacgtcaatgttggtatccagttttagcaaatctgatttaaatct

SEQ ID NO: 34756 - DNA, 2606 bp, Zea Mays
gttctaccactgtctcctctccgtgacgcacgcccgagatcctctccgcgacacacgcctccctctcctctgccccaccctcctccccacgccatcggcgccgccatcatcggatccggcccaagatgcctccgccccacgcgcccgagtcgtcgaggcacactccttcccgcctccgtcgtccacgcatatctccgcctcacctcggcgcccgagtcgtcgcacgcgttcgcggtggtgtccatcccggcaccggcctcacgcaccgtctacagctcccaactctgctcctctcagttctccctccgcatttcgccttctctcccttcctctccaagcagcgtcctcctcgcctagatccgtacaagcggcaaataacctctccggcggcgagacagatggagtcgacctccggcgaggatgctccgaagcacaacccgattccgtccgcgctcgtctccaacctacagtccgtgctcaccgcccgccgcttgtccgcagccgaggtcagcaccgccgccacagctagcgaggttgaggccttggcttaggaagcagaggcgttcgctgcccccacgggagatgggacgctggcgaggcccatcgtgctactgacctatgccggggggatccggtcggcgggtctcgcggcgctcgtcgacgccctcgttgccgccgaccgctgcgacgtccacgtgtgtgcccccgaatcgtacgtgctgcgacttagaaaaccaaaccacagcgggaccagtgctcggatagggtccgacgacgatgcaagcaaggagtggcgcgcggccgacggggcgcagatcggctcctgcacgtgcagcgcagccgcgtgacagtgaagcagggaggccgcgataggtggcgcagggagggtgcgacggaggcaaagtgcaagcacctggggacttcagaaagaaagagtacaagtctactactgcagaaagcaaggagaatgccaatagaagcagatttcatgtatggatcgggcgcccaacaatgaatgatgtggtgaaggaacttgagatcatcagatagaatgaaggggcacaattgttaaactcagcgtctttatcagttgaacaatttggaaacaaaaagagaagagatccttatgcatttgtctatggatgatggaagcaacaacaacacttttgactacaacagtgggagttcaattaagttgttcacccaagtagataattgtctccactctttcaacaagttattggagttattatatatgtctgctccatatgaatgccttttcattttagtatcacatctgaaattaccaaccttttatactggcagtgtgataagcattgaataaaagtttttttatatgttgaatattcaacaatatatgtataattttatatatacataaatataatattctcatacgcgtggttgctccgttggtatattgttgaaaggttgttttttacggtacatgtgctgaaatggccatgctttgatctgcctataggttgaaccatataagctttctctcagactcgattatgctgcttacatgatccatttagctgtctttggatttttggggtaactctccaatatctcacatgaggttctttgtgatagctgttacttaatctgtggtgatctatgtaaatgtggcaacacttgcagttcctcgagcccttgtgcatggatatatcgtttagttgtgtctaataatttgtaattagtggcaacatctttttgttattttggttttatctgatttttattgttataagatctcgattgcaaactggcagttagtacacctttaggttttcctttgtcgtatcaagctaataatgtgtgaagcagggttcccattctgatctttagttttttgtgattttaatagcaataacctttttcgcaaaaaagtaacaaactttatgcagtatgcggttcgtatagttcccagtatccttttggacttagatttagttcgatatatggttatgtttattgacagaatgcttttagctttgcagataaaatcttgagcaaaatgggagaaggtttgggttttctgcaatctgtcgtctcctcttctgctgggtatctccattattattctaatgaagagggctacgagttggattttcgtaggtacatttgagcgtgttttggaatgctgggatcgtgaaacacgtgaatatgttgccataaaagttgtacacagtatccacaagtactgtgatgctgcaatgattgagatagatgtgctcaatcgccttgtagaaaatgaaaaatatagatttctgtgagtatctcagagacctaattgcttaaagtataaccctattctgtttttgacttgacagttcctcttcaatttgtcagctgtgtttaaattcagagatggcttgactatcgtaatcatatatgcatggatgtgttactttatgtttgtttgtgtttaatatagaaggctcccttgccttcgttcgatcatgtggtatttgaaagtgatgtctctataaatgaagtaaggcagggcaatgcttatgttactgttgtcagttattagatttttaaaccaagcatatgtcaatgtgtcctgtttcaat

SEQ ID NO: 34757 - DNA, 1787 bp, Zea Mays
aacccctactgccttgccagcgcgaagaaccttcgcctcgatatcaatctcttcctgtaaaaaaacatctcatgtctgtcagtgtcaatcataccaattgggtaatcttgttgcagtcaatcataccaattggataatttgcttactcacatcagcaaaagcagcatcaaggtaggagatgttcatctcaaggggtgagcccctggtgcgtagcccggcagtggcgaaggcggcggaggcaaccagatccacgagggaggcggttgcgccgccgtgcaggaagccgcccgagttctgcctcattcagggatcagggaggattcagaactcgactcgggggcagagagagagagagagagagagagagagagttggctcacgagtagtctggagggcacgttgaagtggcagaggagtgtgccgggctggagggcctggacgacgcggattcccctcaggacgaaggcgtcgtagaaccccgagggcaagctcggtagcgcctccgcctctgcctcactcgtgaaggtctcctccagcagccgcctcgccgtttccaacgacttgttctccccaccgaaatcgcccgagtcggaggccatcgcaattggattcccctcccgctcccgttccctttccctccccaccagaatcgttaatcgaggaggacgaccaaagcgagaaagaaagagacaggcggagaggcgcccgccacgtctttacgctttcaaaggcaactcacgtaatccctacgtgaacagcgtcttccttcctgccggcgccgatggcgagcatggcagccgtcttcggcgaggccaagccggacaaatccaacaaagatgccgatgctctcctgcgccgacccgtgctcttccacgcccactcccagggcggcctccgcgtcgtcgccaccgacctccactccttcgcttggcatcgctccctcgacctcgacggcctccgcgacctccaagatgacgttggcatcgctggctcctgctccgacttcctcgactacctctattcttccttgtcttccgaccaagtcaggctcttcttccctgccgcggccctaggtcctgatactgctgagcttgtggctaccaaggcaaagggactacctcgcatcactctctctctcgatagagttgccgcatctgcgctcaaagatgtcattgctgatttctcccttgcgctctatgaatcttacaagaccaggcaggaacatgcatccagagaacaagaacgagtgtcacagctcatggaaaatctagactctgaaagagaaaaaaacgaagtaatgcaaaagcaacttgaagccctttcattcctcgacaaaagaaaggctacaaagccaaagcttgtgactgataagtttccaagtgtgtcgggtgcacctccaagctctgatcaaatgattgttgctgtacagcagcaaacaccagtggctttacctagcaaagttcctcctgctaaagggcaagagtacgaggagctttgttgcaagatactgaagaaaatgctgatgataatacttagatattgctgatttatcagcattgattaactctttggcatgtaaacttattagtacatttctgctggacttatgtcaaacttgtggaattaaagtacacgcagctcatggtgtagaaaaggtatgagactgtgttcctacaagaaaggattgtttccctagaatattgtggcttttgaactcgtctgtgatgctgctttgatctcgatgagcttagggtgcctatcaatacacatctatagctgtttcagtg

SEQ ID NO: 34758 - DNA, 1497 bp, Zea Mays
gcaatgcaaggggagggggctgcgaaggggcagcgttgcagttagtctgacattttacgccgtcagacgactggcagactgggccgccgccgccctaaaccagctgaggctttcgttggtctcttcgccggcaacgagcaccaccagcggcgtctctcttgtgcggggcgacagcggcggaacccgcgccgccgccgccgcaagagttcgctcgtctcgcacctcccaaccttgccgtcgcctgagcacgcggccggaggcccgcgccggtgcgaggatgtcggtagcgaggcctctctgttttactcacgcgttctctgcccaaacggcggcgccgacctcaatctggtgtgctatggcccgatatgtggcgacggcgtggtgtcgtgtgggtgggaatccacttcgagctggtgaggtggtacacgggcaacaacagcggtggcatctcgacgcacgcgtgtggcgcggcagcggtgctgtggtgcactcctaacttcgaaggttttgcaaaaaatattgggtgtcatgtgtacatccatgtccttttactggagccgcctctcttctttgcgatgagaagcatatgtcaccatcctatactctttgatggttatttatgtttttatgtgtcacctttagtttagttttgatctctgctcaagattgtgaagtttctaggatatggtctgttgtcgtcttgctaggtgcattcgttgctccattgcaatctacctttgattttattctgttccgttgcaaacgaaaatcagtcatagttttgatttatcataaattagtacacagacacatggctgaatgttttttgctatcaacatagattggctacaatacttgtacgctactgacatattgttgtatataacctgtatgctgaataggagtgaagagttttgttcgccgtgcagtttaagatgtcagaagcacttcagaaagataaggaaattggtgaagaggaagaggaagaggagtatgtattgttagagttggacaattgtctttattcagacatatcgcctggtgctcagttcgtactctctggtttggatacattgacgcctaccttgatagtaggtgacaatctgaagatggtcggggaatatgatgaaactattggcacctgctatctattttctgaaagtgaaactgaaccaaaacctgcaagtgatgagctggcaccttctaaagaaaacacagaaacaccgcttaacagcagtaaggaagcgcccttgaaggaggtgaaccatctggccagcgttcaaaagatcctcaaatttaagccaatcaatgtggagcactcgcagcatcgagcatatcagcacaaggacaaggaactttagaggaaaaaaaatacctgctgttttcttcagtcaatgcattcagtgtacagttttaggttcattgaaatgaggtgggctgtatacttgttgaatgttgagttcatctatatatatgagctactatatcgatctgctt

SEQ ID NO: 34759 - DNA, 2225 bp, Zea Mays
tctgtgtcccccattcacttcacactctagactctagttcgccccatgagtctggcaggtcaaagaagggaagagacaaccgaaggatcaacggatcaagcgaggtagtcgactccgcgtctaattaaacctgtggtctgcggacgggcggtcgtcggttagagcattgcttccgtgtggtgcggttgatagctcggatcttctgctggccgagttcgtcttggaggagaagagagagagagagagagagagagagcgccgggatcggagccaggaagcatccagcagcgatggcgggcggaggggtggcggcgctgggcgtgaagacggagcgcgcggcgcagtacaaggggcgcatgacgctcgccgtcgccacgacctgcctcgtggccgccgtcgggggcgccatcttcggctacgacatcggcatctccggcgtgacatccatggacccattcctggagaaattcttcccggtagtgttccaccggaagaactccggcgggaagaacaactactgtaagtacgacaaccagggactagcggcgttcacatcgtcactctacctcgccggcctcgttgcctccctcgtcgcgtcccccgtgacgaggaactacggccgcaaagctagcattgtctgcggcggcgtgagcttcctcatcggcgcggccctcaacgtggccgccgtgaatctggctatgctcatcctcgggcgcatcatgctcggcgtcggcatcggttttggcaaccaggctgtgccgctgtacctgtcggagatggcgccggcgcacctccgcggcggcctgaacatgatgttccagctcgcgacgacgctgggcatcttcacggcgaacctgatcaactatggcacgcagaacatcaagccgtgggggtggcggctgtcgctgggcctcgcggcggtgccggcgctgctgatgacgttgggcgggctctttcttccggagactcccaacagcctcattgagcgcgggcgcgtggaggagggtcggcgcgtgctggagcgcatccggggcacggccgacgtggacgccgagttcacggacatggtggaggcgagcgagctggccaacaccgtcgagcacccgttccggaacatcctgcagccgcgcaaccggccgcagctggtgatggccgtgtgcatgccggcgttccagatcctgacgggcatcaactccatcctcttctacgcgccggtcctgttccagagcatgggtttcggcgggaacgcgtccctctactcctccgtgctcaccggcgccgtgctcttctcctcgacgctcatctccatcggcatcgtcgaccgcctcggccgccggaagctcctcatcagcggcgggatccagatgatcgtctgccaggtgatcgtggcggtgatcctgggcgtgaagttcggggcggagaagcaactggcgcggagctactcggtcgcggtggtggtggtgatctgcctgttcgttctggcgttcgggtggtcgtggggcccgctgggatggacggtgccgagcgagatcttcccgctggagacgcggtcggcggggcagagcatcacggtggccgtgaacctgctcttcaccttcgccatcgcgcaggcgttcctgtcgctgctgtgcgccttcaagttcggcatcttcctctttttcgcggggtggatcaccgtcatgaccgtgttcgtctacgtcttcctgccggagaccaagggcgtgcccatcgaagagatggtgctgctatggcggaagcactggttctggaagaaggtcatgccggacatgccgctcgaggatggctggggcgcggctgagggtcatgcggcacctgccagcaacaatcacaagggatgactggagtgaagcatgcatggttgcctggttggtttcgtggacactttatataataactgaagaaaacaagacacacactaacatgtaggcggctgcttattcttattgtattttgtataaagcaggctgtgtgatatgcagggataaaaacgaacgagatcgttccaaataacctctcttttgttttcatttttacattttatttgggaaaaaagattgaagaagggactagcgggataacgaaaacgaactaaaatgaacataacaaattaataatagatcaaaatcgaatataaaaagtatgaacatcaccgctttctcttttctaaaaaccaaaaaaatgatcaaaatatctataaatacgaa

SEQ ID NO: 34760 - DNA, 1445 bp, Zea Mays
gttttgaagcagggaggaaggaagacagagcagaagcagagcgctctccgtctccggtccagtatctccgctcgccctcctccctcctcctcctccttcgcttcaggttcaggagccagttagaacattggtgttagcgcgcgctctttcctccaagcagaatcaagattttgttcccatcctcaaggaaaaaaaaacaaacaaacaaacagttgtctctgcgcccgcccgcccgccttggcttcttctacctacatcagctgtccatttcgcagcacgcagcagcagtctctacgctacggctgcatgagtgttagctagcagcaaggatgagagatggcagcaacaccaccaagaagagcaagctgtcgtggtccaagagcttggtgaggaagtggttcaacatcaggagcaaggcccacgacttccacgccgacgatgtggccgcgattggtaggacagttgcaggagggggcgatgacgagtggaggaggggcagcagcttcacccgtagggagccgagcacagtgaagaagagcaagacagagaggtcctcgaggaggagcaatgggcactcgaggcggggaaagattgaccttgatgccgccgaagccacagtgacattggactataggatatttgttgctacatggaatgtgggcggccgttccccgccaaataacatgagcctcgaggactggctccacgctgcacctcctgctgacatctatgtcctcgggtttcaagaaattgttccactcaatgccggtaacgtccttgggacagaggacaatgttccagcgaagaggtgggtgtcactggtcaggaggacactgaacaatttgccaggtactagtggcaacgggagcttccggacaccatctccggctcctaaccctgtggtggagatcgacgatgattttgagggtttgtcatcgaagcagaacagtgcaagtttcttccatcgccggtctttccaggctgggcttagtcggagtttgaggatggagggtgacattcttgctcctcagccaaggctggaacgtcggtacagtgtctgtgaccgagcaatctatggccgtaggcctagcgactatgagaacaactaccgatggggtggatcgtcagatgatgagaataatactggagagtcaccgagcactgtgtattcaccagtgtcgtacggttacggcaatgcatcatctctggaagatggtcaaagacggcctggccaaactagatactgtctggtggcaagcaagcaaatggtagggttgtttctgatgatttgggctcggaaggacataagagatgacataagaaatctgaaagtttcttgtgttgggagaggactgatgggctaccttgggaataaggttagtcatagcgtgtctttttttttgtcgtttttccagtttatcgtgtataatttgagcacaaacagg

SEQ ID NO: 34761 - DNA, 311 bp, Zea Mays
ctctgtgtacgggagacaatctaacgagacaccgaccaggagggcgggcgcaaccggcgcggcaccaaccgggacgggcgtggccgcgtggggctatcgcggctgctgtccaaggcagacgcgtgcgcgggggtcctgaagcgcggccagtgcaagcgcgcatggcagctggggcgggcgcggcggcgtgagacgagaccggcggagacagtggcagtggcgagcgtgcggccgaccggcaagggccacgcggggctggctgccaagggcggacgcgcgaccggccgggggcgaggcgaggtaggtcgatg

SEQ ID NO: 34762 - DNA, 1707 bp, Zea Mays
gagagaggctaagcaccacctgactcggctgaaaatctagcgcgaccggcttttaacacggcccggcccatcaaaatgaatgcactgtactagccggcgaggaccacgtgtacccgccaccgcgccgcgcggctccaccgttcggcggcgctcgggcacggcacgccgtaaaaccctagctcttgcgccccctcctctccaccgcgccggcgagccgtggagacgcggagctaaggatgccgcggaccactgagctggagagccccggctgcccgccgctccgcgccctcaccaccgacatcctcggccttgtcaaagtcgtcgaggcccacgcgaggccggcgggtgccgccaaggtcgtggagacgtggggcgcacccgacgcctcctgcgccatcgtcgctgcctccctcgccgatcgtgccaccgaccccgttttggctgtggcgaggatgaacggcgtggttgagttgctgaatcccctgaacggagatactttggctgctgtcaaggcagtgggaccagcaccaaatgatggtggcgctgaaggtgatcccctcactgcattgcaccttttcacaagacaggcttcggactcgatcttaggaacgtttcttgcttgcactgagcaggggaaagcttctataaggtccatcacgaaagaaaatgcagcttcaggctcacatattgagccatctgctacatgggatgtgtgcggtggggccaatgtgcaattttgctcagttgatcatggtgaaaactatgtgatgtttggagggaaaggtatagaagtgagtttgtgggatattacatcttgtagtaagacatggtctgctaaatctccccgaacaaatagtcttggtatattcactcggccttggttcactgctgggaccttcttgtgcaaggatgatcatcgtaaaattgtagcctgcacaaatagtcatcaggtccgcttatatgatactgcattgcaaagaaggcctgccatctctgttgagtttaaggagtcaccaatcaaggcagttgctgctgatccgaatgggcatgatgtctatattggcacagggacaggggaccttgcttcctttgacatgagaactgggaaattgcttggatgctattttggcaaatgcagtggaagtattagatccattgttaggcatccagatctacctttgatagcatcttgcggactggatagctacttgcgtatttgggacacaaacacaagacagttgctatctgctgtctttctgaagcaacatcttacaactgtggtccttgattcacatttttctgttgaagagcctggagagatgaaatccaagcaactggagtcttcagtggagactgagactgaagtccgaaaagaaaagaagaaaaagagtaaggcaattacagaggatgagactgaggcacaaatccgaaaagaaaagaagagtagaacaattgaagaggaagaacaagctggattggtcgaccatagcgatattaatgatgaagtatatgccagaaaagaaaagaagaaaaagaagagtagaggtattgaagggggcaaggagcgagacagcgacggggaaatttgcagtcccaagagaagaaaatctggagaaagaagcaaatgcctgaagaagaggagcaagaaacagctggttgcctagtacaatcttctgacagtgaggatgtttccaagggacagggaga

SEQ ID NO: 34763 - DNA, 2132 bp, Zea Mays
atggctttaatgggttctcttgagaccaaaattgatgaaacagaacagaagtttgaagaaatgaagagagcaagggaagagtggctgaagaaagctacagatgcagagtcaaagataaatgaactgaccaacacagtgctaagttttcaagaaaaggtaactaatatggaagcagaaaatcaactacttcggcagcaggcactgttgcgtactcctgttagaacaatacctgaaaacacatctccaaaatctaatttgactaatggcagtccgcgcattgatgaacaaaagacacctcatggaactcctgctcccaaagattatgggagctttggacagcctagagcatccttttttgagaggcagcatgagagtgttgatgcacttataaactgtgttagtgaaaatattggctttagtgaaggaaagccggttgctgcaataaccatatataagtgtcttgttcattggaagatctttgaaacagagaaaacaagtgtttttgatcggcttattcaaatttttggttctgcgatgcagaaacacgatagcaatgaggatcttgcatactggctgtcaaattcatcaactttattgatcatgcttcaaaagagcctaaaagctgctggctcaacaggaatcagtccacagaaaaggccacagactcaatcatcatttcttgggaggatggtattccgctcttcaaacatcacggttgatatggaccttgtgcgccaaatcgaggcgaagtatcctgcttttctttttaagcagcaacttacagcatttgtggaaggcttatatggtatgatacgagacaatgtgaagaaagatctgtcttcattgttggcatatgctattcaggtcccaagaactgtgaaagctagtatggtgagaggccgttcttttgggtcatcaagtttgccaaggggacgttcattttcgactcaaggtagttattggcaagcaatagtcgacaatttgagtgaactcctgaaaattttgcaagacaactgtgtcccatctatttttatccagaagatatttacccagtaatggagaatatgtgaaacaagggttggcacaactagaggtgtggtgtggagaagtgaagccagagtatgcaggatctgcgttggatgaactcaagcatatcaggcaagctgtcggtttcttggtcatattcaaaaagttcaggatttcatatgatgagattgtcaatgatctctgcccagtactaagtgtgcagcagctttacaaaatatgcactcagtactgggatgataaatataacacagagagtgtgtcagaagaggtccttgaggagatgcgaacattgatgaccaaggaatcaagcgatgaaactctggggaacacctttctactggatgatgaaattagcttgcccatatcacttgaggagatagcagattctatggatgccaaagaatttcagaatattgccccaccacaagagcttactgcaattcctgcctttcaattcttgaagagctaagccctggaaggcctaggcctacgttgctgcacgggcatacgcaaatacatctagattcttccatcagatgttatagggtttcgattctccttgtgctgtgtaattatgttgtccttgtagattggttttgttgtgttaagtttcagttggctcggttggcattagataagttgttagttgaggttgggataggttttttttttgttctgcctcctgatatgcgtttgtgcagtacacttagactaaaatcttcatgtttttgttatatatgacggtggaagctagggatccgttggaaatcattcttttatccagatttgattgggtttggttatgcagagaaatgtcaataacttgtaatggctggggcagctagatcgtgagttgttgcctccatgggggcagttgtagacttgtagtggcgtgagtttgtggcagtcactgccctgggctgtttatatttgcccactttacattttatctctcttatgcagctctaatgcgtattcaagaaaaaaaaactattatatggaatgtgttgtagaattatctgttctgttttctaaatgtatggagcttgattgctacattaacattcaaacgcctcgtttgtgta

SEQ ID NO: 34764 - DNA, 2342 bp, Zea Mays
atttgtagttcttggtccagatgttagttgcagaggtgctcagagctggagcgtacatctctaggttttctcggcgtgcatgcaaagtatacactactagcggaatatattgttgcaatattttccagcatagcttgctcacctacttctcaatttagaagacttcaatttctggatctgagcatcaaatcaagaccataccactttagtcagtcctgtctgatggcactggctgcagctccagccagtggtgattcacagagtggtcctcagaggaactatcaggttgttgtggctgccactcgtgacatgggcattggcaagggtggggtcatgccatggaagcttcttggtgatcttaaattcttcaaagaacttacactaactacaactgatcctgccaaaaagaatgcagttataatgggaaggaaaacatgggagagcattcctgttaagtcaaggccactgcctggtcgtttgaatgtcatacttactcgatctggtagttttgattttgcaacagtagagaatgttgttatatgtggaagtatgaagtctgccttagagctgctagcatcaactccatactgcttatcaattgagaaagtttttgtcataggaggtgggcaggtactgagagaatatttgaatggacctgcatgtgaggctatccatctgactgatattcagtcaagcattgagtgtgatactttcatccctccagttgacttttcagtgttccagccatggtattcatctttcccagtggtagagagcaacattaggcattcttttgtgacttttgttcgtgttagaaagtcagtggcagaaactcatgagtcaaatggcaaggaatcaactgagattgataccaagaatgacaaatttgaaatagagaatttctcttttctccccaagatagtatatgaccgccatgaggagtatcaatatctcaatcttgttgaagatattataaggttcggtgctcagaaaaatgacaggacaggaactggaacattgtcaaaatttgggtgtcagatgcgattcaacttaaggaaaaattttcctctgctgacaacaaagagggtgttttggcgtggtgttgtcgaagaactcctttggttcatcagtggctcaacaaatgcaaaggttttgcaagaaaagggtattcatatctgggatggcaatgcttcaagagagtatcttgaccgtattggcttggcacacagggaggaaggtgatctaggtccagtttatggatttcaatggcgacactttggtgccgaatatactgacatgcatgctgactatactggaaaaggctttgatcagctaatggatgtgattgacaagattaagaacaatcctgatgaccgccgaataattttatcggcgtggaatccttcagatctcaagaagatggctcttcctccttgccacatgtttgcacaattttatgtggagaacggggagctatcctgccagatgtatcaacgctctgcagacatggggcttggtgttccattcaacatcgcatcatattctcttttgacatatatgattgctcaagtttgtgatctttctccaggagattttgtccatgttataggggatgctcatgtctatagaaatcacgttcgagctctggaggaacagattcagaagatgcctaaaccatttccaattttgaagataaatccttcgaaaaaggatatagattctttcatggcgtcagacttcaagctggttggctatgatcctcaccagaagctagagatgaaaatggcagtgtaacggtggcttagctctggagcccccagccttggaacctcggtgggtgaaatcagtcgaacgaactggtactacataaaaaatgaaccggacatcgcactagcttgtttttggtgatggtgctgaatgttgtgcgggaggcgttttcccccgttattagtagcgatctgcgtgctatatatggtcgctgaagtcaaaattggctctcttttattttttatctactactactactcatttgcgagtgagagatggtctgggcacaccattcaattgcaacggcctactggtgtgttgccccccaatgagggctgtgacgattgcgccactacctcgtgagaaacatgatgtgaccgaaattgctgtgtacctgcatggtagaacaacgcactctttggtatctggttgccttaatacgtgacctggttaattcagtttccagtttggatgggcacaagatagcgatttgctgtggcgttttagttgttgttgctgtgctgggggcagaaagtctagtgccgtgcttgacgaagacggggtcaaagcgcttg

SEQ ID NO: 34765 - DNA, 5526 bp, Zea Mays
acgatcgagctgggaccggtagctcgcccacaagcactactgctccggcggcggccatcgccttgtcatcaggctccagctagcttgcaacagagggggcgagctaggaggaggagatgagtgccccagcgggcagcggcggcggcggggagcgggcgatgaacatccgcggcatattccggttcgcggaccgggtggacgtcctgctgatggccctgggcacgctgggcgccattggcgacggctgctccaccaacctgctgctcatcttcgccagcgacgtgatgaacgcgctcgggtacgggggtgcccaggccggcggcggcgccaagagcgcgcagttcatgcacgaggtggagaagtcgtgcctgaacttcgtctacctggggctcgtggtgctggcggtggcgttcatggaagggtactgctggagccggacgagcgagcggcaggtgctgcggatccggtacctgtacctgcaggccatcctgcggcaggaagcgggcttcttcgactcgcaggaggccaccacgtcggagatcataaacagcatctccaaggacgcctcccacatccaggaggtcctcagcgagaaggtccctctgttcctgatgcactctacggtcttcgtctccggcctggccttcgccacctacttctgctggaggctggccctggtttcgttccctctcgtcctgctgctcataatcccgggactcatctacggcaagtacctcctctacctgtcccgccggtcgcgccacgagtacgccaaggcgaactccctggtcgaccaggctctgggctccatcaagaccgtctactccttcacggccgagaagaggatcatccagaggtacacggcgatcctcgacaagacgatcaagctggggatcaagcagggcatcgccaagggtctcgctgtggggttcaccggcctttctttcgccatttgggccttccttgcgtggtatggtgggaggctggtggtgttccatcatgtgaccggtggaaggatatatgctgctgggatttccttcgtcttgggtggcctatcccttggaatggcactgcctgagctgaaacatttcgctgaggcgtctgttgctgccacaagaatccttgatcggataaaccgtgtcccccagattgatgctgaggacccaaaaggccttgtgctggaccaaatccggggagagctcgaatttgagtctgtccgtttcgagtacccatcaagaccaaacatgcccgtcctcaaaaacttcagcctccagattcccgctgggcagactattgctttggttgggtccagtggcagcggcaagtcaacagcgatagctttagtgcagcgcttctacgatgccagcgaagggactgtaaaagttgatggttttgacatcaaagaactccagctcaaatggatcaggagcaagatggggctagtcagccaagaccatgcgttgtttggcacttcaataaaagagaacatcttgtttggcaaaccagatgcaaccatggacgaggtctatgcggcagctatgacagcaaacgctcacaacttcataagggggcttccagaggaatatgagacaaagattggtgagcgtggagcactgttatcaggtggccagaagcagcgtattgccattgcgagggcggtaattaagaacactgctatactcttgctcgatgaagccacaagtgcacttgattcagaatcagagaagttggtacagcatgcacttgatcaagcatctatgggacgaacaacactggtaaattgccactgcttccgctcttcatactttatgacccttatatcagaacttgttgaattaattatcactgcatcttttttcaagaaaaaaacatttggcattgaatctctgattattcattaacaatggacaggtagtagctcataagctctcaaccgtgaagaacgctgatcagatcgcggtagttgatgggggtacaatagctgaaattggtacacatgatgaactgatcagcaagggtggcccatactcgagacttgtgaaattgcagaagatggtaagctacatcgatcaagaaaatgatcagtttagggcttcctcagtggccaggaccagtaccagccgacacagcatgtccagagcaagtccaatgccactaacaccagctgccttaaaggaaaatgattctgatgttcatccacctgcaccatctttctccaggcttcttgcaatgaacgcacctgagtggaggcaggcagtcgtaggcagtttatccgcattggtatatggttccttgcagcctatctatgccataaccatcggaggaatgattgctgcattctttgttcaggaccaaaatgagatgaatgcaattatcagacgctatgccttgatcttctgctcactgtccttggtatccattgttgttaatctattgcagcactacaattttgcatacatgggggagcatcttgttaggcgcatccgggtccaagtacttgagaagatattaacttttgaggcagcatggtttgatgaagaaactaactcaagcggtgcattgtgctctcggctaagcaatgaggcttctcttgtcaaaacccttgttgcagacagaatatccttactgcttcaaacagcttctggaattataattgcagtgacaatgggcctgatggtagcttggaaacttgctcttgtcatgatagctgtacagccatctacaatgatgtgttattatgcaaaaaaaatggttctctcaaatgtgtcaagggacttggcaaaggctcagcatcaaagcacccagattgccatagaagctgtttacaaccacaggatggtaacctcctttggatgttcatcaaaggttcttcagctattcgagcatgcgcaagaggaacccttgaaaaaagcaaggaagaaatcatgggtagcagggatcaccacagggttgtcaccttgcctctcgttcttgtcatgggcactggacttctggtatggtgggaagctagcacagtctggggagatatcggcgggtgatgttttcaaaaccttcttcgtgctggtgagcacaggaaagcttattgctgatgctggtagcatgacttctgacctggcaaagggatcaaatgcagttgcttcagtatttgaggtgctagataggaaatccatctctccaaaaaattcacaggtagagaaggaggatcagaagaagaaaatagaaggtaggatagaattcaagaaggtagattttgcatatccaacaagaccagagtgccttatcctacaggattttagcttggacgtgaaagcaggaacaagtgttggcctggttggcagaagcggttgtggtaaatcaactatcataggtttgatccagaggttctatgatgttgataggggggctgtaagaattgatggtatggatgtgagggagatgaatattctctggtttcgaggatttacagctcttgttagtcaggagcctgcaatgttttcaggcagtgtcagggacaacattgcttttggtaaaccagaagctgatgaagatgagattgtggaagctgcgaaagctgcaaacgcacatgagttcatctcctctcaggggggcagaagcaaagaatcgcaattgcaagggcaataatccggaatcccacaatactactacttgatgaagcaacaagtgcgcttgatgcacagtcagagcaagtggtgcaggaagctcttgatcgaataatgtcagggaggaccacaattgtggtggcacatcggctaaacacaatcaagaatgtagactcgattgcttttctgggagagggtaaagtggtggagcgtggctcttacccgcagctcatgaacaagaagggggcattctataaccttgcaactcttcagaagtaactggttgtatgacatgtaaactattatacctaatgaaactccggcagtaattgatatgatagctaggttactatagcacagaagcagcactcctaagctagttttcaagcaactctttcaataatcagttaatatatatctgacacaatcctcgtccttcaagtttctggtgggctaacacaggcaaaaaatatatatataaaaagaaatgacaatatggcctagctaaaagaagcatgataagtaaaaacaagcattatgatgcatgaatcatcatgtcttgtcctctgataacatatgtgagcttcaacagaatgaaaaagaatgttcatgaaaggacttaccctgaagtgaccatagcctggaaaaatcatgaacatgatcaaggagatactggaaaaatgtgacctgccatgatcatgctgttattcgtgagtaaatactcagtaaagagcatggacatgatcaaggagatgatgtttggctgttacctgccataaggcatatttgtctatctgacggatatcataaaaagaaaaaaaatgctcaattgtataacccatatgaattgacctaactatttcctcaacgctagactatctccattcctatacaaaagagtgatccactatacgaacctgagagtgactacgcataagactattagctgtctctgttaatttatcgccactatgccctcccttcctacaaggaacgttacgataggacatgggagttattctaaattctccgtggcatgggaccaaactgccttctcaagtctcaacagcatctacaccgagaccatgaaaagcattctcccatagtatttgaaaataaaggaattcacccttccccctaaggccatgttcgtttgatcccaaaaccatagggattgaggtggattgaaagggattgaagaggattttgacttgtaggggatttgatcccctcaatccctatggatcagcacaaaacgaacagagcctaacagttgtcctccacatactttggctatccagtggtcagagacacgcgttaccagccctagtaatgccagggacaatgcctacctgccgttgccagcccgttgccctttttagttctgaattttctttttacatgaaacatgcctgaatctgaatcccatctgctagaagaagaaaatcgcagaacccactgacatgcacatgcatataatcttctgctcatccatcagtagcaacccgcaagggaacgggatggatgccagggtttcggccgggtcaacgatcgcagattcgcagttccccgcaaagctcacgggcgccaggcctgcgaatgcgaacaccgatacggaggggaaagcggcgcaggaagagggatcggaggactacttacgaattccgattcgcgcgcgaagtcgacaaggagaaccttggagaatcgaggcctcctccgttctcccatgagccgtttgtctagcatatctcttatctcctcccagatgaaatttcaaacttatccctataaactttcatctacagtttcatatctcttatttttcacgttccaccgggatggagggaaggaagtagaatatctccatcagctcaaacaatcttacgggtggagggaaggaagtaag

SEQ ID NO: 34766 - DNA, 1368 bp, Zea Mays
gctggattggctgcaacgctcccttcaccagccgcaggagcatcgccgctgctgctccactgcaacgccgccccttccgtctccttccgccaccgcaggcgttggcagcggccggctgctacacggcacgatggccgcgtcgcgcagctgttgctgccggtcgcgcgccgctggctgccggcagcagcgcctcccggagtcaatggcgcgcgcggaggcattgcggcgtcggggtcaggggcaggggcagtggctggggaggcgccgtacagaggcaacgaggggcaggggtcgctgtggatggtcttcctcgccacggcggtggtcgtgtgcggctccttcgagttcggcacctgtgtcgggtattctgcgccggctcaagctggaattgtgagcgacattgggttgtccaactccgagtatggtgtctttggatctgttttgacaattggagcaatgattggtgctgtgactagcggcagcctggcagacattcttggacgcaaaatgaccatgcgatttgcagcagttgtaggcatttttggctggcttactgtatattttgccaaggatgctatgatgctctatgctggaagagttttgctggggtattgtactggagttctttcctatgtggtgcctgtgtatatatctgaaatagcaccaaagggtatccgaggaggccttgcaacctcaaaccagttattcatctgttcagggtgttcggctgcttacattattggagcacttgtttcatggcgctgtttggttgtagtaggattgataccttgtgctgtcctacttgttgggcttttcttcattccagagtctccaaggtggctggccaacatagggaaagaaagagaatttcatgcttcattacaggagtttaggggggaagattctgacatttctgaagaggctactgagatcaaagttatttattctgaacatagcttccatttatcaaacaatgtagaccgatattcaaactaaacattctgtccaggattatataaaatcagttcgtcgattgcctaaggccaagattcaagatttatttcagagaaaaaatatgtatgcagtcacggtatccaagctagataaattttgtcctcttaaaaaacgaggtatctacagctctttctaaaaacttcaggattttctggaaaacttgggaccaccttgattggcgttattcagattccaatcacattctttggggcccttctgatggataggagtggaagaagagcccttcttttggtctcttcatctggaacatttcttggctgctttctgactggactatcattctattttaagaagcaaggcaaattttcaaagattcttgttcggttcagatct

SEQ ID NO: 34767 - DNA, 3403 bp, Zea Mays
cctcacctcgcgtgctcgattcccatctcccccctccctgcgcacagccgcacaccagtaccaccaacaccattcaacagacgccgccgccgccgccgccgcccctcatccctgtcccgtcccgtcccgcgcgcggccgccgcatccgtccgggcctcctcgtctccccagccccgctgccgccgggttcatcagcagaagctgcttgctccgccgccgccgccctcttcctcctctactgcttaatcttagattttgcttcggggttcggctcaatttcgtcggatggatatcgattggggtcgtcaggagggcgttcgcgagcggcatgcgccccgacagcttaattttgcttaatcttagattttgcttcggggttcggctaaatttcaggcgtgcccatgaagccattggggtcgtcaggagggcgttcgtgagcggcatgcgccccgacagcttcaaggcggtgcaggtgctcacagcgtgcgcccgcgtcgcggatctagagaccggggaggccgtgtggagggcggcacaacaggaggagggggtcacggagagcgtgttcgtggcgaccacggcgttggacctgtacgtcaagtgcggggagatggagaaggctagggcagtgtttgacgagatgaagaacaaggatgcggtggcctggagcgcgatagtcagagggtacgcctccaacgaacatcctcgggaggctctagaccttttcttcgcgatggaggtggagggagcgaagccggattgttacacggcggtcggggcgctctcagcgtgcacgaggttaggtgcattggatttgggatgacaggcggttgaaatagtgcactaggatgaggtccttgacaacccagtcctgggcactgcactgatcaatatgtatgctaagtgttggagcacaagagaggcatggatggtgttccagcagatgttggagagggacatcattgtttggaatgcgatgatcatggggcttggcatgattggccacgagaagattgcatttgtgcttgttggccagatgaagaactcgggtgtgaagctgaatgataataccttcattggattgctctgcagctgcacacatactagccttgtgaatgatgggcggcggtattttcataacatgactcatgtatacagtataagccctaggattgagcattatggttgtatggttgacctgttgagtcgtgcgggattgctggaggaggctcatcagctgattggtgacatgccaatgctggcaaatgccgttgtatggggagcacgcctcggtggttgcaagatccatcggaatgctgaccttgctgaatatgtgctgaagcagctcacccgactggagccatggaattctgggaactatgtcatgctttctaacatttactcgaacagtggaagatgggaagatgctgcaaagcttaggttggaaatgaaggcaaaggggattgagaaggtcgctgcctctagctgggttgagcttgatgataaggtccacaagttctatgttggggacgattcacatcctctttcagataagatctatgcaaagcttgatgaattgggccacggcataccttgtagattgagcccatagcagcccatatatgaagaaaaaacaaaagaaaaagagcccaacacgtaacaagcaacatctcgcattgattttgaagcgtgagaatctggtctgcttattctgttcgctgtgtttctttcgtccactcagctttccgcagccgccgttttacgttagccaattctgctgtcagcttgccgctgtccgctcgtcctttgagctttggttgtgtctcccaaatatcttgcctttttgttgcattggactcttctgtggttagaatggcagcacccaagcccatttctcgtcttatttctcacgtcattcttgatttggatggcaccctcttaaacacagattctgttgtaagtaaggtagtaaaaccatttattctaaagaatggaaaaacgtgggatagcaagaaagctcacaagctagttgggaagacaccttatgaagctgcagctgttgttttagaagactatggactcccttactctacagaagagttcctctcgatgattactccgatgttcagtgagcagtggtgcaacttaaaaccacttccaggagctaatcgactgataaaacatttaaagactaacggggtgcctactgctttggcttcaaactcaccaagatgtaacatagaagccaaaattttcttccaacaagggtggaaagagtctttctctgcaattgttggtggagatgaagtagagaaggggaagccatccccgaatatatttttggaagctgcaaagagaatgaactgtgctccttcaaattgcttagtaatagaggattccttgccaggtgttacaggtggaaaagctgcagaaatgcatgtcatagctgtaccttcaatacccaaaaagactgctgagttcagttctgctgatgaggtgatcaattccctccttgatgtgaggcctgaaaagtgggggttgccaccatttaatgattggattgaaggtaccttaccaatagaaccatggtttattggtgggcctgtgatcaaaggatttggccgtggttctaaagtactaggaataccaacagcaaatttacccgcggagaatttttccgacgtagtgtcagaacatacatcaggggtatactttggctgggcaggactttcaacgcgtggtatatataagatggttatgagcattggctggaacccatatttcgacaataccgagaagacagtagaaccttggctgcttcataatttcggcgaggacttctatggcgaggaggtgcgccttgccatcgttggctacataagacctgaggccaactttccttcgctcgagagcttgatagagagaattcacgaggatggaagagtagcagagaaggcactagacctgccaatgtatgccaagtacaaagactcgccttatctgagaaacccttcgaagcacgggagtagtactaccggtgggacccagtctgagatggattccaagtgacaacccccctacagggccactagataatatgttacttattttctctatggtaaatgcgtcggtgttgatgcagaaacaattggactctctgtgagctaactcgcttcttaattttcggaagtagatagtattcctcgaagtggtgtttttactttgtaatatagaaaaaaataaagtggggttgttgaaacttgagagtcaaattccgagacgttatgcacgttttgatttctgaattaatcgattggtatcacttgtactgtttttatacgatgatgcttgaaccattcatttgtcattttaatttgatatacttgaagtcaacaatatgctt

SEQ ID NO: 34768 - DNA, 280 bp, Zea Mays
ctcaccgttgattgccgcacgaacagccccggccacgacaaagtgtggttccgcggcggtgctagatctccggcgaggaattaaagacgtcccgagggacaccccattatggcgcggccatagaaacgttcctcgcgccatggcgaatctccccgactggtccccgatgattcgacgtacgcttgaccgcgaatcagccatggcggccgcagttctctcctctctctcgcgttctttctaccggtgttaacgatgacctggggttttggggaggcgcgac

SEQ ID NO: 34769 - DNA, 2218 bp, Zea Mays
aagaagaggaaatggatgattactgctctcaggatgaattgcgtcagaaaaaagaagaggaaatggatgattactgctctcaggttccagttggtcatctggtattcatggttcatggcattggacagaggctggagaaagctaatcttgttgatgatgttgttgatttccgtcgtgtaactgctaacctagctgaaagatacttaacttcgtatcaaagaagtacccagagggttctatttataccctgtcagtggaggaagggcttgaagctcagtggtgaaagtactgttgagaaactcactttggatggagttaagggccttcgagtcgcattaggtgccacagttcatgatgttttatattatatgagtcctatctactgtcagcatattattgactcggtctcgaaccagttgaacaaactgtacatgaaatttctaaagagaaatcctggttacagtggaaaggtttcattgtatggccactcgttaggaagtgttttgtcgtatgatatactttgtcatcaagaatccctttgggccccatttccaacagagtatctgaacatggaaacatctgatcgaaatcaaggagcaaaatcagccaatgaagctgatctgcatgattcaggcgcaaaggatcatgatacttctagtctagggtattcttgtgctgataatgaaaacagtgtcattgatgaagatagcaccagaactgacgtgtcatgtatggacagcatcctcccatcatgtgtgcttgaggattcaccaaataaccatgacactgtcgtgcctcgtggtgcggttgttgctgatcaaaatggagaagaaaagaaggttgagaattatcagtcggtgtatgctgaggaaggaacaacttcaggtgtaatcacaaaaaaggctgaaggatcaagcatttcaagatctgctaaggaagtccatgaagaggtcctcgacaaagaaaaattgatggtccttgccaaagacaaattgatcctttcactagaagaagaggcaaaggacaagactattggcaagataagaacgtaattgaagagatgccatgctgccggcagatgttcaatatttttcatccttttgaccctgtagcatacagaattgaaccacttgtatgtgaagattatctaaagaagcgtcctgtaattgttccctaccatagaggcggaaagaggatacatgttggagtgcaggagttcagagaagatatttctgcacgttctcaagcaattgcccgtcaattgaagtcactgaaggtcaaagcagtagctgctatactagcattgagcagaaatgacacagaagaggatggtgagagtgctaatgagaaagaaaaatcatatggttccattatgatggaaaggttgaccagttcaccgaatggtcgaattgatcatgtgcttcaggagaaaacatttcagcatccatatctatctgctttgggagctcataccaactattggcgagatcatgatactgctctcttcattctcaaacatttgtatcgtgatatacccgaggatcctccaagcgatgtcattgaaaggatgcctattaaactattttatgagagagatccagttgaggaagaaacgcctgtgacgttttcagatcatgcagcaattaaggaattctgcagaaaggtgaaagcttactcaagaaaaatggaggatgatgccaactgccaagcctcgtgatggatttttagtctctcgttacggcctcacacgttcctgggcaagcagaagcaagatgcagacatgggaaggaagaacgaatcgtgatcccaagaaaagaatccacgagatgcagttccacgcttcacgccagaatcagagcacttggagaatgttgtacggagtagagtcggttgccttgctcgttcctacatttataatgcagtgttgtacatagaacgtccgactgtagttttgtgcatcttgaacgtaatgttatgctgcctgctttaaatgctacagaatatatttttgcttttgcatccctagtgtgcgtcaattgcaaagtggttagctcctacttatttagcatgtcttttcattatgtctatcatgggcaaaagtactacataaaaaaggactcgcttagggcccggttgattttttttttttgaaagtttaggtattacaaagacctagttttatagctaaagcgatgcaaaaccaccgtgatttcaaaag

SEQ ID NO: 34770 - DNA, 2061 bp, Zea Mays
cccagctcggactgcccctgctccttgttcctccagctcgctcctgtcaggttggttgttggtcgcgttggccgtcgacctcacttaaccctgcgtcgtcgggccagtctcgccgcactcgccagcaccggagcacacgcactgcttctgttcccatggtcgctcgccaggatgctgtccccctgctctatgccgccagcttctgcgtcattgcctacttcgccatcgcgtccgcgctcctcgttcttgccccttgtctttgaattctgaaatgtctaagtcactggagagaagatctcaggtgttttgagtgataggataaagctcctaggtgatggctgtcagctgctcggagatatatttgagccgagatcgttatggtatttgtgaatagttagtcagtcttaatgtggtatgcagcggttggtatgtatggacgaagaaaagtgaagcccatgcggtgctcgttagatgattgacgaaaagcctaaagccagcatcgtcatgccatcgtctatattgttcggaaatcgtcgtgccggcatgtcagggttgtcgttcgccatcctcgtcctcgccacaagaaactcttggcattctctagcgaagaagcgaggcccgtgtgcatcgctcgtcaagtgttcaatcgaagactttattcagagactcagcgttctcacaagcttaacttaccttggatgagaaatccctgatgttcgagggaagcgaggccggtaagcgttctcgtagggctcgacaaagcacttgaacatcatcgttcttacaaatatcgtgtcgattcggtcatggtaagctggttattaattatgttatttggatttataagtggagaaattagatatatagtaatcgtgatgatcctcgtatttagcgcaggcacgttgtggtggtgttaaatatatgtgaagcacgatggagttagtaatgcgaaaggtagattaattcatgtgatatttgggcgagctagagacgtaaaagataggtttagtatttctatcggctagttaataggtattctagtgttattatgtcgatttggttaattgatgtagtcgatgccctgcttaattaattagcttattctaggtttggtgtttagttcgatatcatgaggaatgtactaattacttcgaataggtttggtgtttagttcgatatcatgaggaatgtactaattacttcgagtaattaacagtgaatggcatcgacctatttaattagtgtggaattcaagataattgggaaatgtgatttaaaagggtaattagattgttcatatgctgattttaagacttcagctttcaataatggtgagtctaactttattagacttccgatgatatattgtaactaaggatgatagtgtgtgtttataatttattcttgcttgataatagaattagatatggttaaacaggaaaaatacgaatgctatagttagtatgtatagtttattattttgtgattattgcgcttagtcgtatgtcgataactggtgtttctgtatgaaatggtacaacgcctcgccgctagttgtttaattcgctatcgtgtagcactatttagttttgtgatattcctgtctatatgcattcatgtgcatcatgtatttcaattaggtacgataattaatcacgtgatgcggaagacgagccaagtcgacccaagatgacgtaacgggtggactaattcgcaaggtgatgcggatggacgaacctgaagatggacagacggagcaagtatcaagacaaaggatggtcgtcaagtggatgtcatctaacaaacattaacgtagtgtttattccaggcaagtcctggtgtatttgccacctccttgctattttaaaatctttatcaccttgtttgatgcattaggtgataggagttgtgtgctaaacaattgttgcatttccttccttagaaaattgaatacccttccttgacacccttttatgaaaaggatttttatgatgcttagccttgctctagaaaaaataaaatgttttgctttaaaacaaaaagtgatgcttcaaatcggat

SEQ ID NO: 34771 - DNA, 2276 bp, Zea Mays
gctccctggtatggtaccccgtttcctttggaagcctagcaaattcaccactccccccgatcgagactctggagcgcagagacggcagagagcacagtagccaagcgagtggaggagagttggagactcatcactggagagcatccgaagccgcccagtgctcgcacaaccgctcccgattcccaacccctccgtccgcccaaggggcgccgcaccatctccagcctccaggcctcgatccctaccggaccccgtggccctgctgtgttatctggctggagatccggccggagtggcattcctgctctcggtcaataagtattctggaatgtttttccgagctcaaatagagaacttctggagctggatatcagtattctgttagggatatgctccaaccaagggaagctgatgtgcctgcactctttcttgtcttcattgtacttcccgtggtagcttattttcttcttgggagatggcatgactctgcaagtaagaaggcaagggcaagtgtgcttgcacagcgagctgcagaagaagcctatagagaggaaacgatggcgtgcccagacattattccgccaggcccttccttgagaactatgccctatttcaaacctgcgccttcgttaagacaggaataccatgagtgtgcaacttgccatgcccctgcaaagactcgttgctccagatgcaagtctgttagatactgctctgggaagtgtcaaatagtacactggaggcaaggacataaggaaacatgccaaaaatggcttggtagtggttctagcagctttggtggatctagcactgaggctactgaacagatgccgttcttggctaacttgaattcacctcttccagatagaagcaacatgaatagatcaaatcaaggtattcatatgagcgaaaatggtgctgttggtgtatcttttgaaaagaataattataatgctgctgatgaaatacactcttcggagattttatctggaaacaaggtgtcaaacaactattttggttcagatgcaatgagtggtaatggggatgcaacttatcctgccaaaagtaatgcacagcagcctagcagttgtgctcctgacgtgagaaaacaatcaaaagcaagcatcacagtttatcagcctgacatgagtgtctatttaacttctgacatggtcagttcttgtgagggatcatatgtttctgccggtgagccactgcaaaggagcttgtcatctggaagaactattgggaaagtaactgtggtgaataaaaggccttcttacccatcaagtaaggtggtctcagcacaaaagtcacaggataaggtgtctacatcatatcaaaatgatgcccatgagaagaatccttgcaacaaaaatgaccaaagatctacccccacatgtgaatcaagtcaatcaacaagcagcaatctactgaagtctggaacatccaaggttgaagttttaaagaagccttcaaaatttctcaaaaccagccttgtggcattgatcaatgataataagaggaacaaggtattgttcccatatgaagatattgtcaagttttttcagtatgaagcacggggtgtttcccctagaggtcttttcaattgtggaaacagctgctatgctaatgctgttcttcaatgtctcatgtgcacaaagccactgatgatctaccttcttctgagattgcattctaaagattgttgttcaaaaaattggtgccttatgtgtgaacttgagcaatatgcttcaactttacgtgaaagtggtggacccttatctccaagtagaatcctttctaatctgaggaatattggatgtcgcttgggtggtggaactcaggaagatgcccatgagtttctaaggcatcttgtgatgtctatgcaagcagcttgcttggatgggctgggtggtgagaagcacgttgaaccaagtttgcaggaaacaacactgatacaacagatgtttggtggccgtcttaaatccaaggttaagtgcctcagatgctatcacgagtctgaaagatatgagaatataatggatcttactttggagattcatggctgggtagagtccttgcaagatgctttgacacagttcactgctcctgaagatttagatggtgataatatgtataaatgtggaaggtgttctgcctatgttaaagctaggaagcaactgagcgtgcatgaggtgccaaacattttaacagttgttcttaaaagatttcagaggagatagccgatcaaggctacctaaagaagatagaga

SEQ ID NO: 34772 - DNA, 2831 bp, Zea Mays
cgacccgtaccgtaccatacgtgggccaatctgtcacgtgtccggcgcgttttacaaagccctgtccctgtgtgggcagcttgggctgtggcttatcgggtcaggactcaggacgtcaggtcacacccgcaaagccaacaacgcctccacggcgactccggctcctccacggctccagctccaggccccagctcaccctcccccctcccctcgaggcggaccgcccccacgtcgccggcgatcgaatcggcggccgtagcctcgcgcttccagcgtcggagagtgcgcccgtccggcggatgagatggcgctgcggcacctcgtcacgggccagaataactgcgtgccggacggcgcctcgtcgtccaaccccctcaacgccctcgccaacgccttcctcggccagtcctccaaggcgcagtcaataaaggaacttcctggttctgttaatgtcccatctacatctgactttagcgtgtctgctcctttgtcaaacatccctggttcagaaaatgagttcaaacaagaccagcgacctcttgcacggggtgctgactttattcgaggtggtcctgctaatgattggattgagtcttttcggcctccgagggttcctcaacttggtgtagaagcacaatttccagattttgagcaaatttataacaatgcagggacaacctttcagtttcagccgccattggatggtccaccacaaagagtgttgtccggtgtcttgcattcctttctcacaagtggcccagctggtgtgccatttcaaccacttccggtaccagctgctcttggtttatctgaaagcgacaaacaatgcattcgtgatcgtagctgcataatggcacggcatattttttctgaccaaccagaagaatatatacagagtcaggtcaatactttgctgcattcgcttgatattgacaaccgtatgagaggacctatgcatgggcaatacccagaactacaggagtactggaagcagtcccaaagttctacgcgtcctgccccaatgcataatgctgctgataaatggattactgagtttggcaagcaaaataataatccagaaaattgggcgaactctttcgaacaacaatatggccccaatgggtgggcctctgagtttgaacagcatcagtctcagatggccatgcgccagatgggaggagcgaacatggccaacctggctgctatggagcaatcccgagtgcttgcacaaactttagcaagtaataatgatcccaagtttcagctttcacaaggggcggataagtgggttagcgagttctctagtcaacctaatcatggtgcactaaatgagaactgggttgatgagttctcgaaattaaatgttactgacgaatgggcagaggaattcagtggaggtggttttggcgaaagctctgctgatccatgggtagatgagttccaagaacacttgtcatctttcaaacaaagtccgggcgcctctcgaggggtttatgttttttctgagaacaacccgtatgttggtcaccctaatccaatgcaggaaggacaggagctcttccgcaagggcctcttaagtgaagctgttcttgctttagaggctgaagttttgaagaatcctgataacacagaaggttggaggttgttaggcgtaacacatgcagaaaatgatgatgaccaacaggccattgcagcaatgatgcgtgcgttggaagctaatccaacaaaccttgaagttcttcttgctcttggtgttagtcacacaaatgaattggagcagggggaagcattaagatatctttataggtggcttcagaatcaaccaaaatatggtggccttgtccctctgcagtcaactgattcaccttatggtcctgatgttgttagattgtttaatgaagctgctcagatgtcacctgaagatgcagatgttcatatagttctgggagtcttatacaacctatcaagagagtatgataaagctatagcttcatttaagacagcactacagctcaaaccacaggactattcactctggaacaagcttggtgcaacccaagcaaacagcatccagagtgctgatgcaatattggcgtatcagcaggctctggacttgaaacccaactacgtgcgtgcatgggcgaatatgggaatcagctatgccaaccagggtttgtatgaggattccattcgatactatgtaagggcagttgcaatgaacccaaaagctgacaatgcctggcagtacctgaggatctctcttagcaatgcttcgcgagcggacatgattgctgcatgcgacgcccgcaaccttgacgctcttcagaaagagtttcctctgtgagccctccggtccaaggcattagagcttccatggaaggaagcagcacactagcaagccgagtgactgcacctgtggtcatggaaatggaattggaaaccagtagcgttttgtatttgcctgttgattcttatatttatttttaggaagtgggggaatgtgtagcaactaggaagcgagggaacaacatccagttgatgtgaagcattcatggcacagtaggcaatagtggcaaaggggtactatacatacacacttacgggacgcacaacataaataaagaatggttgattaataaactatttattttggggacacacccctaggatcaacccctacttgtttcgagtttgaatactgatttgtatcaacaggcaataaataatgcgctttgtaaccttttatatcataatgtaatgcgcacgcccaaatcagttgtgtctaagaaaaaacttgacaaaatgaagtaacaaaaagaggaacttctgtg

SEQ ID NO: 34773 - DNA, 3661 bp, Zea Mays
ccgacactccaccatcctccatggccgttaagcccacatccatcatcgccgcctccgccacagcacgccatggagaccagcaagtcgccaccgctctactcggcgccgcgggagccctctgccacgacagtgatgctgtgtccgtgcctggcgttcttcctcctcgctctcatcatcacctccatcgcactcactgtccactttcgcctctactgccacactcctcttgcccacctcatctccccgcaccgctgcccccaccacatctgacctccgtctccgcccgcatcgctggcgtggtcctgcttcccagaggcgtgttccctctgctgccgccgagatcccgatacgttatgggttcccctctcctcgcgacgccggcatgcggggcttacgacgtgctctggggcttcgcagccggaaggttcctctccatcttggctgcctccgacgaagatcagggctcgtcggagcaggaggcggctgcgagcaacccggagggcgtggaccgcgtctgcgcggccatcgcggacgtcgtcgcctccggtgccgacgcgaacctggaggcggcgctatccgcgctctcgccaccgctctgcgaagcggtcgtgctcgctgtgctccaccgcttcaagcacgcacataggccgtcctaccgcttcttcaggtgggccacagtgtccggtggctttacccacaccaccattacctactgcaagatgttacacatcttaggcaagacgaggcagttcgagtcgatggttgcgatgatccaagagatggggaaggcgggggccctgtccatggacgccttcaaggttgccattaagtccttcgctgcggctggtgagatcaagaatgcggttggcgtgttcgagttgatgagaaagaacggtttcgatgatggggtggaatcattcaattgcttgctcgttgctttagccaaagagggattaggtagggaggccaggcaggtgtttgacaaaatgcatggccagtactctccagacctgcgctcttatactgcactgatgctggcatggtgcaatgcgaggaatctggttgaggcggggcgggtttggaatgagatgctggagaagggaatggatccagatgttgttgtccacaacacaatgattgaggggttgctgcgtgggcagaggcgacccgaggccgtgaagatgtttgagctgatgaaggcaaaggggcctccaccaaatgtgtggacttacacaatgttaatccgtgaccattgtaagcaggggaagatggacatggcaatggagtgctttgaggagatgcaggaggctaaatgccaaccagatgttgctacctatacatgtttgctggttggatatgggaatgcaaaacaaatggacagagtgactgctgtgttggaggagatgacacagaagggatgcccccctgatgctcggacttacaatgcactgattaagttgctaacaaataggaatatgccagacgatgctgcaaggatatacaagaagatgatcaagaagggacttgagcccacaatccatacttacaacatgatgatgaagtcatatttcgttggtgatagcaactatgcaatgggttgtgcagtgtgggaggagatgcaccagaggggtatttgccctgatgtgaactcttacacagtgttcattaatgggcatatacgacatggcaggccagaggaggcatataaatatatcgaggagatgattaataaagggatgaaagctccacaaatagactataataagtttgctgcagatttctcaaaggctgggaaaccagatatattgtttgagttggctcagaaagtgaaatttgctgggaaattagatgtatctaatgtgttctatcagtgggcagatagaatgaagagtcgggtgaagagaaatgtaccttcagattggtaatagaatgttctaagattactatgctgccagcaggaatgtggcatgctgtgatggtgcttgaaatttgattactaaggagaactgctacctttttcagtttgccattgtcaactttaatataattgtgacctgacattcaaaaaaaagtgcaagatgcaaggcctaccatgtgcttatttacggttgatgtcttttaacaatcttcaaggcaaacctgtgacatgcaaaatctttcttattatcactcgttttgacttttgtgattgatgcatttatcacatcgtgttaaacatagcttgttattcacatgttgatatgtgtagctccttccttcttgtttacgtttgtttgtttctttgattaaacaagttatctgagctatttctttgtatcttttttgatgccatgacatagaaaacactacattatcaaatattcaaatgcgtagatttggtaaaagtttgactatgatattgatgatctttcgtggtctgagtggtggagtttttgcagctattcacaggctggaaagttcatgcactgccctccttgtggatacactttctgttaacaaaatgctatacagtttctttctacttaccttgtgattttgatggagctctgttcctgtggttctttgacatttgttggtctcttgagcattagttctgcaatatgcattatgctcctctattgaactctatagcccatattgtggagatcactaacatgttagtaattttacttcccatcaaactttcagttccatcgaattgtacattattgaaatgctcttctgtcttcttatactcggtattcctgtaactagatttaaacaagggtacaagacaacaaaccttaataaatgtattgcatgcagcacatgcaaatcttttggtctaccatgtgctgggtgtttccagcatggcactctgctggtatgaggctaacaaatatctactattgagtttgttagctcccgtgactctgggcactgcttcaccattttgtgactttgcacctacatagcaagggatattttttttcatgcaacccagaatctgaacgccattgcgaaaagcagggataaaatgctgctgtttcactgcaccaactaaacagagaaagaaaaggagatgagaaaactcagcatgttttgattcgactacagtctgcgcccccaagaaaccagggaacaggagtcaggactaacctccagcagctgcaaccggtactgcctctgcccactttggacgacgccaatcattcgcatgacaaggtagagcggcagcaggataccagcagcacgaatgctctgctgcttcagccgtcgccactgcaaccagatgccatgcgagcgtcacaatggtgaactgcacaagtcagaatccaggggacagcatggatcaggactcgtcctaaaggatggctatttttcaattcgctgcatgacttagaaccactacataccgtgatcgccagcgaccggcaccatgtggcgcattgatctgcggcgtaggagcacctggtgtaatctgcaccgtcaaccaagccctccggaggttccaaatgttgcatgtcctcgtgttcactgcacgatcacttgagaaaatttagatggttgccaatttgactggaacccagttacaagcctacttgaaagctttttttattttagattttctttccgaactttatgaaacttttgcaggttaacggttttttttttgaaagaa

SEQ ID NO: 34774 - DNA, 1220 bp, Zea Mays
gtctcagtcgctggcgcataggacctactggccaggttatctcccacagcgcgcggcgtcggactcggaaccgggaactccgttgctcgcgcggatctcgccaagctattgcccggggccatctggtcctctggctgggcatataaatgccgatgccccacgcccctgacgcacttgaatgcacctgggtggtgggcgccattgtcgacattggtggagggctatctgccgtcgctggcaatttggttctacgccgtcattctggtcccgacaggtggtgtgggagcttcgtgtgtgctcgcgcatggtgtgcatcgtcgtattgatccgagaccttcatcgggtgagggtgaattgctcgttgtcgactgggtttcgccgcggattgtctggttccgtggccgggggggggtcttcggcgccactaccggtaagtcatccatcctcgttttcatcatcatgtctgcatcacatcaacgctagcgggctcggggatagtgtccctaggcgaagaactagggttcaccgatgttgccgccgtcgtggctaatgtcgcggttgccgcagacttgttggggggagaagaagcaccagcaccgtcgatctttaatgtagtggccaagattagatccatggatggggatacctcggccatcggttttcggatggacgaatgagatttggcgcggggtaatgattcgggtgatctaagcaagggcgtcagatcgggatcgaacggtcctaagtccgtaccggttcagatgtgtggtcttctaatccgagcccctgattctcgatctgacggcacacagtttgccataccccttcggctagcgtgttttgtgaaagagaccctgaagaacatggaaaacaacccgccgtccaggttatgggtaaaatcattactgtggggtcctagcatttacaaaagtgacccagaacttatttaaaattgaggccaaataccttggtctcggttaattggtaagaattaatttagaaaatgattttttgtataaaaataatgtcagaaacttgtttaattcattgtaacttcgaattgatccgttccagttgcattaatcttgtactaatcttgttcttcatctagtaaccttattttatcatgaaacctatggctaaaatgatgcactcaattggttgtatatctatcactagaaacttcataaaatcataactctttgacggtaactccgaat

SEQ ID NO: 34775 - DNA, 2937 bp, Zea Mays
gtaggatcatcatcatcataacatgaagcacgaacagagatactccatcttcgacgacagtgcttcgatgaacacaaagaagcttcgtttcaaacgtatacatgtgacgcaacaggatgctttgttgtgtacaaaaagaagggaatgtgtttttcgccttcggctcaaaaaatacaagtttcgtccacagcaaagcaacttgtacatggatgaaaaggtaaaaatatattacaaggtatggacagttatacataacattgttcaatccttgattacagttttttctacaaagttaatacaaatgttactaagctctacacaggcaggcctaagagaagcttcaacagccttcggaacgtgcttcggactatcaatcttcggcaccgccatcctgcagataaacaaacggtgtaaggtaaaaaagaaaaattacaagacataaagcaagcaacaggtataagttctataccggcttaagcaagtttcgggcttcgtcaccaggcaactctcgcccacccttagcccaaatctgagttataaacctgttcccgatgctccgggcttcactggggatatcaaccaagtacgttggagacagactgaaggttggtctatttactatttttgcgtgcgtgcaaccagccttcataaatgctgcagctgtgccgcgagaagctagcaaggcacagaggtcaccgtgcccggctattacttcatcaagcgcctcaacttcattttcagtatgttcgaaggtgctaggtatgtcttcatgaaagggaaatgtgcccttgggcaatttctataatgttttggtgattaagtgcccaacacatttaattgagttctaatgtgcaaaataaagtgagaagtgcaaatcaaggaaaaaggtatgtttctagacttggtgaattgttttgtgtactaacatggttatccaagtgctagaaacagtgactaaagaagaagaaaggaaaagggaaaagcttggctctatgtagccaatcctcagctcggtctggcacaccggactgtccggtggtgcactggacagtgtccggtgcgctaggctggtccgcgtgaagtcgtcgctctcgggactcaacggcggcgtacggctaaaaatcaccggaccgtccggtggtgcaccggacagtccggtgagtcgttcgcggcgaactcgtcgccctcgggaaaagcaaagggtgtggaagccctcccaagttatcgggcccacatgcaccaatccttcccttgatggcctcagatggctatgcacgtgtaccaggtaacttaataaggctatcacgagttcaacaatttgaactcatcatcccaaggatctcccaccatacatgcatactacagtaatcacattcgatacacacacttcggagataagagcggaagactttacaaaacattcttttcatttctaaaactgaagtttattacataggaagagttacatttattacaagtcctgatatactcaaagtgcataacttactacattagcaggaaggtaggacccctccaaagcttatacacaagcctaactaatcctcctctagaactgaaagcgccctccagcctcacgaacacatagagtactcctcatcacctacaacaacataggttcgaaaaccctgagtatggagtgtactttcgcaagtcttacccgactaaggaaaaatgactctcaaggatatgctggttaaataggaatcaaggaaaaggttttagcaagaatcaacttagatactttttgcagaaatagcttactaaagtgagtccttactttcaatattttaacgccagattaaatattaatagactctggttgcatctagtctaatttcaccatctcatcaatacaacatcttttttattcataatgtttacatcctgacttaggttgcagggcagcgatcaagtctccactctccggggatataacgatgatccgaatcgatttactcagctgaggatctctaaccacacgacatatgtagcacttaacccttgcatatgtcaaccgttcccacagatcctccacaacgtgaaccggtccgcgctacccgggagcacagtactcctccgtccagcctctagccaggagggtacacactactgaaagggaaatgtgcccttgggccatttctaagtattttggtgattgagtgccaacacaagtgcttaaatgtgaatttatgctcatggatgaacaaaatgcaaatcaagagtaaaggtatgtttctaagccttagtacattggttttgtgtactaatatacttgtctaagtgttagaaacagaaagaagaagagaagaaaagaggtgaaaaaggcgtggctgtgtacagccaagactcagctcggtctggcacaccggactgtccggtggtgcaccggacagtgtccggtgcgccaggctgactcggcgtgaagtggccgctctcgggaattcgccgacggtgtacggctataattcaccggactgtccggtgtgcaccggactgtccgatgagccaacggtcggccgggccaatggtcggccgggcgatctgcgcgggacacgtggctgagccaacggtcggaagggggcaccggactgtccggtgtgcaccggacatgtccggtgcgccaacggctcccagatctgcaacgatcggctgcgccgtttaaggaaagaaatcgggcaccggacagtgtccggtgtgcaccggactgccggtgcgcccgacgacagaaggcaaggatggccttccagatttgctctcaacggctcctagcttccttggggctataaaagggacccctaggcgcatggaggataacaccaagcaaccttagagcattcttgatcatccacactcagtctttgcgcattcattcgtcattctcagtgattcgagctccgttctagtgagaactttgag

SEQ ID NO: 34776 - DNA, 3124 bp, Zea Mays
ggacaggcgggcagcaagcaacgggcacgaaccgccgccgacctctcacaggcggaggagggagggaccgagggagagacgctctcctctctctctctctcacacacacacgcacagtcccatggtcgcgcacgccgcagcatccgcatccgcatccgcctcctccctgtgagtcgccgagcgacgccgcgcagatgaaggtgtcgtccaggaagaaaccgccgccgcagcaacagcgggaggagacggaggagcaagggtcgtcgggggcggccgaggccatggacgccgccgcagccgcggccgttcaggaggaggcggaggcggaggcggaggcggaggcggaggggaggacagtgctggtaggcgtgcgcgcggacgccgagagccgggcgctgctcacctgggtgctcgtcaatgtggccgcgcccctggaccgcgtcgtcgccgtccacgtcgcgccgccgtccgccgccgaggcggtcgacttcgacgccatgctcgccgtctacgagggcttctgcaacctcaagcagatcaatctaaacctgaagatttgcaaggactcgtcggtgcgcaaggcgctagttcgtgaggccagcctgttcggggccgcaaaggttgtcctcggcgtcgccaagaagaggcgtgcgatttcgtcgtcgcactcagttgcaaagtactgcgcaaagaagctgcccgcgaagtgtgcggtcctcgccgtgagcaatggcaagattgagttccggagagagtcgagcgtccatccagatgacggtgagggtgacgccacgcgtgactttggcaccaagggaagtgaattggagaatttgtcaacggatcaggtcgagatcgacgcagatccttctagtacaaatgctgaagagtcaactgtcaaacagggagacgagatttccgagcttccaggtaagggtgccagtgtgctctactgtgttcttcctgagagaagcagcggttctgttgcaagtacatctagtaggcaagaccaagattcagtggatctgccatctgaaggggctggggagctatattgcttattgccacccaggaatggccattcagtcaggagcattggtgattctaagcgttcaaatgcgagccaaaaggatgataaaccagccaatccatcactggaaggagatggcgatctgtactgccggctgccgaggactggacgaccgggtaggaattctgggggatccaatcgttctgccggtataagaggtgcagttaggcgtagcagtagtttctccagcgatatccatctgagctcagagacatcacctattaagaaggatggctcggttagcatgactgccaccgaaaggagttcttctgctgtatccacagaagctgaggactcaccgaaatacaccgcacgaactgctgaaacaccctcgagctccccaatgtcgctgagacggatggtagaggggagatctgaccgctgtcacctccatagaagaatctttagacatcaaagaagttcatcttttgaatgggcaaagatctcaatggttcaatgggcgatgagacttccgagccgatacacttcggtccacccagatggcaaaccactgaaaccgggtgcaagtccaaggctgaactgtgattctgaaactgagtccactgcagctgttgagccagaatcaatgttttctttcgctttctatgatgtagcatggcctccaagtgaactggaatcactgcgagagaagtattcttcagtttgtaggatgttttcttatgaagaactgaagcttgcgacgtccaactactcacctgatatgttaattgggaagggtggaaccagccaggttttcaaggcacaacttgatggcggaacatttgctgccataaagattctgaaaccctcggttgatgcaatacacgagtttgttacggaggttgagaccgtaaccagcttgcagcatgagaacattgtagcactaaggggattcagcttcgagaactacaaccttgtgttggcatatgattacatgccccgagggagcttggacaaagctcttcatgctctgcgatttcgggttagcaaagcgagtgtcggcttcgactccccacctaacatgtactgacatcaccgggacttttgggtacatggcgccggagtatttttcacacggggaggtcaacgagaagattgacgtctacgcattcggagttgttctgctggagattgtttcgggaaggaggcccatcacaccagggagcgcgaagggtcaagaaagcctggtcggttgggcgaagcctttgctgtccagtggcgggatcaagcacctggtcgatccgtttctggggaacgattacgactgcgatgagatggagaggatgacgctcgcggcctcgctttgcacgaggacgtcgtggcactctcgacctgagatgtcactggtcctgaaacttctccagggggacgacgagacgatgggctgggcgaggtcggccagcttcgacgggtcagacgaggaggccatcgcggcgggacctgacctgaacatgcagtcgcacctgagcctcgcgctcctcggggtggatgcggacgacacgctgtcgcgctgcagcagcacggagcgcacctcggccgacggctactggagccggtcgtccagtttcgactagcggtagctgcgtgatggaactgatgcggcagagtagagtagtggtagtgtggttacgtacagcaggcaggcaggcaggcgattggtatgcttggtgagatggatgttcatatcaggattcaggtggttggaatgtggacagctgctgatttagtttagatggcagtgttgctttgctgatttggctaggagtcgagttctgttggtagtatagatctgaatctgaccttacgatgcaattggtttcgtatttgtattgttatcttttttttttcctttatcaagtcttcatgcaagaataggctaccaattggttgttggataggcttgtctagcaacaagcctgtaagataagggacttggtaggaaagaatctgcaggatgaataaacctgtgaggattaaattaattgccgttagcccatggtggccagccagagccaacttgggcttcaaggcctttcg

SEQ ID NO: 34777 - DNA, 1690 bp, Zea Mays
ccctaccaactacacagccgccgcctcagcgaagctgtggaagaccagcagcaagggccccttcagccttcgccgcctctgtcccttctcttccttccggtcgaccagatggcctgccgcgcgaaggtggtaggacaggtggagcgggtcgacggagagtcgctatcctacgcggagttcgtccgccgcttcatggcgcccaaccgccccgtcgttctcacgggtctcacctcatcctggcgggcccacaaggactggactctctccgggtctggtgaccttcgccgccctaatctcggcttcttcacccaaaacttcccttcctctctcgttcaggtcgacgactgctcctcgagtgatttcacggaccagaagcggcttgagatgtccatgcaggagttcatagaccactgggttgggggtcctcattgtggttcaagtgatggagatcgtgatggttctctgttgtatctgaaagactggcacttcgttaaggagtaccctgattatattgcatataccacaccaaccttctttgttgatgattggctcaacatgtatcttgacagtcaccctatacatagagattctgacattgccaatcataaaaatgaaataaactgttctgattatcggtttgtttacatgggggcaaaaggaacctggactcctctgcatgctgatgtttttaggtcatacagctggtcagcaaatgtttgtgggcaaaaacagtggttgtttctaccaccatcacaaagtcattgtatatttgataggaacatgagatcttcggtctataacttacatgatgtttctgaaaagcagtttcctgagtttaaatggctagaatgcattcaagagcagaatgaaatcatatttgttcccagtggatggtatcaccaagtccataacctggaggacactatatctataaatcataattggtgtaatgcctacaacctacactgggtgtggaacttgctttatgaagactacaaagttgcaaaagaatatattgaagacattcgagatatatgtgatgattttgaaggactttgtcaacggaatttggcagctaatacaggcatgaacttctatgatttctttgttttcatagtgaggtttgccttagccaatgtagttgagctttaccatcttcagcagccagaggttgcaaccttgtcaacagaaaccgcacaccatttggtctataatctgatgtcaattcgtaatgttgcatcaaaaatgacaactacagaggcttttactactgagaatcgtctttgtagtgtctcggaagataaccgcagtgctttctctaatatcaaacaaatattagaagaggagagtttcagaaggctatcgatgacactgtcaaaggcatatgaccacatagacagagggcaaagaagtctcaaatcttcgatctcgtatcggaagggctgttcgtcagtgatctgcttgaaatctgattgcaatgttgttgactacattacttctttggttgatgaaatttgtggacccgaggatttgacgagactaattgatagtgctctctctcatggataattttagtgtatctagcattgtaaacctatgcttgcatgaatccttattcatcagatatgatgggatacttaggtagtgtttggttttagagtatggttttatggagccatttcgttttcaa

SEQ ID NO: 34778 - DNA, 453 bp, Zea Mays
ctattcttttggtacccgtgcgcggcgtgcgcgtgcgaaggcgagcgatagcggaagaaacaagaggctgctgctgcttcttccgttgcaacttgcatgtgaggcgaggccgcgagagaagcgcgagccatgtcgatcgcactgcagagcgggcgcggggtgggcggcggcgcccctaggttcggccacgtcgcccgctgcggctacgcggcctcgccgccgccggcggcggggcgcgggcgcggcggttcgtcctcggtgggacgggacagcgacagccccgcggcggcggcgcagtgggagtgggacggcgaggaggtcgagggcggcgacggcgaggtgcagagctcatacaagggctccgctttcgacaccatggacgcgctccaggaggccctgccctccagtcttcagagctggtgcatatctgtaaggcctcctattaaatggttg

SEQ ID NO: 34779 - DNA, 2836 bp, Zea Mays
ctatgaagcctgggcgcgcagtgttcaaacctcccgaccgttggagaccccaacccctaaatgcagtaatgctcacccgcaacgttcttctcccaatcggttccacctgatgcatcccccgccgacttccttcttcttcatcatcgtctcttcatcgcttcaggaggccgccgcataattagagataggacttagagatataataacccccagctcctgatccccaagccctaggcgtaggattccacgtccatcgatggcgctggacacggggacggcggcgggtatcgacgaggcgtacgagttctccgcgcccaggttcttcgacttcgtcgtcgaggaaacggaggaggccgtacgtgccgccgagagctggttcgaggctgcccgcagccacgccccctcgccgttcaacccaaggatcaaggaatcgagggcggaggtcaagctcgcggtcctctgtgatttcgcgcaagccgaggagccggctccagaggtaaataaacagaaggagccagctgacgaaatgtcggggccgcctgcggctcaagaagagagagatgaatcgcccccgtctctggagttcctctcggcgacggacctttctgtaaaatcagcagatggtggttctaccagcacgcttaagatgcagacgcgttatcctgcccctcctaccaatgttgcccctgcgagttcgacatgtgacagctcttcagtgaatactgatgcgcgcacgccgaagatgcaggtaaacatgtgcagagcaggtcctacggctgcttcgacgaatgtcaagaggagcgtgatgatcaagggtggccgtgatttggtggggactggaaaggcagccactgctggcgctgaaattgctcaagagaaccaagcggtgaagaggcagaagctcgatgatgggagagccagacagatactcaatgtcaagactaaggtgctgcctcataaggcgagagctgatttagctggaagcgaaatgaggaggtcccatgaggatatgcgctctgcgaaggaagcagatccatatgtatcagctgcagaattggttaagaagtttgaatcagggaccagagagcttagcatcactcacagtagatgtcgttctcatgaggatgctgcatcacagcgaagcctgcgaaggcctaagcttatgttaactagacctaaggaacctgacttccagacttcccagagagttcgaacagtaaaagtgaagagctctgcagagatagaggaggaaatgttggcaaagatacccaagttcagggcacggccattcaacaaaacgattgctgaagccccttcgttccctccacttccaaggagaaccccacagatacctgaattcaatgaattccatcttaaaacaatggagagagcaagtcgatatgcggacacctgttcagaagtttcttgtgcagatactatccagagtcaaaataagacactgaaatcgagacaagcaaagccaccacaacttcatacagcaatgagagctcggccaccaagtgtgaaaagttttcaggaacttgaactggaggagctggagaaggcccccaagttcaaggccaagccattaaacaaaaggattcttgagagcaagggagacattggtgtatttttccatccaaagtctcaggtcacagctcccaaaaaattccatttttctaccgatgttcgcttgggccctccatcagttgctgacttatttgacaagcaacagacaagatgtgcccagacgcaccataccaaaccctttcaatctacaaacagaggaaagaggtcatttaaaagagaggcagctagaagcacatctcttacaaaagaagatggaggaggaaaaggccagggttcacaaagctaatccttacccatacaccacggactacccgacgatgccaccgaaacctgagccgaagccctgtacaaggccagaaggctttcaactagagagttcggtgagacatgaactagagcagcgaaggctgatggaagaaaaacagagaatggagagtgaagaggctcagaggagaatcttcaaagctcaacctgtaatgaaagaggatcctttcccacttccggagaaagagcggaaacctctcaccgaagttgaacagtttgtgttgcatgttgatgagagggcagtgcagagatcagaatttgatacattgataaaagagaaagaaaagacttacaaaaggttgagagaggagaacgaattcgcgcacaagatcgaggaagagaaggcattgaagcagctgaggagaaccatggtgccacatgctcggccgctccccaagtttgacaggccattccgaccacagaaatcgacgaagcaggtgacaaggccgaagtcgccacagcttcaggtggatgagcgaggggcgaggaggcacgctttgatcagatgatcaccgccgttgtttatctatcttgtactacactgattgtcatgcgcggtcaagatcatatctcaatcttgccgtcgatctgttgttggttactagattctttcttctgctgaccagtgaccatatgtagagcaggccaggccctaataacagcaatctttgtcagcacaacgcagctgacacggtgtatgcccttgccctgtgtgtgtttgtgtgccagtgtgtgtgtgtatgtttgtgtaagtgtaatatgattacctcgatggtgagacttcttaatccgatgatggcttgatatagagcttgtgttgacccgtctggaacgtccgccggcagcgtgccatacgcacgcgtgttttctttcttgcattcaaataacttgaccagatcgagagagaacatttcatgtcttc

SEQ ID NO: 34780 - DNA, 3713 bp, Zea Mays
tggggacataatgttttgtactattggacatattttcaggggcaccaaatgttgggcactcaaaagaatacatggggaacttacagctgctgtaaagttgttagctttgcaatgctgggtgataaggatcctgttaaccctgacgagctcaaaattctgcaaactcataatgagaaactaagcaaatagttttgtgaacacaagtagtcaagtacacagcatcacaagcttataatagtaggcaaactaggaaaaaatagagcatgaaactattcaattcaaacgaaatctcttctcctttacaaatggtggggtttaatcactttggacatagtcaactgttagaattgaagatttccttctgttcaatgaccataatggcataatgtgaattttctacctttttggcagtaattcagttcaaagtgtagaaagttgagatgaatgggctgaacttacattgttgtgactttgttatcttggcaattaacattggcccagtagcaggggctcatttgattatccttccaatcactaaggacaccacgtttgtcaccaagttgcgtcctcatttcaaccaatgcttcgactgcagacaaaacagtcttatttgtggggtcccaaggtaggctcaagttctcaaaaagtggtgaaatacttcctactgaatctagtcagtgctttcacatgcaatctggaatctctgtagcagttaatatattcccaatacaatgctcagatttggacacagctaacatacatgcactcttgtgaccaattggaatttctcctgtaaacatctgggaatctggctatctttgaaaaaagttaacaaaggcttcaattgcaaccatatattgacgcttggctgggcggctgtcaggttggaaggcctgacctactaactaaggaaggccacatgattttagtgcaacatgtgttaaccctgatgctggtgtatttggtaatggccatcgacctcccttcatggaccattaaggcaaatggcaaaataaggagaggtttcctctggcaaggaaagacagatgcaaaaggtggccattgtcttgtggcatggactaaattgtgcctccctaaagaattaggtggcctgcggatctccaatcttcaaaatcttagttcggctcttaggagaggtgactttggttgaagaaaacagatcctaattttcgctggtctcgttttcatatacctgtacataaatgtgcacaagctttcttctccatagcagtggtttcagaggtgggcaatggggcagcaaccctgttttggtcggatagatggattcagggtcagagaattgctgaccttgcaccacaagtctttgcaacagttcccaagatgagaattagcaaaaggacagtacatgaagctcttactgatcactcttgggtgatggatatctagggagctctaacttttggagttattaatgagtttcttagtctctgggatttgctctccgagttggtgttacagcctgggattgatgatgtccatgtttggagggttgtcttgtgatggctagtactccgcaaaatcggcttatgaaatctatttcagggaagggtgatcttcagatcatgggaaaggatttggaaatctttggcctcctggtaaatgtcggttctttgtgtggctggtaattcggtataggtgttggacagctgatcaattagcaaaaagaaatctcccacatcctacaagctgtccagactgtggtcaagcggaggaaaccattaaccacctattgttggagtgtgtcttcgctcgagggttttggtttaatctgttgcgaagggctgggctgcaggctctcactcctcattcggatgataaatcctttgaagtagagataatctagtccataataccaaataatttgtatggctctgatgaaagcttgtcagtcataatcaaagtttcagtttataaatacacatatataaattgcttatctaattaataaagggcaccttatttggtggaaacgttaaagccatggccataccttggaagtcgacagcaagagcaagcgatgcccgctggcatcgcaacagaaggaacacaaaagctaacagcttcatgcttactgaatccatcatcacgtttctgtttcaggaactgaaagaaaagcccttgcgaagtggaatggacgctagactgctgcaccaaggaaacagagcgtgtaagaggacagcaaacatagaagaatggttcaaaacacacaaaggagacttcattcggcatggttccaaaaaaaaaaaaaggtttgtatgtgtgaaatgagtcttttgtgtggtgctcaatagtatccagaagtttcctcccatgcatttctcacaaattaaaaggaaacttcattcggcacctaaataggctgtgagtacaggatccggatcgagtgaggttatccttatctaaatgggacctaatgaccctacagaccttgtggattactacagccagcccctatatttccatagtacatgacaaaagcctcccctccttttttttattatttagtaatcaccgaagtggaaatgtgcagcgaagtggagtcgctgccagttgtgccagagagcatcaaagtccagtaagcatgtttctgtctactcctttttttagcgcctacgtagcaacttccgaaaggtcagttcctactctgtttcaagaactagggatcatgctatgcggtgcaggtggaactttctcactcatttactgtccgttttgctatgcaggtggaaagaaacttggggtcgctagaggcagcgttctcctgttcggagtagtgtttgggctgaaacaaagcttgttgtttgcagctatgcttccattggtttcgccacaaaaggcaagcaagcaagaagcacaggcggcaataaggccagaagcacaggggtggggggaaccgctctaatggcgagcaagcaatcaagagtcaagcaaacagatactgggaagacgaagacgacggtgacgagaagaagtcaacgaggcaataattgtacgtgagcaaagcaactgagcttgcggttgcggcaaggaagaactggcaatccagcaccagcagcagcagtgaagcgaacagatgctcagagaagagaagaagccgagcaagcacacagcagggaagaccggcaagctagaacttaccaagagaaggagaagcatcaggcccaccccagcttcctcgaactctgtcgggacagggaaagaaagaggagagtggagagaagtatcagcactgagagactgagagggtgtgaagacaatggaatggtcaaaatttatcggagcgctcactggatcgcgcgcgaacggcttggattggctgccgtgcagtacagattctccatccacttgattgatatatctgaaccgtccgcttgtaatcctagggctgtcgatgctgaggctcacgtacccatatcagcacggagatctatctttagcatactaaattagcccactagtaggtcttctaatatcataacatggccctacaccctcctttccatattaggggtacatacaatatatgtcttgagctatatcttcgagtgtatctaagagagtaaatgtaaaaaaacgtaaaaaaaaactcaagacacgtatcttaacaaagacactgtgtcttggctctatgttcgagacaagagactagctgatcagtcaatttaatgtat

SEQ ID NO: 34781 - DNA, 1446 bp, Zea Mays
aggggcagcgttgcagttagtctgacattttacgccgtcagacgactggcagactgggccgccgccgccctaaaccagctgaggctttcgttggtctcttcgccggcaacgagcaccaccagtttaagatgtcagaagcacttcagaaagataaggaaattggtgaagaggaagaggaagaggagtatgtattgttagagttggacaattgtctttattcagacatatcgcctggtgctcagttcgtactctctggtttggatacattgacgcctaccttgatagtaggtgacaatctgaagatggtaagtcatgttctggtattatttttcatactatgtactgtacctttgccctttgggttgtggactgtagcaggccctgtactgctggaggtactttgtgcttagctgcacagggtggtagtaagtttctgcactttcgtgaacatactatctgatttacgaagtttcaaactttagatcaagtcgtacatatcttcgtttaattgtattgtcagtcttctggctcaaaatcagttactagtttgagttcacttcttggtgagtaacagagcacggagtacatatttgtcatgactgtagcttgtgccgttgaatgctgtaacaggacaagatcagttactagtttgagttcacttcttggtgagtaacagagcacggagtacatatttgtcatgactgtagcttgtgccgttgaatgctgtaacaggacaagatcagttactagtttgagttcacttcttggtgagtaacagagcacggagtacatatttgtcatgactgtagcttgtgccgttgaatgctgtaacaggacaagatggaaacaagatatatttggaggccataagttacttgttattccttaaagtaccaagcgtgcattttactgattatctattttgttgctaatgaatccctttgttctaacgattttcttctttacaaaatgatttttttttgaaattcccaattcatactagagtttctggctctaatctgcttaccagccgtgctaatccttatgccttctaatgacaggtcggggaatatgatgaaactattggcacctgctatctattttctgaaagtgaaactgaaccaaaacctgcaagtgatgagctggcaccttctaaagaaaacacagaaacaccgcttaacagcagtaaggaagcgcccttgaaggaggtgaaccatctggccagcgttcaaaagatcctcaaatttaagccaatcaatgtggagcactcgcagcatcgagcatatcagcacaaggacaaggaactttagaggaaaaaaaatacctgctgttttcttcagtcaatgcattcagtgtacagttttaggttcattgaaatgaggtgggctgtatacttgttgaatgttgagttcatctatatatatgagctactatatcgatctgctt

SEQ ID NO: 34782 - DNA, 968 bp, Zea Mays
gctaggccggctaggtgcatcccctaatggaatttcagtcaaacgtgaggagggagagagcaaaacgacctgatcctccttgcaccatctgcaagggcacagggagaatagactgccgcaactgctttggccgaggaagaacaaaccatgccgatgtggccatgcttccgaacggcgaatggccacaatggtgtcgaatttgtggtggtagtggactggattactgcctccggtgccatggaactgaggaatcgcctgggggctgggggtccagtttccagccgttctcgagatcgaatctgcatgccatgacgtcccagggcccggcgtcgaacgaggtcttggcgaacgccttccagtggctgtcgcccaggtccgtcaccgcctgccgcgccgtgtgcctcaggtggtccgagctgctctcttcgccccgtctcgagtttctcgccgacgtcgacgacggcaacgccgactcgtccgcatgcttcgctggcctcggcggtgccagcgcgggccgcgcccggcgccggcgcaggcgcaggcgcggcgacaccgttccagcagcaacttggtttccgtcgctgcccaaacttcagcagaggcgatctaagaagaagcaagcgtaccggcgcatgttctgacggccgagcgcatgttctgacggccgtgttcacgtggtgtaagttctgtgtcgagtccaatctgtgtgtcccttgtttgtcaggtttagattctgctattctactactatagtcagagtgcacgatgcacgcaactgtacgtctctatcgttgttttcaacatgatgaacatgcgaatttcgtggtattaattgggaccgtctgatttctcatgaagccatagttctattctacaagtatttgagataaagggtgcatgcaaactgaaaaatgggagatgacattactgggtgtttggctggcataactccggtgttgactctggat

SEQ ID NO: 34783 - DNA, 2279 bp, Zea Mays
tcactccaccacttgactctcgtctcgtctctgcactggattggaggttggggccgtgaagggtaggtaggtcgcttgatagggacaaggggggagacggcgagaggcgtttcgccgagcagttcgcgtgctcccctccacaggccgacgcggcgacgccgctgtttcaggttctggaatttccagtgcgggtgcattaggctgctatgggcaagtcgccggggaagtggatcaaatcggtgcttttggggaagaaatctaccaagtcaggtcctaccaagtcgaatgaatctaaggctgacaacaacagatactcgaccggggaggaccgcacattgtctgagagttctcctgtgatttctgagccggtactagttaacatccacaagaacgtagctatcaatgggaaggctgcagatgccagtgatagggcacggcaacaagatccgcagagccaaagcgttgttgagtccagatcatcggctccagctgctcagctgggagaagatcaagctgcagcgaaggcacaggcagcctttcgtggttacctggcacgaaggtcattccgtgcattaaaaggtatcgtaagactccaggcgctgattcgagggtatcttgtaaggaggcaggctgtatcaacccttcgcgcaacatggttgattgtgaagtttcaggctctagttcgtggaagaaatgttagactctctggcagtcgcatgcagctcaatgtgaagtttggtcagagtaactttgggggtgttagatcgtctgatgcatggaaagagaagctatcttcaaatgcttatgttcggaagacatgggaacctaaggggaaggggttcgggggtttctcgacccgccttctgtcttcaccaattgttttagaacctcttcacttccagtatgacaagagggatcccaattcaacctataactggtttgagagatggaccataggttgcatctggaagcctgcttttcaacccaaaagagttgctgatgggaaaccactggtaaagaaggctagttatgcaatggaaactcaatcagccaagttaaaacgcaacattcggaagggttctgctgctatcgctgggagtttccatacatctggtgaatctgataaagtaaaaaggaatccaaagaatttctctagcttccctgctgattcagtaccagatagccagttatctgaacttgaaaaggttaaaaggaacctcaggaaggtaactgattcgatggctgaagcctcaaagatatctagttccagggttgattcctcgaaggtatgtaattctacagctgaggttccaaaggaatctaatcctgtggcagaaatctcaaagatacgtagtctcctgaatgggatctctgaccatcaggatattcaatgtgagaatacacgtgaatcttcatttcctcttggaactcaagaagactctgacaatgatcatctattgcgatattcaaatatggatagcttggacttggtacctggtttgaaaagtgatcaggaaattcagctggattcggtttctataggagaaaatgttgatgatcccactgttgttgctccagcagttgaagaaatgtcaccgcaaaacattgatacggaagacaatgttttatgcaagaaagaggaagcaaggtccaaggaagagcacttgtctaatggaagccttagaactagcaagaggaagtcttcattccccaacaaatcagaatatgtagaaaatgggactcacgctactcctgttcagccaaggcagccaagctatatggctgcaacggagtccgcaaaggcgaaattgcgagcccagaattcacccagtctggattctgattcagcggcagaaaagaatggtttcacccgacgccactctcttccttccagtacaaagagtagagcacttaaagctgaatggaagcgctgaagaggcaacccatcgtccacttgaattgaattgtgcactgctctgaaacttcgctggatgaactcgaccggtcttgtcccatgttcttgctgtattgaacaaccccttgtgaagttgcgattctggttcagtttgtcgtaggttcatgtgcaaccactagtgccttgtgtcgtatattgcatggttcttgtcgaaggaacaatgcctgcgaaagctgatgttaggactgcattaactgaataacatcacccagttgcccaggtctttgtttgtcgtcttaatgagtgatgaaaaagcagtttcgcagaactgctagtgacatgaaatttaaaacctggatttatt

SEQ ID NO: 34784 - DNA, 1752 bp, Zea Mays
taattaattacggtgtcaactactattttagttcaatttatcccccttaaactaattacgtcgtaacgccgttttagtctgatattgcatttgtagaggatatatcccgtgcaatcacttattttggtgcaagcgtgcaatcaaattatccagagcatccaatctagatccaacggtttcatatggaaggggttaaaagtaaaataggtactatgttttaggtggaatgggttaaatataaaataacagtcatcattagatctagatcggatgcaccagatcgcttgattgcacgcttgcaccaggataagtgattgcacatgatatgtcctcgcatttgtaggtccaaacgattggttaccttgacggagatggtaggctgggcgtggtggtgatcatagaggacggagtagtcgccgatgacaacaacgttggattggatctcctccgacacacacttagtccctgacggcgcaatctccagccataccgccccggcccccgccgccatccaccacacggccgccgccgccaccgcggcccacgcgccacctcgcgccatcgtctcttcctgccgcaccaccacaacgaacagccccaagcgccactacgtccatctcaacgcgattcgataggcccataaacatgcgtggcgcaacaggctcaaagaaaataccaagttgggctttattggacggagattgtttggcccagtgactctacccacctccagtttccacttagaaaagaataatttctcccgaaaaagggtgaagagcagaacgacgaggagattgcttggtgggaggagttggtgaggagaggtcgcgaccatggagaaccttgctctgctttggggcatcatcggcccgggcgtgtccggcgccatcttcggggccggatggtggttctgggtggacgcggtcgtttgcagcgcggtccagggatcttcgcttcgctggcggcgctcatgttcaattgcgtgaacaaggatgagatcggatacgactattactcaccctacggggacgattcagagtggaggtgaagctctggctttttgtggcatatgtcgtttcttttgtctgtttagctggatccgtgggtttattggtgcaagatgcactgacgaacaagggcccttctgtctggactggtgttgctggcgttctgcaatgtgttcttgtgttgataagcggcctggtgtattggacatgccactcagaagattaagggcgtaatgtcatgagcagacttgcaaggttggtcacagttgtgtgaaggaaattatttctggcaacatatgattttgtgtgatggaaatgacggacactgttcactgctgaatgggatgactagatgtttcatctgtgcatatctgacttttggaaaatgatgtttcttaacaccggtgcatgtgttagccccagcttcttgtgagttgccaatctgtgatgcggtcgtgatcatgcaaatcttttggctaaagctgaaaccggctgcagcaacaagctagtgctactatttacaccatgcctcctagtcaattacagttgacttcatttaagtcgagacgctgtctcggcctgtttcatcgttactccaccgtcccacatatatgaccgtaaccactttttgttttagttccataatataagaagtgttcttcctagacatgcatacatggatacatgagtggttacgccatcgaagctagtgttgaaaacaccattgcttcaagttgagaacgcc

SEQ ID NO: 34785 - DNA, 2379 bp, Zea Mays
cccatgtccgccaccaccaccgagtccccggagagcccggagcggcgatcagatgcggttgcgtggctacggtcgttgttggcgggctctggcctgcctctgcccccgccgcacgtgtccgacgacgacctacggtcctttctcgccgatggcgtgatcctcggcgcagcgctacgcaggctcggatgtgcttctacgtccaaccagggcggagcctcagcggcggcggcggcggggagtgatgtcgagaggttcgtcgcggcaatggagcgcctgggccttcccagctttgccgcctctgaccatgacaggggcccaatgttagctgtcatagtctgtcttcttgcactgaggggtctgtttggttccaatgttggggaaggcttgcattgtagccttgaagcaaaaagtaggatgcacaacatggagtttcccataagggtgaacggctgctgtactcaaaattgtcagtctagagaaaagggtgaagggagcataccaaaggtctccagaagtccagctacgtcagagccatcatctccgatatcaatgcctgaactatcttctatttcaaggcacactcgacataattttcatgaagtcttccatctgagacaaggaatttactctgacatgcctatttctaaagttttggagataatgaaatccaccaacttggataatgcccctactcagtcacttttgagttttgtgaatgccatccttgatcggatcattgaaaatgagaatggagaaattccttatgtaggctactcaaaagcaatacaaatatcgcttgcttgttgagaaaggtaataatggagattgaacgccgcatttctactcaagcagaacacataagaaatcaaaatagccttatcagagcacgtgaagagaaatataaatcaaggataagagtactagaggcacttgcaagtgggacaggtggacaaatgcaaataaattcaagtgcggcaaatggaaaaataaatattgctgaagatcatgtgctccagatgatgataaacaaaagcaaaattggagaaagaagattagttgataaagatatgtcaagcttgatggctcagaaggaagatgtagctagattgacaaaggataaggaagatatggttaggctgctgaaagataaggaagatataattagattgatgaaagagaaggaagaaatggttttgctgattaaggagaaagatgatatggttacctcgaggaaggagaagattgatggaagagatcaatcagccaatgcatatgcgaataaatcaactacatataatgatgaaaccattaggatgataaaggaaaaagaagacagtaatattacaattatgaaactaaagagcaaattggaagctgtaaaatcattatttgaagagagccacaaccagttagaatctgcaaaggaggaggttcttaagcttcaaaaggacaaggaaaatagtgccaatataatatcaaaactcaggcaagagctttcgttagcacatgaatcttataagacacatattcaagaactggagagtagtgctttgcaggcaagcaaattctttgaacatagaataaaagaagtagatctcatgctcgaagattctataaagaaaagaacagatctagaggaagtattaaaatctagaatggatacttggaagaagaaggaaatcatggtgaatcaagttttacgtctacaaatacagagcatccaggatttgaggttatcttctgtttccattaggcatgaaatccaaaactgccagcgaagatggtctgaagaacttaatggccttggacaaagtctcaacatactgataaatgattctgaaaattatcatgctgctttagaagaaaatagaaaattatacaacgagattcaggaactaaaaggaaatataagagtctactgccggataaggccttttattcctggggaggatcagaaatctactacaattaaatatgttggtgataatggggatctgataattgcaaatcccacacgccatggaaaagaggggagcaagtcgttcaaattcaacaaagtttttggccccactacttctcaagatgacgtattcaaggacattgaaccacttattagatcagttcttgatggttataatgtttgcatttttgcgtatggtcaaactggatcagggaaaacatacacaatgactggacctgaaaatgcaacagagaatgaatggggtgtcaattacagagctctgaatgatctgttccatatttcacataatcgtggggataccatcatgtatgaaataaatgttcaaatgattgagatatacaatgaacaaatccgtgatcttctttgcagcaatggttcagagaagaaatatccttttc

SEQ ID NO: 34786 - DNA, 1815 bp, Zea Mays
cccacctagagtcctaatcgaaaaccctcgtttgttcgcttgaacagaagcctcccccgccgcacccgccaggcggcgcgggcgcgcggcaatggccgcgcagaacgctgggatcatcatcgattgtcgacaggcgatgtcccccgatcccccggccgtggagttggaggtcatcggctcatcttctccgtccatcacgccatgtcccgctgcagcggcgcccgccgacgccgatttcgatcatgacggatgcaccgcggaattatcttcttcaactgatcgagaattacaggaccatatcagacagtgggaagggtcctatgggcagggtgtactccgtaggatgccggatggtggcgagaagatgcattcacgtgtcctccggatgaagaaggagctcgagcggcggagggccagacagaggatggatgtcacgcccttgagacagacagtgcaagctaagcgtactggtggcagcagtggagaaatctacaacttaaagtctgatgatgagaccatggacagtacggctagcaaacactatccaaactcaagttgtactacatctacaaagacctatacccaggttaagggagctgcatatgaagaacaaagttctttaagccatggcaaatatgcttacccaaagaatggtggtcaaatttcaaaagagtcgttgaggcatcaatcaaaaacgtggaaccttgccaaaaataaggcctcacccttggagattaaaaaggatgtagttctgttggatgacgatgatgatatagagcctgctagatcagctgatgttcagatatctaataagtgggaggagtcaaatatccactatccttcaagcactgatccagaagcggttgaactgacctactctgacatgaaatgtcttgaaccagaagaatatttaaaatcacctgttataaatttttaccttcagtacctcaagaaggcaagacctcgcagggatttacacatgtttaacacctatttttatagcaaactcgaagaagcactatccatgccgaattcagcaagttacggagatggtggagaggtgtagatatttttaagaaagcgtacataattttgccgattaatgaatcgatgcactggagcttgatcattgtttgcatgcctacaaaagaggcagattctgggccaataatacttcacttggactctcttggtcttcactccagtcaaaagctttttgacatagttgcgagggaggatatggaggcgtctttcgaaaaatatcaatagggaaaagattgaggtgccacgtcagcgtaacgagtatgattgtggcctctttatgctttactatattgacaggtttattcaagatgcgccagagaggttgacaaaagagggccttggcatgtttggacgcagatggttcaaccatgaagaggcttcagcgtttcggggagggatacgggcgctactgattgatctatttcatagtgctctagacgacgatggaccatcggaggcagagcttgaagacaaggacattcagatggactgagcctgctgttgctgctttgattgaatatgtaacctcgttcactcccaagtgaagtttggccgtggagggaatgcgccccgttggctacacacttttgtttacacgctcgttcattcggcggtggaaatgtacagttcaacgttatctaagggcctgtttggaaccggattcagattcaacaaaaatatatttacgaaaagttagctaaatggtttagggtttagatcaataaaatccagattcacaaaatggtgcctttagatttaacaaaaaaaaca

SEQ ID NO: 34787 - DNA, 331 bp, Zea Mays
tcacccctaggaaccgcaggtttttgcgtagagaggaaagtcgtgtggcgcgtgctaggtgtttgatggaatggatgaatcagagatccttgttgctcttgcgaaatccaagtctatttagtgttggtacattgattgatcacgtgatgtggaggacaagagctgggttaatcccaagatgatgctgatgaataaaccggaagagtggattatctgatcaagtaccaggatgagagatgctcaccaagtgattgtcatctaacaacactgacttagtgttattccaggcaagccccggtgcatttgccacctccttccgttttaaaaagtt

SEQ ID NO: 34788 - DNA, 5438 bp, Zea Mays
aaaaagggggtttggtttttattggctgcacacaatggcagcagcgatccgaacccaatccccatctccgcagcgcgtgggtaataatcccagttcgagcagtcgccacacgcccgttgctgctgttcctggcttgcggcttcgccaatctccgccacacccctatcctttcccttcttcgtcgcctcacccaccaccccatccgctgcggcggtgttcgtggtgttcaagtaattgtttttggtggtgtcattattccttttcctcctcccagttcaagccatcggtgctgggtattcttcgccacggggatccagccgcacatcgattctcctttttccaccccctcgctccgcgacgcggggtataatagcgactgcgaggcatttggtgcgggcagacgctacgaggtggggtgagaaaagtttctgcgccttgctttgcagaaggtgctcggatctaggtttcaaggccgtcgatcgccgccatggacgccggcggggacgaggacggcgccgggaaggcggcgctggagagcactgccgaggccgcgaccctgccaccggcgtcaacagtggcggtcccgtccccggtcccggcttctgcgcctggggcggccacggggacctcagggtcgggggagaagccggtgaagcggatgatgaagaccccctaccagctcgaggttctggagaagacctatgcggtggagcagtacccgtcggaagctatgcggctggagctgtcggcgaagatagggctgtcggacaggcagctgcaaatgtggttctgccaccgccgcctcaaggaccgcaagccaccgtccaagcggcaacggcgggaggaagagtccgcgctagtaccagtgatgcctccaccgccagtgttaccagcacctgtgatgcctctggcaagcagtgaccttgtggtgggtgctcctgggccgtatgatgagccgctgcacccacttcactcgcgaaggggtgctgggcgtgggcggtcctcagcagtccccaggatttccatgccggatattgggaggaggtattacgagccaccaccaattatgatagcgccgcctatcccgtcgatgcagctcacgcaatatgagctccgtgtgattaattctgtggagtcacagctcggggaaccattgagggaggatggtccagcgcttggcgttaattttgatccccttcctcctggcgcctttggtgcaccgattgttccagagcaacaaaagcagcctgtgcgatcttatgatgcggagatattttcttggcatgatcaaaaactcttaaaggcttcagcatttttacctaatatggaatccccatttgttccaaattcgtttactgggaagagaaaatcaccagttggtaattcagccatagttcaacctcatgttggatcacgggctgttcatgagtatcagttccttcctgagcaaccaagtgatacatatgagagggcaacccgatctcactactatgacactccagtggaagtttcaaatgctaggataccttctatcacatcaggatcacaacttctccatggatctgaggaggctgcgcctagttatgcttttcaaggtcacacatctggttctagcctgttgcctccgtccagcaggccccaagtgtttccagcagcaccaacagattatgagatgactcagtctaatagcaaccttagttctgttcctgttgaaggacagtttgatatttctcaggttgctgcatttgaaaacccacctgtatcatctgaaataatagcttatcatgatgaagatacttctcgcgtggaaagaaaacgaaaacatagtgaagaagcaaagattgcaaaggaagttgaagctcacgaaagacgaattaggaaggagcttgagaaacaagatatgttgaataaaaagagagaggagcaaaggcgcaaggaaatggagagacttgatcgtgagagaagaaaagaggaggagagattactgcgtgagaggcagcgagaagaagagaggttccaaagagagcaaaggcgcgaacatgagcgtatggagaagtttttgcagaagcaatctagacgagcagagaaacaaaggcaaaaggaggaactccgaaaagaaaaagaagcagcaaggcaaaaggctgccaatgaaagggctactgcacgtaggattgcacgggagtatatggaactggtggaagatgagcgtttggaatcaatggaattagctgctcaaaacaaagggttgccctcaatgctgtatcttgacagcgacacattgcagcagcttgattcctttcgaggcatgctaagtcaatttcctcctacaacggtgagaatgaagttgccattttctataaagccttggactggatccgaggataacgttggaaaccttttgatgtattcatataatttcatctcaggagacattttgctaactggattgcaggtgtggaaattcttaattactttcactgatgttctgggtctttgtccagttacacttgatgagtttgttcagtctcttcatgattatgattcaaggttgttgggggaactgcatattgctctgctgagatccattataaaggatattgaggatgttgctagaactccatcaattgcactgggggtgaatccaggaggtggccatccacaaattgttgaaggggcatatgcctggggattcaatatacgtagctggcaacgccatcttaatcttcttacatggcctgagatattaagacagtttgctttatctgctggttttggacctcaattaaagaaaaggaccgtagaagattcttactatcgtaatgataatgagggtcatgatggtgagaatgttatattgacgattcgaaatggtacagcagcagtgaatgctgctgctaagatgaaagaaagaggttacaccaatcgccgtagatcccgccaccgtctcactcctggaactgtaaaatttgccgctttccacgtgctttcgcttgaagggagcaatggtctcacaatattggaagtagcagaaaaaattcagaaatctggattgagagacctcacaacaagcaagacacctgaggcatccatagctgctgccttgtctagggatacaaagctttttgagagaactgctccttcaacatattgtgtgaagtcgccttatagaaaagatccggctgattctgaggctgtgttgtcagcagcgcgtgaaagaattagggcttttcagaatgtgctttctgactctgaagctgaaaaggaggtagatgaagctgagagggatgatgattctgactgcgatgatggtgatgatgaccctgatggtgatgatgtgaatactgaggtggaagacgacaaggatcctcttcttgctgtcaagtcacaagatgaagtaccgagtacaactacagttattggcataaaggccaatttagatggtgtgggtaatgcattgaactcatcaagtagttttactaaatcagcaaaaggcgctcctctcccttctttaggcaggtccaatgcagcagatacttctaatgatttgcctcttggagtctcatcagctaatcatgaagtagtacctgatgattctgaaaatacacaaattgatgaaagcaatcaagccgagccttgggtacgtgcactagcagaaggtgactactgtgaccttagtgttgaagaacgccttaacgcactggttgctcttgttggtgttgccactgaagggaactctattcgtgctgtacttgaggagcgtttggagttagcaaatgccttaaagaagcaaatgtgggcagaagcgcaacttgacaagaggcgtttcaaggaagaatttactagcagagtacaatataactctgacatgggtttgaagcctgatatatatcaagaaaacaacgtgacagagattacttcaactccagcgtgtgatgcttatagagagaatgatgaacatgtcgggacaatcaacaattgtgagatgcttgatcagcataatcagggtaatgctggtagtctaccttatgagagaaatggcgtatgccaggaaatcctcgcaaccccagatacttcgtatgttcagcagtatgcttatgctgataaaaggcgatctcagttgaaatcgtacattggtcaccgggcagagcagctttatgtttacagatccttgcccctaggtcaggatcggcggcgaaacaggtattggcagtttacaacttcagcatcaccaaatgaccctggctcaggaagaatcttttttgaatccaaagatggatattggagagttatcgactcagaggagaaatttccgtcaaggtatacagttgctaagagcaaacaagaaacaacacctgaaacagctggtttggatctgtatgatggaaggtggcttcctggtagtggccgtaggggtcgtggacgtggaagtagaggaggtagcaggggaggcagaggtcgaagtcgaggtggaaggatcccaagaggtgttagcagctcatcaaggatcgagttcaagggtggtattgttgcttctgataaagcgccaaggaagaatgtacgccgagggcgtggtcgtggtcgtggtcgtagacgtggacgtcgaactgtgaggcctcggcagccatctgttggcagagccagatcaattccaaaggaaaatttgttgggaagctttagcatgcttagcagctcaaaggctgctaccattgaggagtctccacgaagctctggcgcagacgagtggggcttggagaccagaacgacatacactgaatgtgatgagaacagctctggatcacagtcagaagataacgaggaaaatggccagcccatggatgatgattatgaagatcaagttccagattactcaataggctattctaccggctcgaggcaccatgtaatgatgtccatgatggaccatgatagtgacgaggaggatgaagatgctgaaggtgatgagaatgtggaagaagatgcagaccttgcagttgacgatgccgatgttgagatggacgaagatgatgaaattggtgatgatggagaggatggtggcgttggaggggagatgaatgcggatgaggatccggatgctacttcatattcatccgattacagcgactaagaaagcagaaataagggaaccttatcccagattcctccctcggcatggaatgcatgtagtaccgagtaggcattcccccccgttgtgagccaaaagggagcttagatgcttaggttcgaaggagcgaggaactgttttttaggcaccgcaggttttaatagaatttctgacgcattcgacgaagtgtttggttgtaccgtggtagttgtgttactggggaattccccgagttattatacaatgtgttaagacaaaatactgtcatatcgcatctggttgccatgcgtctaactggttcacggttttaccgtta

SEQ ID NO: 34789 - DNA, 151 bp, Zea Mays
gttctatacagaataaatgaataattacatcataaggagacaacgatccagcaacttaaagttgtctgggagacgacggtctagacctctcatgaactcatcacagcatcctccatgcgcctcatcctgtggtacctctccttgacctgtg

SEQ ID NO: 34790 - DNA, 306 bp, Zea Mays
cttatatatagttaatagtggagggagtgtctgatataaaaagctacatatttttgctggttagttgttagttaggtctttacctgccctctctctacgaacgagctgatgccagttctgactttgtcaaagcatggctggcaatgtgattgaatgcctgatgttagctcgtcaccttgacagggacatccgatcctgaatttccgattggggtggcaaaggtcaagttgccaccacaagcatccagtccaatggctctgccactgcccagaagcttcatcacacctagaggtagccatgacagga

SEQ ID NO: 34791 - DNA, 1532 bp, Zea Mays
gctcgctctccttctaccagcctgctccggtcctcttggagttgggcctgcccacctcccggccggtccgccgcgcggttccagtttcgcctctcgtcgccggtcctggcgagccccgcctccttgatctccgaccagcagcttccccactgcccactccccagccccggacgtgcccttcgccggtgctgtcatggcgttcggccgacggagccccggatcctcgcggcaccctcccgcgctcaccatcgtcacggcgctactcctcgcctccctctacttcgccgccgcggcggcggctctatcgcccaccgacgcgatgcacaacaacaactgggccgtgctcgtgtgtacctcccgcttctggtttaattatcgacacatggcgaatacattgtccctatacaggactgttaagagattaggaatacctgatgagcgaatcatacttatgttggcggacgatatggcctgtaacccaaggaacagctatcctgcccaagttttcaataatgagaaccaccagctaaatctctatggtgacaatgttgaggtcgattatcgagggtatgaggtgacagttgaaaatttcttgagagttttgactggccgacatgaaagtgctgtaccaagatcgaagcgtcttcttagtgatgaaggaagtcatatacttttgtacatgactggacatggtggtgatgaatttttgaagttccaagattctgaagagcttcagagccatgacttagcagatgctgtgaagcaaatgaaggagaagcatagatttaaagagctgctgataatggtagatacctgccaagctgctactctcttttcacagcttcagtcacctggtgttttggcgattggtagtagcatgaagggtgaaaactcttattctcaccatcttgattcagatgtaggtgtttctgttgtggataggtttacctattatacacttgctttctttgagaaactgaacatgtatagcaatgcctcactgaacaggtttcttggctgcgcatgacaatgaaactccaatgtccacgggagataaccttgatgatcatttcatgttaaagggcagggctatcgcacgaagatcaaccatagaaaaggaggcacaattaacaccgcatggatggactgaagttctggctgaacagctggagggaaagaatactgatactgttgtgatgtatggtctgggagctatgggtatactgttggcactttcaacctggttatcaatgtaggcaccaaaaaagtgtggttcgtagtctcttacgctatccatctctggtccgcgtgcgagagagagaaaagagataatatgtttgggaggtcttttagattttttctcttggtttttaaattcattaacgatgattagagttctttagaaaatgctgtatgtagttctttagggattactgtgttatcgttttatttatttaacatgatcttttgggaaagacttgtgcatatggaagtttggttatcttgatagccatttgagtatcttgtctccg

SEQ ID NO: 34792 - DNA, 1250 bp, Zea Mays
tcttcctctcactatcctttctcgatcttgttccttgcaaccaccgtcggtcgcgccccacgcccgccccaccacccgcccgccgcgcccgcccccacccaccgtgggctttccccgcaccgccgacgcccccatccgccagtcggccgccgcgcccccgcccgccgtgcccctcaccgccccgccccaccgcgcccctcgtcggttggtgctcgtggccatggcggtggcgaaggtcaaatcggtcgccgtctccgttagtcacaagtgtcggaatatcttggccaccggttgggaagcgcacctcaacactgtcaaggctgacaacaagggaagcaagaatgagatttacacgtcgagggtgcactacatgatccataagggcacaccctacttgattgtccccgagaacgacatgcacaacattaacattataatcgatgagcgggggtctcttgcagtattcagtctgattcgtgaccgagttgcgagcttattgaagccatcgaaggatgagattgaagctgctcgaatggcagcgatcaacaaggaaattaagcgtgtattgactgaagtcctttcgaaggctgggcaaaaggttcgtgaataaagtgaaaggcggcgagcctgcgacagcaggaacgtgagcaaattgtaatgaagcgtaagcatgaaatgggaattggcgacaaaaattcaagatgaagcaatcaagtttggcagatcttcaagaatatattctacttgcttatatggaggtgctccaaaaggccctcagctaagagagttggagcgtggtgttgacattcttgtcgcaactcctaggagattaaatgacattttggaaatcaatagagtgagcctgcaccaagtatcatatcttgtccttgatgaagctgatcgtatgctcaacaaatatcatttgtacaagtatattagacccctccagctaccttgccgacgcatgaacgagaaaacgggttagactttgtcgaagccctcttcgctagtggaggtaccgaccatcactcgtcactgtaacccgatggtgatcggcgatcgtgagcttccatgttattgtgttctgatacttgagacttttattatgactatgtataagatattgtctcttattagtactggatgagatgtgtcttattatgactatggatgagacttttgtgatgtaattgatgagactatggatttaaatattgttatgtgattgtgtgtgagatgttttatgtgaa

SEQ ID NO: 34793 - DNA, 2569 bp, Zea Mays
acccatctctgctgctgtgatctctttcctgcctcacactcttcttttcctactagtatttgtatttcctactaggctcaatcccagtcaatcatagagcagagcagcccgtgaccccgtgggcgtgtgctgtgactgcgaggagggaggaggaggaggaaaaagagtgccgccgtttcctgggggcagccagattccattccttgcgcaggagtactacggctactccttgtactatttcctagtagcaggctgccgtggaatcagctgcctagagcaatgcgagattatcaacaccagcacagcctccctccctcgctgccttttcccactcatcccagcgatcgatattcctccttccttccttccttcctcgtgaaggcgtcgagtgagtcctgcgttcttgctctcctctgctaggcacttgtcacaggaaggccccctcgtgttcgcgtcctcttgccttcacacccgggacgggagttccttgctagggggagagcttcccttgctcgtgtcctcactcacgcactcacagactcactcattcaccgacggtcccagtggactgaggtgagacttcggtcggagccggccggacggaacatacaggatggccgccgcgccgccgcccaaggccgacgagctccagccgttcccgcccaaggagcagctgcccggcgtcgccttctgcatcaccagccccccgccatggccggaggccatcttgctagggttccagcatttcgtcgtcatgctgggcaccaccgtcatcatacccagcgcgctcgttcctcagatgggaggcggaaatgaagagaaggctcgggtggttcagaccatactgttcgttgctggcataaacaccctgttccagacgttattcgggacgcgccttccggtcgtgatgggcggctcgtacgtcttcgtcgggccgaccatctcgatcgtcttggctggacggtacagcaacgaagcagaccctcacgagaaattcctgcggacgatgagggggacgcagggcgctctcctcgttgcgtcgacgattcagatcatacttgggttcagtggcctctggcgcaacgttgtcaagttggtgccaaaactttctcttcccccatatatgcgcctgtatcttcttctgtaaaactggcttacactcacttccactcgcagattactgagtccgctggcagctgttcctctggtatcactggtcgggttcgggctctacgagcttggctttccaggggtagcgaaatgcgtcgaagttggcctcccagaactgctcctgttggttgtgttttctcagtatctgcctcaggttctggacttcggcaagtccgtcttcagccggttcagcgttctcttcaccgtcgccatcgtgtggctgtacgcctacatcctcaccatcggcggcgcttacaagaactctccgcccaagacgcaggtgcattgccgcgttgatcggtcgggccttatttcaggagcaccttgtggggtgctccgacgtttgacgccggagaagctttcgctatgatgatgacttcgttcattgctcttgtagagtcaactggcgccttcatcggtgcttcgagatatgcgagtgcaactatgattcctccatcgattatcagtcggggcgtgggatggcagggcattggtctgttgctcgattcatttttcgggacagcgaacgggacatcggtttcagtagagaatattggactgcttgcgttgacacgcattggcagccggagagtggtgcagatatctgcaggcttcatgattttcttctctgtccttggaaaatttggagctttgtttgcgtcgattccgctgcccgtatttgccggcatgtactgtctcttcttcgcatatgttggtggcgttggcctgagcctccttcagttctgcaacctaaacagctttaggaccaagttcatcatggggttcgctttcttcatgggcctatcggttcctcagtacttcaacgagtacacagccgttgcaagctatggtccggtgcacactggcgccagatggttcaatgacatgatcaacgtgccattcacgtcgaagccgttcgtcgctgggttggtagcctatatcctggacaacaccctccaggtaaaggagagcgcggtgcggaaggacaggggcaaccactggtgggagaagttcaggagcttcaagaaagacgcgaggagccaagagttctactcgctgccgttcaatctgaacaagttcttcccgtcggtctgatctcaaatggcgccgccgctgaatcaattctggaagcaacccttgttcatatgggcgttaatgaggaacataattctgctggtctggccagtggaagcttctgtgtctccattgttggtcaattttgtgtgttttcggacgagatgggagtaattgaactgtagaaattattacgattgaagtatatcgcgttctttttgtaatctacatgaatcagcgcagattaaatatttgtaggcgtagatactttgatcagtcaaacgttataggagcaaaccaatcttttttttaaaacgaaccggca

SEQ ID NO: 34794 - DNA, 2859 bp, Zea Mays
cagctcccaggcaagaatcgtagggtcatccatgtaggcgacatttgtgattgtattttttctcatcaaaacagcctaagatatgaaagaacaatgtatgcaattgtgatggtatctggtaagacatggcagaagggcgatcaaacaaaataagtgccataaaaaacagctgttgttaagaattcagatcccaacgctatgaatataccaacactcgcttctccatcttgtgaatgtggcatcagggaagaaggcgtcatcagaagtatgatccaggccagcctcctttccccaccttggcatgctgtgccttacctccataatcttaccagctattacacagtgacagtatcagcctcatcttatagtttcctgcctcgctgatcacaaaatctaatgcctataacaagggaaaaaaaggaattctaagcttagctgtcacttaattagtaaatagcgagtctctgtttgagagatacaggcaatgtagtactacaaactacaaacgctggacgataacaataataaatgatgtgaagacgcgcgcggatgcaccaagcatttcaccaaacaagcgccgcggatgctacagaatcgcgacgcgcgcgcacatagaagacctcctcgtcgtaggagaagtgcttgagctgcagcgcgcggtacccgccgtcgttgaaggcccaggtgcagcacacattgaggtccgcgcgggcggcgtccactagagcagcggtgaacgcggcgcgcgtggcggcgtccgccgcgaaatgagtcgtgcacgaagaagggccgccccgacgctcacaggtgcgggccccggcgctccaccgccgcccactcgccctcgtcggcacccagcagcatggcggaggggatgcagcaggaggccgcgaggaggacgcggcggaggagagacacccgcggcgtcgctcggcctcggagcggcggccgcggtggcgccgccaagcgaggacacgtcgggctgttccactcccacgccgattggtgggtccggtcaggcgggtcaacgcccgccccggcggcgggcatctggaggcttgctcttgtttggaggctgacacgtgggggccacaacacagcggcagaaataatcccgaccggaccaagcgcccaacaactgccgccccaagccaagggaagggaaaaggctatcgttctcgtcagtcgtcacgagagccgcgacggcgcgcatggcggcgacggcagcggcgctccggtgctgcttccccggatcctccggtgtcggtagtggcttcgtcaagcccaactcctccaggcgaggctggtgcgcagcggccgtggcggcgccgtcgcgggaggcggaaccggtttcgtcgctggggcaccgcacccgcgtcgacttccccatccttcaccaggaatttgatgatgccaaattagtttacttcgacaatggtgcaacatcgcagaaaccatgtagtgtgatgaaaacattagatgagtactaccgatcgtacaattcgaatgttcatcgtggtatccatgcactcagtgcgaaggctactcatgcatatgaggatgcaagaagaaaagttgcaaattttgtcaacgcagctgatagcagagagattgttttcactcgtaatgctactgaagctattaatctggtagcctattcatggggactatctaacttgaaagaaggagatgaaattgttcttacagttgcagagcatcatagtgctattgttccatggcaatttgtttcccagaagactggtgccaccttaaaatatgttggattgactaaagaaaatgtcccagacattgagcagttaaaagggtttctgtcgaacaagacaaagatagttgttgttcatcatgtctcaaatgttctaggttccatgcttcctatcgaggagattgtaacatggtcaaacagagttggagctaaagtccttgtagatgcttgccaaagtgttccccatatgccagttgatgttcagaaacttggcgcggactttcttgtcgcatcctctcataagatgtgtggccctacaggcgtcggatttttgcatggtaaatttgagattttgtcgtctatggagcctttcttagacaaatccacatatgctgagcctccctctagatttgaggctggaactcctgcaattggagaagctataggactgggagcagccatcgactatttatcatgcattggcatggagcagatccacgaatatgagaaagagctggggacatacctctacgaaagccttctctctgttccaaatgtccagatatatggcccggcgccttcccagactgtccaccgtgctccgttgtgctccttcaatatcgagaacgtccatcctacagatatcgcagagattcttgatctgcagcatagcgtagcgattcggtcggggcatcactgcgcgcagatcttgcataggacccttggcatcaacgcaagtgctcgtgcgagtcttcacttctacaacacaaaagacgaggtggataccttcgtcgacgcgcttaaagccaccgttgatttcctcacggatcgatactagtgcggttcagttcagttcccttttttttttgccagtttcatcgctctctcgtttgaactgttgtatgcacacacaaaaaagtatgcatatatatttggtataaagaaaacatacaaagtgtacggcttggcaaagtgagctcccttatttggagttttggactgtactcccttatttggcggttgttgttgaattaaacgtagttcaggatgcagagagtacaaacgactcgaccatggtcactgttatgcagtaaaacattgttatacgagaagatgagccggcagttaactctggg

SEQ ID NO: 34795 - DNA, 1991 bp, Zea Mays
tttacttgtctttgcttgtttttatcccccccacaaagcaagactttttgaccaaatataatggcagctgaaaaatgaggagcacattgcagcgcttgtgtttgttcaggaaagtgcacgctacatcgaccatgatgaccgggagaacctgtcgttgctgaggtttgaggcgctgtgggaggcggagttcgcccaggactctctgctggtcttctccacggggaggacgccggtgagctacaagggcttgcggagggacaagcctctggtgacgccggacgtgaccatcatgtccgtggggaccgtgatagcgtacggcgaggagatggtccgtgacgtcggctgggaggagcggctggacagcgactgggacagggccgtcgtcgtggaggagacggctaggctgccccagttgacgcgcatgcagccggagaggaaccagggtccccataaggtgagcttcttcgtcgacaagcagggtgctcaggaagtgatggactatctccccaagaagctggagagacgtggggtggatgtgaagatagtctacagcagcgggaacgccctggacgtgttgccacgaggtgcaggcaaggggcaggcgctggtgtacctgctcaagaaactggattccaacgggaagccgcccaagaacaccctcgtctgtggcgactccggaaacgacgccgagctattcggtgtgccgtctgtacatggagtcatggtctgcaacgcccaagaggagctggtccagtggtaccaagagaacgcgagggacaatcctaggatcatccaggcgaccgagagatgcgctgccgggatcatgcaggccatcgggcacttggggctagggcccaacgtctctgcgagagaccttgttgggttccctgcttattatcccaacaacaacaagaagggggcagctgccaccgctaagcccgcagatgtggtggtgaggttctacgtcctctacgagaagtggcggaggggggagctccccagttcgaattatttttcttcttcgtcagccatgcgctacttgaaaagcatcactcatccgaacggtacaatcattcacccttgtggatcggagcgttctcttcacgcgtctgttgacgctctgctgagttcttgctacggggacaagaagaacttccgggtgtgggtggacaggctggtgacatcgcccatcggcacaagcagctggttggcgaggttcgatagctgggagatggaaggtacgtacgtgtgccttgccttcatcacatcacatcacatcacatacatatatatgctacttctttcatgcatgcctgccatatatatattctcctcctcaggtggcgttcggtactgctgccgcactactattctgctcaacatcaaggtgtgtcgatctgctagcagctggttcttgctgttgcttagtcagtttcggcgtgcacctgtacgtaattgtttgtttttgttctaactactacctcgctctatctgcttcaacgacgactcagcctgagagtccagagggcctcgagctcacacacatccacaagacctgggtccaagggcactctgcagggccagggagtgcgctcgtcttctagactaaatcagtcaaacgcgaagcagcatgtcttgttcaattaatttccagagagaaagaatccatccaaatgtacgacagacagacagacagacagacagacatgcccaatgctgggtacttccatattccatatgtacaacaaaacaaaacaaaagatgtcccgatgctgggtacttctcatgaattattagctgaagctcttgtcttggatttttcatatttgcagaatgtagtttccagtgtggcccaatgccatcattcagaatgctagctgaaaagttagcgctgttatttgtacttcacaagaaaggaaaagagatacattttaggtttcaatattttgtcttaaatttgttgtctgttctttcactggattttgaagacg

SEQ ID NO: 34796 - DNA, 2245 bp, Zea Mays
tttctgcgtctacgatcatccgggcctcaacgagccccgccagggaggccgacagcagcgcacgcggctgcgctggtcaaggtgtccgcgcccgcgacagaaaggaaggggaatgtcggatccggccaggaaggccacggcagcgacggatccggacggggagacgcgatccagccaaagggacggcggatcgagccgagaaggacgcagcaacgtggatccggccgggaaggccgcggcagcgacggatccagcgaaggcgaagaagggggtgggcggcggggcgtgtccagccgggcaggggtctgcgtcggacctggcaaagggtgttgacggcactggcgacgggagaagcttgaagtgggaggcgctgctggggcgtcagcgcgagcaattaggaggtggctagcgcgatgaggagggcggcacgtgggagggtgccgacggaggacgtagcgaagaggagggtgcacgtgcaagggacacagcgaaggggaggacagggaaccgagcataggggctgttcgcgccctgccccgcggctggagtagagacttggctggcgacctgggagaggtagtagtagcgggaagccagctggagaccgcggccgccatgggggctggaggcagagcgccggtcgccggggaggctcaggctcgtcgccgccgcgcccttcttgcgcgcgtcgggctgcgggtgctgtgtaggcgccttgccagtcagcgcctccaggaccaacacgccgaagctgtacggcgaccatgcggaagctgtcgtgcagccgcttcacggcgaccatgcggccgtcgctcagcaccgcgcggtacacggtgcccaggctgcccctgccgaccatctccgcggacgcgcgcaacagctcctccagctggaaccgggtcccccgccgcccctgcaggtcgcgccgccatgcgccagcggggaggggaggggcgggcgcgccggcggcagacgcgtccggcgggcgcggatctgggccgcgccagatgggggcgcaggggaggcggcgactgggagaaggaggccgccggctgggaaatccgcgcccgcgccctgggcgaagccggggaagggggacctggccgcgccgccgtgcgccggcgaggaggggcggtgagcagaggagggtgctcgaacaggggtggccctcagcaaggcggcggagctccatggggacatcagcaggggtgcttggctgggggagctccggcgctggacggggaagagaggtggggctggcggctgctgggtggaagggccgccccgggagggatggatgagcctcccggggcggcggcgcggaagcaggtggttgtggggttttggggcagccggcggctgctagaaaccctaaccctaacctagtcctctgataccatgtagaatagtgaagtgttcgattgtattgcacagagaaggactacaatatatagacacaggaaaccctaaccctaatgggccggcagcccaacagtggtgccggcccacacacactcacacacacatagtctaacagtaagcatatgtcttaatcgaatgcactgcataactatcgggctgctaacagtctattaaaatttttaaaaaatactttttttcaaagcaattactaacaaagaaatacatgattacctgcggggaagaataacacagtagcctctggcgatgatacgtgctctatgtataggtgtgtatatatacacgatgacatttgtatcgttggttggatgttgtcggtgaaaacaatgcaaatattttttccaccattaattaggaaaacacgatcctattgcccttttgctgccaataactgtagttctcgaccataacaatgcaggctttgacttagtaaacatcatcatatctccttgttcacagggggacagctgaatgcccatactgtacacagcccgtgactcaaacaatatacgtgtaatcgaaatgaaacataaaaaagccctagaaatagtgctacccactatgattcatgccattgttgtctagctaaaatttttgaccccacatgcatcgtttcctaacctgactcaaatctaacacatgccagactttcgtggtttctcatgttttgttatttttgttttttcatatatttaaatgcctcacatggccatgcactggaatcagattcttagctatgggctggcatggtgcatctgtcaacaagatctccagttttccacgctgttgaatcgacaggtacagc

SEQ ID NO: 34797 - DNA, 3484 bp, Zea Mays
gagacagagagagataggctcgatttgcatctcgctttcgcattgcacacaccaccatacaccgcactgctgagtgcagattgctgacctctactacactctactctactctactcctcctagtccttgttctgtacaaacctgttttcggcgtctggctgtaccgctagccttaacccctagagccagacggaggaggcctgcggaagcgggagcggaagaggaggaggagagtgtgttcagaatttcagaagcaaagtgctgtcttgccatacccctacagtgctactagcctgtgctgctgcagagaagccaatcgaggcggggcactcgttcctccccgttacaaggagaggaggaagatttaggggcggaggaggtcacagactcacaggaaggaaagatggactcttgatccccgtcgcggtcgcggctggtttgttgtgggcaagccgaaccattttgctgctataatactcgagcagtcgattcgcggctcccggggccagaatcttgctctgagaggcggaatttgtgcgggatttgagctttctttcctccaacgaggtgccctgaggaagggagggagcgccagttctcccactgctgtagtgcgtggtttcagggaggtatgagacaatgagggaagagagcaacaagaagagcaagctctcctggtcgaaatccctcgtgaggaagtggttcaacatcaagactaagccacatgatttccgtgcggattgcgccgccgcccaagggagggtcgggcatgatgatggcgaatggaggaccagctgctcagagcgggaggcaggcgccgccaagaaaagcagaactgaccgaccgtcgaagcggagtagtatggatcgaatcagaggaggaaaaaacgacttcgatgcggcatgcctcacagaagttcagaactacagaatctttgcctccacatggaatgtaggtggtaaatccccaccgaggggattgaatcttgatgactggctccattcttcaccttcagctgatatctatgtgttaggatttcaagaaattgttcctttgaatgctggaaatgttcttggcacagaagataatctcccagcgaaaaaatgggtatcccttgtcaggaggacactgaataagaatcctggttcatgctgttatggtggctatcgcacgccatctcctgtccctgatccagttgtagaacaaaatgctgattttgagggatcgtcgagaaggctggacagtttatcctatttgcatcgtcggtcgttcaaccttagccggagtttaagagttgaaggggatcatatgctaccacaccaaaggttggatcgtaggttcagtgtctgtgacccagttagcttgggaggcaggccaagtgattttgataggaacttcccattcatgggatcaccggatgatcattgtatcgaggaggatacaagcaatgaagcatattttccacccttcccatatggctatggtgcctccgcgcctatggaagaaaatgatcatcagacaaatacatctaggtattgtttggttgccagcaagcaaatggtcggtatatttctcaccgtttgggtgcgcagcgaaataagaaatgatgtgagaaacctgaaagtttcttgcgtgggtagaggactaatgggttatcttggaaataagggttctatatccataagcatgtctttgcaccacacaaccttttgttttgtctgctgtcatctgacctctggtgaaaaggagggagatgaactacggagaaactctgacgttatggaaattctaagaaagactagatttccacaggtccgtggtgctgctgatgtcaagtcaccagaaacgattcttgagcatgaccgtatcatttggcttggggatttgaattatcggattgccctatcgtactgctcagctaaagctcttgtcgaaatgcataactggaagcaacttttagagaaagatcagcttcggatagaacgaagatgcgggcgtgttttccatggttggaaagaaggcaggatttattttcctccgacatataagtactcattcaactcggatcgttattctggtgtgcggcccaaagaaaagcggagaacacccgcttggtgcgatcgcattctgtggtacggtaatggcctctcgcagctgtcctacgttcgcggagagtctcgcttctctgaccacagaccagtctacagtattttcatggctgaggttgagagtgcccgccacagaagaaggaacatgggctattccagctctagaatcgaggtggaagagcttttgccgtatccatacagctccggagaaatgaagttctactggtttggctgacatagggcatatggctggagcttgttttctacttcaacttaggttgccgggtccttgatgaacaaacaataccttgggccatagactgcatggtcactagcttgatcagatgtaagcctggttatttttctcatctggctttcacagcttccagtcagatggttgagaagcgcaatgcacaaaactgacataaaaggatagccgggcagttttgcaactaaccgtttgccttttggacagccgtgttgaaacaaggatcggcccgcatctgtacatgtcattaaccacacagctcagaaaaaaaaaacccttctcgtccccaatttggttctctttttttaggagagttagtaaacatacatattttttctttctttgtttctccctttgcatttgggaaatctttttagaatgagattttggagtgtatcagcatgaggtgtaaaatcattgtgaatcggtaaaaggctggaatgatgcttgaaccgaactgatccgtgatcatgatctccattgctgatgagggaacagtggtgatggattgatgtgacttgggaggtttgcaaaggtgtaatcatgtgtataataacccttttatttgtttttttcctctgtccctgtggtgtagtgcctgagaagcgaaatgatgcctgcgtttgctgtgctcattgctgttaaaccttttttttctaattgtaacaggtcagagccttgcttcctggctggaaagcatggcattattcttgttatcagcttgcttgcttgtcctctacatcagacaagctgtctgcgtattcatgtggccaagtgtcggttagtctcttgtgatctcccttgctggtggattcctgggagacaattcggtgacttcttgttgtgatgccaaggtcattcactcctcctcacctgccatctagaggcgacctgcactgatgtgattgtgaatttaagatcggtgcctttgacttctgaccggatgttgtgcttgctgatgtcccgtttactggaatcccaggagagtagcttgataagctgtcgaaattaaaggcagtaaaaggggatgagacggggatctcatctcatagatgcttgctgctgctgcgcaagaagcacggacagtgaaagataaaggcggtaaaag

SEQ ID NO: 34798 - DNA, 1710 bp, Zea Mays
gcggacggttgtgggctgtggctttatttactccttaagaatcgttcatctctgctgaccccccctccctcgtcgtcctccacgccgctctgcaacgctacggatgcctcacaattaaaccctactctttctctctctttatttccggctgcctctctacgcacgaaggaagaaaaaataagcggaggggagggagaagaggacgagaacaaaagacaaattctcagcggtgaatggaggtttcgcccgagtgcgcggacggcgggagggtcaagacggaggtggacctcttccttgtcgacgaactcctcgacctgccgtacgacgaggaggaggatgcgcgggaggcggtggtgggcgatggggaagcagcaggggacggtggtaagcaggcttcggtgctgcaccgggcttgtggcgacggcggggaggagggtgccgccggcaacgcgtcgaacgactcgtcagcggtgactgcgctggacagctgcagcaataattccctctccgtttccgggctcgccgacggggacttctccggcgggctgtgcgagccgtacgaccagctcgttgagctggaatggctgtccaactatatgggcgaggacaacctccccgcggaggacttgaagaagctgcggcttatcaacggcattccgccggccgccaccgccacggctcccgcggccgccgcgcaggcacagccgccagccgacggcgcgctgccaccggaggcgccagtgccaggcaaggcgcgcagcaagcggccgcgcgtcgcgccatgcagctgggccacccgcctgctggtgctcccgccgaccccggcgtcgccgccgtccgcggccatctcgccgtccgagtccggcaccgcggcgccggtggcgttcccggccaagaagccgtcgaagcccgcgaagaagaaggaggcgccgacgacgccggtgcccgacaacagcgccggcgcgggggagtcgaggcggtgcctgcactgcgagaccgacaagacgccccagtggaggacggggccgctgggccccaagactctgtgcaacgcgtgcggcgtgcggtacaagtcgggacgcctggtgccggagtaccgcccggcggcgagcccgacgttcgtggtgtccaagcactccaactcccaccgcaaggtgctggagctgcgccgccagaaggaggcgcacctccacccgcacccccaccagtaccagtaccagccgcagccgcagccgcagccgcaggcgtttgtccacggcggcggcggggccttggtgcacgcgccgacgccgctgttgttcgacgggccggcggcgccgctcatcggcgacgaccacttcttgattcacagccacatagtagggccggacttccggcagctcatctagggacgtcgtgtcgtcgtctggtctttttttttgctcgctctagagtttgatacatgaatagcccagcaataatcaagcaaaaccaaaaaaccgatcttttttaggtgtttttcctctccatttgtttctgtctctttacattttcatcggacagtcttttctcgaatctttatttttgtttctctctcgattatttctcatctttgttttccccttagactcttctcggattttgagtttctgacagcttagacaataactctagggagttttttttttgagagtaagagactaatcaaacaacaattttatgagctgtagt

SEQ ID NO: 34799 - DNA, 814 bp, Zea Mays
aaccaacccctatccgccccccgtcttttcccttttctctaccctctatctacccaccgttcccgtctctccgccgcttccttggaagacgaagaaaccctcctccaccaccaacccgatccagctacatccgttgagggccaggagcagctagccgtcttcgttcgatccgttcgcaccccccaacgcggttcgatttgcaggaaggagcgtgatggccaagacgagctcgttcaagctggagcaccccctcgagaagaggcaatctgaggctaaccgtatcagagagaagtaccctgacagaattccagtgattgttgagaaggctgagaggagtgatattcctgacatcgacaagaaaaagtacctcgtccctgcagatcttacagtcgggcaattcgtgtatgttgttaggaagagaatcaagctcagtgctgagaaggctatcttcatatttgtgaaaaacacccttccaccaacagctgctctgatgtcttcaatctatgaagagaacaaggacgaggatgggttcctctacatgacttacagtggtgagaacaccttcggactgctctagatggcccgcaatggggtcgccttgcccttgcccatgcctcctgtaaataagacctgccaagcaactgtgtatattctggtttcgtcgtcgcaagtggttgcgctctactgctaaagcctacctatcagttgtggagttgtcgtcgatgttatggacacacttaatcaagtttattaattgactggacctgaatcttgggtcagtaatgtgacatctcctatgtcgtttacggttact

SEQ ID NO: 34800 - DNA, 5541 bp, Zea Mays
caaattaatgggttttcttttaaaaaaacatctatcaagtcataagatactagaattgtgatacctggaatattttacttctccgctgtcagggagactgcagttggttgattccactggatgtatagatgtttttatacctgatctcccgcctaatgagagcttgcatgacatatatgagattgtcaattacaaactagctcttgaaggcccgatggcttacatagatcattatgatgttgctgatgccctatcctgtaaagctgtgtttcagaagcttccttacaaaaaaagattgcatcacctcaatatttatgttatagttcaatggaggcaattaattcatattggcccttcctcgtgtattccttcttatattaattataggatcaggttgtttcacttgctgaagttgtcccacatatttcctgtgaatagcaacattcaatgttcaaacatgccagggtctagcctgtatgctgaagctgtaatacttccatatgttttgaagtttattgggcaaggcgaatttcttgagcatgctgagggctttataatgtcacactctactttactaggtaattctgaagcctctgtggcaaaatcatgcaatattccatgttcgctaagctttggcagcaccaacctttgtggtactctggtgtctacctatgcctctggatcagaaggtactgttctaaatgaacctattgtactaagaaaagaatactcaaggatcttgttggagttcgaggcaggaatttttaagaaatatcagttaccgcgaatcaatggttcctatattctccaatgtcccagtcgaagttttacttgcaccatgggaaactgtggatgtttgcaaggtggtaaagtctcgattgatgctcaagatagactttggagcttcgccattaccattggtggtaatataaacatcaaggggtcaattggggatcaatctattggagttacttcaatgaagatggatgagatattttccagaaatatggtcgatgatgagctaagattagttcagccttggaatgacttctaccgtaattcttattttcatttggatttttcttatgaggcaataagcaaaaagatggaagattataacaccgtatgtcatgtattgaatgggctgtgtgtttcctccagtgaagttttaagtgtgtcatcatgtgttgatattatgatgcctaaagatgcttctgtgtccgctgacttcaaaactaaagaagtggttcatggagatttattaatatcagtacagggaaaagtagaaaatatacattcacttgtctgtaagtgggaaagatgcattcctggtaatgagaagtacagtctatgtatccatattgctgataataatcatgcggtatatatccgtggatactcaaacaaacattttactgttggcattggaccaggggcaacagtgacattccaccgcatccgtttcaaacagtttgctccttcccttctggttttctttaattgtttcttccattattttgttaggatcgttgcagcataaaacccctatttacccatctgcagcattttagcttttaccttgatctgactagaaacctgatgtgatgtctacccttgcttgctttgtaagaaatggtagtttggtggtacactgaatagaacatgttgagcgaactgactagtgcgccctgtttacatgttatactctacatggataaacatgattttaatgagtttacttttgtcaatccttacaaattacaataactcgctgtgctaattgcttgggatcattctttttacataatatcaggttcaatgtataaatctgaacttcagggtacaatttacttctaaatataccattgcattctctttttttgaccgaaagggccatgccccccatttcattaagaaatgaaccacattcatactgtcttacaaggaccaggcaaaagcaagatttaatcctaaaccgccagttcaaccaaaatagcaaaaggaaccaaatgctaagactggtctagagtttaacattatcaacgctgaaacatacaagcagagataggccatctagattattacaaatttacaagctgttaggagacgaagctccagatcagctaagatgcagttaagacccagcaaccaaatttttccagcagcgctctcagaaatgctccagcagatgatgacgaatgtcgcgccagtcaacaacatcttccccgcgccactcatccaagaattctcttggtattcggcgcccagcctttagctcgatcaaacacctcccttgccgtccttctgactagacggcttcctccctccagggtctcttttcccattttttttctgcaaaatcgaccattagtccaaccaatgacaacataagaaaacaatgtcaaaactcaaaaggctcactaatcaacttattattgaaacaagcatcatttctgatttcccaaatggaccagagaaccgcccctgctcccacaatcatcaaatttctgtgcttcttactaaagccgtccaaccaacgagtacaggtctgtgtggctccttggaacagacttcaggttcagggcaacctgtacaattctccagatgaatttagccacagagcatttgaagaacaagtgatcaggttattcaaaaaccccacagaaacaacacacacaacttcctttccagtttttttttttttcagattgctttttgttagaattttgttgttaacgaccaaccagaggaaaattttgatcttttgaggtatgttaactttccacaagaaattgaaagggacttttgttgcaatgcttctaatctgtttgtaaagagattttacagagaagcctgctttgcctaaagtacacagagccgagtcctcttctctcagtctttaggacccacataacagtttaagggattcaaaatgagtcccagatttcaccaactaatcttctcctaaattttaaagcagaaaggttggatctaagaactctgttcactgtaatgtttttgtcaaaggttaagctaaatagaattgagttgccaggggggaatctcccagccaggtatcattccaaaagctagtttggttaccattgcctatcttttttctacagaacttgtaaacagtatctttaactttcagcagacctttccaaaaatacaaatcatcttgctttttctctaccataataagaggttttcccttaactgtatttcgacctaacgatattctgccaaatcccatctgaggtttctaacttccaaatccacttggcaaggaggccaatattcattttttccaagtcaatcacacccaaacccccttgatcttcagggagacacaccgtgtcccaatccgttaagtggtattttttggtcaattgacccccctgccacaataatcttttttctgtaaatatcaagttttttaatcagacttaggggcagaatacagggagagcatgtataaaggaacgttcgaaaggctgctgttcagcagagtgatcctaccccctaaatggcgcctctgagggggacaggtgctggttttcattctttatttttaactcattaattttttgagttaggtattttttggattttttgtactccttcaaaatttaggttccaccctttcagctttttttaaagtcttttcactttccccttccatatctccaaactgttctcgtttttgactggggatttccagttactctccacaatctgtttgaactcttgtcttttaatccaacaaagctcatacctaaaatcctttttcggaacactcatcccacctgtactcagacagaggggaacgttatccaaaaatgatctgtttaagactaaccatcacattaatataagttagatcccaatcgggactaaccaaaattctgtccaatttttcaaaggtggggggctctctgttgttggaccacatgtagagtctacccatgaggtccaattctataagattatactgagcaatgatatcattgaaaaggaaactccatctattatttcctcccggtttgtttttgtcttttttcccatcttagaacattgaagtctcccccaaccaacataggatatctgttattagaacagaaaaccggcagttctctaagaaagttctctttcctattatcctgagccgcaccataaacgttgatgaagttccatttaatctgcttgtttcttatattctctgttatctggctgcaggcatggattattcttaacctctgagacatacattgaggttagctccatcagccatgctaacttgactgaacaaagtgttatttcatcaccaaagtctaatttgtcaaaagatggttcattttgcacagcttcaccgtgcttgttctttcatcagaagtattttacagacagtagacccatgcaatttcactgcagggtagcaactatccttgtgctggtattgaacaaatcgactaatcagggtgaaactccaaatgtaaaagttcggctagctggttttattctggatgatggatcatccctgtgctgtggctgggctgatgatgctagggcagaattattgcttaggctgcaggaaattgtgcatctggatgcttctgttaatttaaagctttcaaaaggaggagagaatagcacaaaattaaaatatactattggatgctgtcttgaaaaaatgttgaagcagcacacaagtgttaccgtaaagaactgtggaattcctcctgatttctattgccgagatttggatgcatcttctgtttcggacaaagccttaagtcgcttggaagacaaacttctgaaatttattgtccttaatgcttgttgcaagggatctctgaatgttatggcatcagctctgagcccagatgatataaatgggttcaatgtggagctccctgttccagtgcagaacatgcggatgctttggatagaagaagttttcccagtagatcccttggaagaagctcgcagactacatgatattttggaaaacagctagtgttcacacattctggatagttagtatgcagcataaaaaaaagaggatggattgtccagaactccagatcgtactgccacttcgctgagattttcgcaaaggaaaacttgtttcacactcagtatccagaaaaggatggtttgtccagatagggccgccaccttgaagttgatcccagattggtcctccacattttccaaagagatgtactcacggcgaacgagcgatatatccttttgatgctgatactgatctctgacgtatgaagaagggacataaatttggctgttcgatctcttttgctgaacgagcgggccttttgtatccaatgtcccaagctccccaaagcaacgcaatgtgtatattctacttgcattattatgtcccaacgttaattttggcttatatcatgcttcctctttcgtatcctactactgttactataatctgatggtgtcaagatcaactgtgtagtttggacacacacaccaaagtgactggactatcttcacgtatcaacg

SEQ ID NO: 34801 - DNA, 3124 bp, Zea Mays
atgcacccacgccccgtctctttgaagccgcccgcgtctccacccgagaccccgacccaccccgccctcccccgccgtcgcgctcgcgctcccccgcgacagccgccatgcgccctatctccgccatgcctgcgcctcctcccccgcccgcccgagaaccaccaagtttcccttccttacacagcgaggtccaccatcaacgcccccttccctggcaagccacagccgtccacgttcctggccaccagcgacctcccttctctagcccttagcagcgagcaacacctcctccccatggctgcccccagaccccagtcccgtccgcgcatccgctcccccgtcagcgacgcacctattctcctcgacgtcgcccatggcgtggacggcgacctccctcaccctgcactctggtatgtcaccgtattgcccgcctcctttccccgcaccggcgcagccccctgttgcggcggccccttccccaaacagcacggcaccacgtgctccccctgccgcgcccgcactctccttccccaaacagcacggccccacgacgctcacactctccttccctggcgatatcccctcatctgcgccttgtccctcggagatccccttccatcttcggcaccgagaggaaaatggatggcaatcccatccatcggcgccaaaccctacacatcctccatagtaggcacccgcccctccttacgcggcaccatcggtggggatatcccccaatctgctggaaggagtccgcgccaaatcagagcccgaaatccgtgccaaatccacgctggatgaggtggtggggagaccccccaatctgcgtcccttctacatgcctacacatcctccatagaaggcgccctcctactaaccactaaaaaaccccttccacacgctgacaactccatatatattagtccaaagggagagcacgattaaggccacgcctaccagcttcaccctcctcgcatttgtaagtccaatttttagatttatgatttcagatgttgagttgattttgcaaactggtaagtgttttgtttcatacggcaactctgcacatggacagaatcacagctctgttagcgttgttttatcaaggtacgtccaattccttctatttagttgactgtgattcaatatgcttgttgttcggttttacttgcgacatgctgttggggcatgtgtttgggatggatgacgtttggactagatagtttcagtcagtagccatctaaacaagcccttacagtattcgctatttcatattgaattttcctcatattgtagagaaaatcgcagctaatctgttcactgtggatgagttgccccatggtttgttcttaatcagaagaatggacgtgtgcaccacagtttagtgctaaatcatatggatataggagagatgtgctctctcctgtcctaaaacagttcatgttctcgtttttctattctgacagttcataagcgccggtcttttagatgcccactgacctggacatgttggtagaaatactgggcaggtgggatcaactccgatatttggtcaatttctcaaccactttctgttaatacgcaatttttattgaaaaacataatgacgtgcaatgcaaccaccctattcaatattcgtatggttagcaaaccatacgatcaatagaagatctttttggtagcactaaactacctacatacttgcatgcatgcgtcctaatccttgagtttgagtcaaaattaaatcaaaaattgtcatgatcaatcaaacaggaaagaattgacattctatagtttgcgtaggaaagtgtctctgtgtgttttctttttgaaggatcaaggattgaaggattttcctgcttgacggattagcacttcagtaccagtagttaagttattaggagcagtagcaaaaaggggctatatttgtttagggcttgttcgttttcatctcaatccatgtggatcagaggggtttgagtagctttaaatctacaataggtcaaaagctctactaaaatttttcaatctcatcaaatccatatgtcatatgaccgaacaaggccttagcgggtagggcacatcatcttaacgccaaactgctgcctcgaaaacgagtgtatagggcacaacatttgaaccacatatatgatatcaatcttatcaatctattgtgttaattatgaatcctgcatcaatcaaccagggcccggggcacattttcccaagccattgacaaatgttggtagatgcaggattcatagttacagaaactatgtggttcaaattttgccagtatttgactcatcacatttttcttctctatttcagttcttctagcagttgaagtagtgttttcttggcagatgttcgcctttaggacattgctgcgaggggaatcggatatgccacaggctgcatgttgttggagtttctatgtatccccatatcaaatttgtttttccctaatcagggaactcaattgtgcgagtaatagcaggagctcttccgaaaggccttcacatgttaatcctatcgaagaataacatatcaattattgaacgcctcagagaattgacacgattgcgcttgttggatatcaactataataggatatctagaattggccatggtgcagaggatgctaggaaaatactcaataattatggtacatgtccaattctaagtatgaaagtcggggccattactcagatggtaaacaaacttgggccatgtaaatggtcgaccttgcctaaactatacctggacgtattggaaagcaatgctgggaaagctatgccatgaaagatatttgtagcagtgttacatgatggcatcaagtgctgggaaaatatttattaatttatggttttgtttctatggaatataggagtcatgattttgtgcatttgatcagagactacattaactagaggatactttctttttttcaaaattacaaaaacaatactaagtgtacctattattgtctactcgtctcatgatgattactatgtagataaattctctaagctatgaacagtgaccaatgaaatatattcatttgcatacagttctcaaactaatgtattcacgtcattatatattgtgccagctttgtcaa

SEQ ID NO: 34802 - DNA, 1330 bp, Zea Mays
caaaattgtgacatttacacacatgctgtcactgttatttcttcgtggaagccattgatgtatgtgaagtaccacgacctccacggaggcgaacaagaatcaagaaagtcaaattacgctgatttggcaaacaagtactatgatcttgtcactggcttctacgaatatggatggggcgactcattccattttgctggcggtcccatactcccatgcttgtatttcagatatccgggtgaaacttcccgtgaagccattaagcggcaccagcattttatggcactacaattggggctcaagaagggtatgaaggttctggacgtgggatgtggaattgggggacctttaatagaaattgccagattcagctcaacttcaataactggattgaccaacaatgactaccatgtctcaaggggcaaggagcacatcttttcagcaggtttgagtgagcaatgctgctccttgaagggggacttcatgaatatgccaatagctgataacacctttgatgcggcctatgcaatacaggctacatgttacgcaccagaggcacaaggtgtctatagtgaggtctaccgtgtgctgaaacctgggcagtattttgcactggatgaatggtgcctgactgaccgatttgatcccaacaacgctaagcatttgaccgccaaggctgagattgagcttggcgatggcctgcctgacatccgtaccactcgccagtgtgtccaagctatgaaagatgcaggattcgaggtcatttttgcaaaggatcttgctcaagattttccttgcccatggtaccagacgatggatcctaactacttttcatgggctaacttccaatgcacacgcccaggacggataatcacccgtgcaattgtcaatacactagagttcctccgtattgccccagcaggcagcgtgggagcctacaacgtcctaacgagtgcctctgatggccttctaaaaggtggtcgggaaggtatcttcacagcgtccttcttcgtcctgggccgcaagcctctcaaggaaagtgaaatagtgaacggcggcaacctttgagctgcaacatgagtatggggtcgtacttataagagctatgaatcatggccaacgtgttacgtgctgaagtgtgtttaccggtttgtcttatggctcttgcgcgtgtggtgggtcatgttcacgcagtagcatactagcatgtatctgcttgttgtgtgttgtactatgaactatctgaataaaaatgctgtttacgcgttgtattaatcgcaccatttcttggcaacacggctttgatcggaccaatgtattgtctggatctatc

SEQ ID NO: 34803 - DNA, 1708 bp, Zea Mays
cattttcgtgcagccgcgcgctccctgccctccccgcccacccggccaggcccaattttgaaaccccaaatccccaacaccttcagcccctcgtgcgcccgtggaccgccagatccccacggccgccgaggcactctcctccttgcaccgagtactctccttgcaccccctctcatgcccgcatcttcagaagccgcgggcgctctcggcggcgggggagacgtcgagcaggactacgagattcgcaacgacgagggctttgtctacaaggttcccagagggctctaccacgaggccgcaccctccaccacccagtcggcggcgggcaccgaccccaaggccgccggcctgcgccgccgctgccgcgcgctcctccgcctccgcgccaagcgcctccgcgacctctcccgctgggaggccctcgcctccgaactcttcgccccgctttccgctccccagccaccggctccaccatcccaagcccctcccgcctcatctcattcagtcgctgcctcctcctcctcctccccgacctccgttcttgacgagctcctcgcacaggttgacattcaggcggagctgatgaagaaggtgcaccagtggtgcgacgaggccaacgccatttgcgacgcaggagagtctgccatcgttgcttctatggttgcgctgccgttgtggggtggcaacccagcggatctggtaacggcgctgtgcagccctgatgaaaaggcccatggaccataaaagaccaaaacacctctcctaatgattcctatccatgctcggcctttaccacaagccgagacttttgacaaggatcatgattggaaaattcatgcaaagaaacttcgtggtgaacgtcggccttgtgtttgctcactatgcaatagtgaccactacacccccctgtcaaattgtaacttggatggacagagtgggcgccaagtagcttctggactgtcttcagcagctgctgaaatgataaaaaatagtgccaagaaacaaacaatgggtcatgaccttcctcacaatctcactgagagcaggatgatgaaaagagtaactaacctttcaggccccaatattgttgcatcacaagcctctaatgaacgaaagaggaagaaggcgtcagggagagcatctactgcctcacgtactccaggatcaacgacgagaaggaaggccgcgtccactccaacaagagatccagcggcattttctagccctgggccactaaccaggagaagggcagcagctctaaatgtatcaccactcggggaggctcataatagtcaacaggtcttgtaatctggattggggagagtaggaaaggtgagaatatgtgtttgtacacaagtgttgtttgctgctgctgtacctagaaaactaggggattttttttgctagtgataagccatcaactgtcatcttgtgtactaccttcgttctcgaatatttgtcgtcagctagttcattttttaactaaacggcgacaaataaaaaagaacggagggagtaattgtgaagttccagccgcagatggtatttatcaagtactgctgtattggtggtgactagtgagtcgttcatataagtgcatgtctgctccttggaaacactgatcatgtatgtaatggctgttagttctctggatttcacaggacatgccaacagtgtattctatctatgtttcaaatggaggctgttg

SEQ ID NO: 34804 - DNA, 3579 bp, Zea Mays
ggaaagaagaaaaacaaagcggaggagtctaaacaaagcgccagacagcctcctctcctccggccggaaaaaagcaacctcgcagatccgcggccccccctcctccgctcacaggttcaccgcatcgacgccactaccgtttccactgccgcctcgaccccgctccaccaattcttggtcaagccgctccagctaagagacggagagccctgcggaaaggggagacgaggggagggtgcaaaccctagccgtagaccgcgggctcctcctcctcgccggcggcggcggggatggagatggtggtggcggcgccggcgctccccgccgaagtggagagggctctcatccgggacataaccgtcgcggctgatgcccacgccaaggagggagacactttcttcctcatcaccaccaggtggtggcaaagttggattgattacctcattcaagatttgactggtgcaacaatctccaacatggagattgagatacatgataacttggttgagggtcgggattacatactgcttcctcagcaagtttgggaaaagttgcatggttggtatggtggaggaccaacattaccaagaaaggcaatcaatactggcttttctcaaactgatttggcgatagaagtttatcctctacgactgcagttaattctaatgtcaagaggagagcgaacctttataaggataagcaagaaggtatgcatttgggactattatggtcgaacaaagcattcattgatggatagcttggacaaaacccttgatgatgccaacattcagatggatcaaaacattctagttgaggtaaccactgatgcaagtggtagtctggatggtttggttaagcgaaacaatttttttgagagtgatgctccgaaatcaggattgccagatgagaattttgcagccaacaactatgcttccagaagctatagctctagtctgacaccaagcatctacctgcgatcacccaatggtgatctggataatgtgcatggttctagtggcatgatcacgaggggatcgcccttaggtcttacagggctacttaatcttggaaatacatgctatatgaacagtgccatacagtgtcttgtgcacacaccacagtttactaaatacttctgtgaagattatcatcgcgaaataaatcggcaaaatccactgggtaatgtgggtgaacttgcattagcttttggtgagctattgagaaaactctgggctcctggaggacgtgcccctgtttcacctagaccattcaaaatgaagctttctcggtttgcatctcagttcagtggatacaaccagcatgattcacaggagctgttggcgttcctattggatggactccatgaagatttgaatcgtgtgaagcatagaccttacataaattcaggggatgctgatggaagatcagatgaagaagttgcagatgaatattgggcaaatcatattgccagaaataattcaatcattgttgatgtatgccaggggcagtacaagtccactttggtttgcccagtctgtgggaaggtttcagtgacttttgacccgttcatgtatctttccttgcccttacaatttgcctcaacccggagcgtgactgccgtggtgttttcttgtgatggtagtgttccaccaacaccattcactgtgaatgtaccaaaacaaggtaggtgcagagatctattacaagcccttggtgctgcatgctcacttaaaaatggggagaaacttctaattgctgagatacggaatcataagatctaccgttttattgatgatccagtgcttcagctgtctacaataagtgatgatgatcatctggcagtttataagctcccaaagttggaaaagagggtgaattacattcagtttgtgcatcgtcatgaagatctggaccatggaaacaataacagcttgacatcttggaaaccgtacggtgttcctcttcttgcacaaatttctcgcaatgaaattgtcacgggttttgatatccatgagttggtccataaaatgcttgtgcccgtgctaaggaatccggactctctgcatttggctgttcaaagttctgtttccacaagaactcatagttatcataccgacagcagcaaatgtcagcttctgttggttgatgatagcaacacagtcattgaaaaatcaaatgatgctatcaggatcccacaatcttcacttgcaactgtattttttatcaactggcccaaggcagatctgaaaaagatagacactcatcatttagagtaccttccagaggtgtttatgtatgctccgcctgcgaagagaacccgtggtgaagctctgtcactctatgcatgcttggatgctttcttgagagaagaacctcttgtacctgaagacatgtggtactgtccaaggtgcaaggagcaaagacaagctagcaaaaagttggatttgtggagacttcctgaagtactagtcatacatctaaagagattttcatttagtaggtcaacaaaacaaaaactagaaacttttgttaattttccaatacatgacttggatttgacaaattacattgccaataagaagacttcagagcgccagatctatgagctgtatgctgtgagcaatcattatggcaacatggcaagtggacattatactgcacacattaagcttgtggatgagaatcggtggtacaacttcgatgatagccatgttgcttccattgatgaagatgaggtgaagactgctgcagcttatgtgctattctatagaagggtcagagaacaagacatagcaaggggaactagtaatggatctcagttatatgcaaaaagaagtcacggatatagccataggtaggctgatgattactgtggttcggtgcaagggggattctggaaatgacacccgcacgcctttagtcattgccaggagtatatggcttgctggaaaaaatgctcatcacgtgcagtcaatgcaccgttgtccagttgtcacagaagatatttcgtgcagtgctggtacaagatgggaattttgtatgaggtgagttgaaggagtaattgactctttatgataactgggtagcttcaacaggaacgccggggcttggtggcattttgttcgtctgttttcttctagaagagaaacaaggggaggcaagaaaacatttaggaaacaccttttcgttaatttgattttttatttccatttttagatttagctagtctgtacactgttgttggaaatgggtccgctgttgttggtcgatgcttgtggtggccaataatactacacccaactataccaggctctgcaatggcgaatcatggtgcacattatggtgctctgttgcgggaagaattgtagctgatgttgtacttatatactggcaaaaaggccccagaaatgtaaaaatgtatcgatatgctgacatcttaaaccctattttggattcgtgctctttcctatggatgaaggtgtgcgccatttaggggttgtttgtttgaagaatcaatccattctaggtaggtgattatcacgagaccatttcataaatttggtgaaatgaattcatttt

SEQ ID NO: 34805 - DNA, 2626 bp, Zea Mays
gtgcgcctctgcaatcctctgtctctctttcctctgacttcgctgcctcctcgtccgtctcgcccggtcctctcactcgaagactctcgcttcgcttccaagttcaccccaatggcgacgcaaccgcttacatcaccgcgcgcttgagcgagagaccgatagcccccaccaaccgcgcgccttcgcggagcatggcggcgccggggctggacaaggtcatggcgttcctcaccgaccacggcttcgccggcgcggcctccgcgcttcgtgacgacgtccttgaacgcaccgccgccggggacgaaagccacgacgccgcattagatccccacctcccgccgctccggatgcccgcctccgccggcggtgccggtgccggtgccggtgccggcgctggcgctggcacgccgacgcccgcgagccccggttccagctccggttcggcgtcctcatcagctttcgtaagcttgcgctccacaccctcagggctgttgaatccgtatggactatggtcgccgcggcattcgcagtcggacgcgtcttcatcggagatggagtttggtacagcgcgccagtacgacaccaccgacctcttcttccaagaggattggctctacgacgatcacctcttccctagcaagctggacgatgaggatgacgaaggcaaagaggaggacaaatttgtactggatgctcacgatggttcggagcaggttgaaataggcaagcttggtgcaggccataaccaccgtcacgaacacatcggtggtgaccgatgcgagggttgtgctgaggtgtacatatgctcatcgccactctgtggttgttgtggagggggactcaagaatgatgggcttgatgtggccaggagctcaagctccactgtgtatgggagatacaagatcatggatgaccagacagagatattggatgattgtgcgcaggatgcgtttcagttgaagcagagtagagatattatgtttgaatgcggtatgacgagggatcctggacgaggatatgatgattcagggctgagtgttgtggagaaggagcttcaaatactcagttcatttgatactgttgtgaatcacggtacatatgatttcacggaaaatggtgagctcaatggcagctgtgacaaaaatctgaaaagcagcattcataaagaatatccgaaaggtcataggatacagccattccctgaaagtggtgatcttgatgaagctgatgagtttcgacatgttggatcattaaatacagatgttcaacattctactgctcttaaagctgaggaagatgccgagacaaatattgatcttgctctctctgattttcaccgagaatatgaggtatttgaattgagaattatccaccgcaagaacaggactggatttgaagaaaacaaagatttccccatcgtcttaaattcggttgttgctggaaggtattatatcactgaatatctaggctcagctgcattcagcaaggttgtgcaagcacatgatcttcgtacaggaatggatgtttgccttaaaataattaaaaatgataaggacttcttcgaccagagcttggatgagataaaacttctgaagttcgtgaacaaatatgatccactagatgaacaccatgtgttgcgcctctatgactacttttaccatcaggaacacctttttattgtcactgaactactgcgagcaaatctatacgagtttcagaaatataatcaagaatctggtggtgaggtgtattttactttgcctaggatacaggttatagctcggcaatgtttggaggccttggtttacttgcaccgtctgaggatcattcattgtgacctaaagccagaaaatattcttatcaagagctacagtagatgtgaaattaaagtcattgatctgggaagtagttgcttcttgacagacaacttatgtctctatgtccaatcacgctcttatcgagctcctgaggtcattctaggcctaccttatgatcagaggattgatatttggtctcttggttgcatcctttctgaattgtatactggtgaagtattatttcctaacgagcctgtgtccgtaatgcttgctcaaatgattgggataaccggcccaattgacatggaaatgctagaattgggacaggagacacagaagtatttcactgatgattatgacctttttaccgagaatgaggagacagatcagctagagtatttgatcccggagaaatcctccttgcgacaacacatacaatgtcctgattcagagtttgtcgattttctgtcttatctactgcaaattaaccccaggaaaagacctacagctgacgaagcactacagcatccatggctttctttctcgtactaatgagaagccatccggtgctttcttcacatataaagccctccttttctgggtgcaggattcttctttttttgtgtcttcagggtaattcttgcgtttcctttttctgggtccaggattctttttttttgtcttcagggtaattcttggtgtgaagtgtgaacccctgccctggagtgattcatgagtgtatgtaaatatcagaaaattttccgcggagtaactgtacagttatgtacaaggaggatggaagggagcag

SEQ ID NO: 34806 - DNA, 810 bp, Zea Mays
cgtggcctcacctgaaggctgagttgctcctgccgcgtgtctcccctgcatccggcggtgcccgcgaacgtgcgcgttgcatccgggacggggagccactgcagccacgcgccagccgtggggaacaccacagggaaaaagagtggtgagatcagcacaactgatatagcgtgactatgcccccaaggtgtttgctcaaatgccagtaagtgccacagtgccactggtgtggagtacgctgtattttgcaaggccctgaaagtctgcgtattttagtctgcttgataggttctttgatacgccgtgtaactggacagtgcagtacgtgcccagtctcaggatgagaataaaaaaaggaggaatcaagttcatccttgaacattgtccgagctgctattctcaggttggtggtcttcttctccaccgaaggtcctaaagtcaaaaataccttcggcaaaatgatacaatagcttgtcgaagctaccttcagcctcggctcagctcctcaagccgaagctcaatagctttggcccagacctagcaaagaaggaaaagaactagatagactttattagttttaattacttgtaaacaagtgtttgggggcatggatgtaatcttatccgggctacgtcccatgcctataaatagatgaacagtgccctgtactgttaaggctggattgcaatcgtgctcgagtcattctcgctctttcaccttccggcaagccgaatgtaccattgtaatatgaatattattaaagtttattcatgtttaatgaagataaataaatcataaatatatgacgga

SEQ ID NO: 34807 - DNA, 644 bp, Zea Mays
ttcctctcccctaggagatctctgtttcccatctgcacttccgagttccagtgagaacacaaagaatgtgctcttgtcatgtgcattcatacacttggaaaagaaggagttcatcaagcagtttgctgagatttcatcaataaaccaacgaattttgttattcggtccagcaggttctgagatttatcaggaaacattggtaaaggcacttgcgaaacattttggtgctagacttcttgtcgtggattcacttttgctaccttggatccctgatggtaatgatcttggtggtttgtgcgaggaagatcatggcttcttctgctctgctgaatcacttcgcccagacttttctgctggtgaagaagttgagaggctagctatgaccgagctaatagaggtcatttcagaagagaacaaatctggacctctgattgtgttacttaaggatgtagagaaatcattcattggagttaccgagtcactttcatcttcacggagcaaatttgaatcgcttccatctggtgttcttattataggatcccacactcagatggacagccgcaaagaaaagatttgtaatgttagaatcttagaatttccatcacttgccattcctcaaatataaatatattgcatctattata

SEQ ID NO: 34808 - DNA, 764 bp, Zea Mays
cagctccatcggacgacacacaaggagctatagcttctggtgatgtgtcgtcgtcgctcgcaataatcatcatctagctatagcagcagcgcgctctgcgttctcgtcgtgcgagagcatggtggcggtggagcggcggctcaaggagatgggcatcccgtacgtgcagcgctgcgtggaggagggcggcatcaacgtggaccagatcttcttccacgacccggacgccttcatgatcgaggtctgcaactgcgacaacctccccgtcgtcccgctcgccgccgccgccgaccagcgcgcgcctgccgtcctcggcgcctgcaagcgggccgcggcggcggtcggcgtcaagcagcagcagcagcaaagcagcggcggcgccgtgccttcttccgccgccccggcggcggccgcgcagcgcgtgccgtcggcggcgcaggcgcccatcgtccgcgtcgccgaggagtcgacgtcgcacatttcgtgcgcgtgattcttcatgccaaatggcgaggacggtcagtgtcgtgccggcctgccggatgccgtcaccgcgacggtgaccgcgcgcactgcatgtctgcgtcgagccgtgacgaagcaggcacgatgcgtcgagtcacggcaaaaagcgtctagcgcgtcgtctctgtatatgcgagtgcgtcgtcgtgtagctccatgtgcaagcaaactactgcccttttgtagtaaagaataaaaccatgtgaagagacgagtgcgtgcatcattggatatctcag

SEQ ID NO: 34809 - DNA, 1050 bp, Zea Mays
atgcacaatctacggtccgtttcaaagcccaacgcgaagctctatttgggccttccgtttacgcccaaccgacaatgcgaagccttatttggcccaaccgaaggcccaacgcggtcagctgatgtctctttgactctttccaccacacgaccacactgctcgtgctctctcgatgcggtcaccagtcgaatggacggcgcggatatcccctcccactccgccgccgatggcgaccggcctccggagaacgcggacgacggcggcgtggaggacgagcgtgccgccgcgccccctccggagcggtgcggggcgttggcttccgcaatcgcaggggtgctggccggcgcgctgcgggagcacgaggagcgggcggccgccaccgcccggagccaggacgaggtcgccgctgccatcgaccgcctcaacggagagctagacaggctattagagaatgcacccacaatggtaataatgcatcattcagcaaggatttccagcatccgcaagaggatttcagcaatgaacatgctgctcaagtccatacaacgacgcatagatagcatggatagaattatttctactgaccattcatctcctgtacagaaagccggtaatgaagttggaacaagttatggctttcaatatcacgaagttagtggtggagaggtgagcttttcctgggctttggtgctgtggtatgaaatacagtaaacaataaataatagaataagttctagcagaattctggtggtgtcccatcaattgcgcaccatttctgttttggtagagctgccatccaacaatcacacggtgctgtgcatagaacatattggagtggggaaagtcttttgtactggatggtcaatgttgcagacaacgaatcgtgctttcagctttggcgtttacccttgtattcaaacatgaaattgtcttcagaaatattatcatattgtcactgttgagcggttttgatgtatacttgcttgttgaagatggcaacatctggaattcgtgttgttatattttatcataaatgcttctagatacgaa

SEQ ID NO: 34810 - DNA, 1809 bp, Zea Mays
aaccagagccaacagagcaacgcccaggccccaggcacacactacacgaaccaggcaaccagctgggaggaaccctagcggaacactgtgcaggtgacagcggcgcgctaccggtgacgggggatacggcggcatcgtccccctcggtccctcctccatcccccgcgcggcggcgccagcagccggcctgcagaaccatagcaacactttggtgcgcttaagatgtccatcctccgatcctttctcccaatagtagcaagatcaaatggttggagatgcttttctactgggattccttctgatatgatagcggaccttaataaggttaagcatttgactttcttttggatattgtcattttgtgcaactatcttgccttcacttacttaactaagtatgagacatgtcatgtacattggcacattctacaaacttaatgaaactgaatacagtggtaggttcagtactccaggttccagatatgtagctgtatgacgatttcaattaaagttataacattacctgacagtttacaatggcttctgatgatgtcccaagtatgtttgtttgatgcctctattagaacaacatatgtgtgattcttgatgttgacaaccaaaagttacgcactattatattcgtgagtagaaacacatgtaaaactaccacaatgccaaatagagagatcagactggtgttcacaattctaaagtcatgcccccttttactttacaagttgtgatcatgagtttgaaactatgaattgtcacttaagtttacacccttgcagctgctgcattataatgcaatatccagaaaaagctaaacaagtaaacatttgtttgtagatttgtcctgtgcaatgttgcatgaatgtgtgtttaaatatttgttattgtgtgttgaaaggaatatttgttccgaattatctcaattattgtgatcgtaggaaatggagtcaatatttggcgaacctccatcatccagtcctttgggctcaagtccgtccccccagcagccagtggaggattcaccactagtgcttacccatactgatagcagcggacaggccaatatggttgacgtctctcccaaagaagacagtaagagagtcgctatagctagctgcagggttttgctaggccaaaaggtgttcaatttggtggcatctaacgagatttcgaaaggtgatgtccttactgttgcaaagattgctggaataactggtgcaaagcaaaccagcaatcttatacccttgtgccacaacattaatctttcacatgttcgtgttgatctcactctaaatgaagaggactctagtgtcgtgatagaaggggaagccacaaccagcggaaagacgggggttgagatggaagcattgagtgctgtagccattgctggccttacagtttatgacatgtgcaaagctgcttcaaaggacatttgtataacagatgtctgtctccaacataagtctggagggaagagcggaagctgggccaggaattaaaaggttaaattgttgctctgaggatatgaactgcaagcatgattccggcatctatagggcttctaggtcacttggataatttgacaccggtgcatggtgtttcgaaccgcatatcgtaattaccatgtaatgttattttgtagtatttgaagaaattgatgaagatgtcagacacagaatcaaagcaagctagatgaaacagcgttaagcatctagtaatgttttatatgacaaaatggtaccatagatgataaaaagaacaagttttatacaatggcaattagatttgttatgttgta

SEQ ID NO: 34811 - DNA, 4828 bp, Zea Mays
cacaccaaaagcggcatagcagtatagcaccataacccctctcttccccgatggacgcgacgacgaagcggcggcaccagcccggcggcgcgcagcccacacgccgtaaggtcgtggaggaacccttccacaccgcaccccctacacctgccgcggcgtccccctcccgcctcgtcggcgccatcgtcgagaagggctactccgccgccgcaccctcctcggcgccccgaccttccgtcctccccttccccgtcgcccgccaccgctcccacggcccccactgggttcccttggtgaaggacgcccccaaggatgagaccgcggacaacgacgacgagatggacatggatgagacagactaccatcctgtggcagctgctgcagctggtcctgtgaggaggaaggagaagaagggcatggattttagccggtggcgtgagtttgttggcgatgctccccccaagcggaggcaggggaagccagtgcaggccaagaaacagagcgatcagagaattgatgctggggctgtagcttctaaggtaggtggtgtggcagctgaggggagaggattggagggaggtgctatgcggcttgacagtggaaatgctagcgaagggccaggtcccgtgcttttggtttctgatgtcgtgtccaagaagccaatgagtcaggttgaatcgagagatgaattggtgaacacaagtgaggctaggaatttggcatcacaagcagagagtatggacctcgacggcagggagtcatctatggaagcagagatcagcgcagagaacatggctaggttggctgggatgtctgcaggggagattgcagaggcccaagcagatattgtaaataagctgaaccctgcattgctggagatgctgaggcggcggggaagggagaagtctggaggcacgaaggatgtgggtaaggacaagggtctgaaaaactcagggctgcagaagaataaaagggctacaccaggggattggttgactgctggtgaacatactgggcactcctggaaggtgtggagcgaaagagtggagcggatcaggtcttgtaggttcacattagatggagacatattggggttccaatcttctcacgagcaacaagatggcaagaagatgccttcagaaagtgttgctgagcgtgatttccttagaacagaaggtgatcctgcagctgttgggtacacaatcaatgaggcagtggcacttaccaggagcatggttccggggcagcgtgtgcttgcactgcaacttcttgcttctattctgaatagggcattgcagagccttcataagaccgatctaatggataatgttaaaggaatgaattccaaggataacattgatgactggcaagcagtttggtcctatgcccttgggcctgaaccagaattggtgggttctggaaatacaacacaaaaccttcaaatatactcccacattgtggtgataatgacgaagacgaagctgatgagaagcatacaattcaggatgatgttgttgtgtctggccaagatgttgctgctggttttgttaggatgggaatacttccacgaatctgttttctgttggagatggatccatctcctgctttagaagattatcttgtatcggttcttgtagcactagccaggcactccccacaatctgctgatgcaatcttgaattgtccaagacttattcaaagtgttactaagctgttgataaatcaaggatcaatggaaattcgctcctcacagatcagaggggttactctcttgaaggttttgtccaaatacaacagacaaacctgcttgaattttgtgaatcatggagttttccagcaggcattgtggcactggtacagaaaagctggtactattgaggactgggtaagatctggaaaggaaaaatgcaagcttagttcagcaatgatggttgagcagctgcggttttggagaacctgcatctcctatgggttttgtatagctcactttgctgatttctttcctgttttgtgtctgtggcttagtcgtcctgattttaagaaactaagtgaacacaatgttcttgttgagtttagttccgttgctagagagtcatatcttgtcttagctgctctggcacaaaggttaccacttcttcattcagtggagcagcttgccaatcaagatctgggagtttctgccagttatattgagacatgttcttggagccatgttgtcccgatggttgacttagctttatcttggttacatcttaatgatattccctatgtatgttcactaatcagcgagcagaataggaatacagagcacatgttagagatgagttatctgattttggtgatttcttctgtgctaggcatgcttaattcaattttggaaagaatatcaccagatgtcactcctgaggataaaagttacagcttgccctggatacctgattttgtccccaaaattggcctgggcataattagtaatggttttttcagctgttcgaccactgttgctggtagaaatgcagaacatcagcctttttgctgtgcatctttggtgcagggactttgttatatgagatgccatggtaatgttgatgtatcattgtcttccattagctgccttcaaagattggtgcagctatcctggtctgtcgacagagtgatccagggagccacaaaatgttgttccgagtgtttcaatgagtctggaacaggtgaagctggcaaactactagctgaaggtatctccagtttatggcataatgatttgctacacttgctgacttcgcttttgccaatgatttcatcacaatggtccatatcacagaacatagagatgtttggtagaggaggaccagctcctggtgttgggtttggctgggggacatgtggtggagggttttggtctcttaaatgcctacttgcacaattggattcacaattggttgtagaattgatcaaatgtttctcttcagttcaaggaagtcctatcatcctcgatgaaggtgtgaagttagataatgtgactaacacagttgtgacagcttcaaattggatcagttctaccctagggttgtctctgattgctggacctggacaaatctatatgttggagaaggttttcgatatgatttttgaaccttccattctgaagtatctcaaatcatctatacataaatttacctctgacatggaattactgaaaccttttgaatgggacttaaatgaagatgaatatatgctcttcagcagtgttctcaaatcacatttcagatccagatggttagccatcaagaagaagcattcagataaatatgcaggagataatagcagcaccaagatttcaaaaacaccagagatattggagacaattcaagaagaaacagagttgtcagaagctgtaaatcaaccttgcaacacattaatggtagagtgggcgcatcagagactgcctcttcctatccactggattctaagtgcagtttgctgcattgatgatccaaaaggcacactctcaacatcagccaactatattcttgatgtctcaagggctggtcttatcttccttttaggtctggaggccatttcagctaccccgtgccttcatgctcctttgatctggaaaattcatgcactttcggtctctatccgctctagcatgcatttgctacaggaagacagaagtagggatattttctgtgctttacaggaactgtatggcctgcatctgaacaggttataccaaaaattctgtaaaccaaactctatcgaggaagttaagggcgttgtagtgggcacttcagaggaagcgatggagatcagtagccttgaaattctcaggtttcaggagaaaattcatggaagctatactacttttgttgagagcctggttgatcaatttgcagctgtctcatatggagattttgtttttggtcggcaagtggccatttatctgcatagaaaggctgagccagcagtacgtcttgcagcatggaatgcactgtctagtgcgtatgtgcttgaactgttacccccgctagacaattgcattggcaacgccccaggatacttggagcctcttgaggatgatgaaaaaattttggaatcttatgctaaatcatggacgtctggtgtcctggacaaagctttacagcgtgattccatggccttcacattggcaaagcatcacctttcaggctttgtcttccagtccagcgattctggcacaatgctgcgaaaaaaactggtcaaatcgcttatccggtgctatgcacagaagcggcatcatgaggttatgcttaagtgcttcgttcagcaaggcatcgcacaggattccaagagcagtgagcttgaccggagatttgaaatcttgaaggatgcttgtgagatgaactccaacctcgtaggtgaagtccagagactgaaggcatgtcttggccaatgaagccagatatttaagtgtgtcattaacttggcagcgttagttgttgggaaagctcgacaaagtggcccaaaatatgcaactgaggaaactcacggtcggggctagtggttacttttaattttgatgaagggaacgccgagcacgcagcaaccctgagtctaacctggctatggttaggctgctcttagcagagcatgcatatggtcatgtaaacagtagaccacactgtctattgagtgaagtttgaaatagactttatatatagcattaggcttcctttgattcctcttccgcttctcatagtcggtggcgttcagccatctttcactatcgtggtttcaacatctaaagacgcttaagtcaggacaaaggcatcacgtataagaatag

SEQ ID NO: 34812 - DNA, 1049 bp, Zea Mays
ccgcgacacagctcactccgctccacccacccacccagctctgccttcgtcctccccgtcccgtcctagctaggctcttcagtcttcccccacaccaactcgctcgccggccaagcttccttctcatcctctctctctcgctgtcgctgggccccgcggcgccctccccctccccgcatttaatcctcgggcgtccgtgctcccccggtccgctcacgccccgcccgtgatctcggccgccgtctcccactctgtctcaccgcacgagccccgcgtggtggtggtggtggcgctaaatggcgagcagcggggtgaggaacggcgtggggcccaggatgagcgcgaaaccggaccgtcagggcgccggcgccacgcccaagacggccgcggggaagcaccgcgtctcctcggcgggcggcgccggcgcgtaccgccggaccagctccggcccgctccccgcggcggcgggcggccgcgcggcgtcggacggagtttctagtagagtaagggttgctgtaaggcttaggcctaggaatgcagaagagttggcggcagatgcagattttggtgattgtgttgaacttcagccagagctcaaaaggttaaggcttcgtaaaaataattgggagtcggaaacatacgaattcgatgaagtgcttacagacttctcttctcaaaagcgagtgtacgaagttgttgcgaaaccagttgtggagagtgttatggagggatataatggtacagttatggcatatggccagactggtactgggaaaacttttacactggaaagacttggtgaagaagacactgctgctaggggaatcatggttcgtgcaatggaggatattctagcagacataacacctgggactgattctgtctcagtatcatatcttcagttgtacatggagatgatacaagatctccttgatcctgtaaatgataatatagccattgtagaagacccaaggactggggatgtttcattgcctggagccacagtagttgaagttagagatcaaaaaagctttgtggatcttctaagg

SEQ ID NO: 34813 - DNA, 2019 bp, Zea Mays
tcgatggccctattgcgtaaaacaataaacccgccttccccaccactggtcatcagtctccactccacgcccgacagagcaggaggactcagaaatggcaatcccagtgcgatcggctgccgcgccccgccgcctcgttccgtcgatacctccggcgagctctggacatgttcgaggactggcgtgcttcggtacccgaaccgggcctcgcggtgcaagagggttgtcaatggtggtcgccgactccaccagccgtcgggccaagcaagcggacggcggggacggcgtccttggggcgcctgttctcggagggctcgggatggagggattgggggatcagctcagcgtggtgatgaagttcggggggtcctcggtgtcgtcggccgcgaggatggctgaggtggccggcctcatcctgacgttccccgaggagcgccccgtcgtcgttctctctgccatggggaaaaccaccaacaaccttctccttgctggagagaaggcagtagggtgtggagttatccatgtttctgaaatcgaagagtggaatatggtcaaaagcctacatatcaagacggtggatgaacttggacttccaagatctgtaatacaagacatgctagatgaactggagcaactattgaaaggtatcgctatgatgaaagagctgacgcctaggaccagtgactaccttgtttcatttggagaatgcatgtccaccaggattttttctgcttatttgaacaaaattcgtgtcaaggcacggcagtatgacgcatttgatattggtttcattacaactgatgaatttggtaatgcggatatcttagaagcaacctatcctgctgttgcgaagagacttcatggggactggatacaggatccagcgatacctgttgttactgggttccttgggaagggctggaaatctggtgctgtaactactttaggccgaggtggtagtgacttgactgctacaaccattggtatggaaagatgttgatggtgtacttacttgtgatccaaatatctacccacatgcaaagactgttccatacttaacatttgaagaggccacagaacttgcttattttggtgctcaggttttgcatccacaatcgatgagacctgctagagaaggtgatattccagttagggttaagaattcatacaaccctaaagctccaggcacccttattaccagacaaagagacatggataaggttgtactaactagcatagtgctcaagtcaaatgtcactatgttggacattgtgagcactcggatgcttggtcagtatggtttttctggcaagggtatttgctatatttgaagatctatgtatatctgtggattgtgttgctaccagtgaagttagtgtttctgtgtcacttgatccatcaaagatctggagtagggaactgatacagcaggaacttgaccatgtagttgaagagcttgagaaaatagcaattgttcgtctacttcagcagagggcgataatttcacttatcggaaatgtggagcaatcgtctctcatactagaaaagacgggacgtgtgctgaggaaaagtggggttaatgttcagatgatctcgcaaggagcgtcaaaggttaacatgtcgctgatagtccatgatagcgatgcaaaggcactcgtagaagcccttcatcaggcgttctttgaagacgatgtcctatcacaagtcgaagcggagaacctactcgtgggctgatcaacgtaggctttgctgggtccaggcgtgttatctgttatagattcccactcgcctccatgaacggcatgggcattggatcattgatcatgttttgcttgaaacaagtatgtcttccaggttctcagccaatgactgcaaaactgtgtttctgttttagaactgtttgcagacaccacagtctgagctgcgagcaccgattgtcaacaagatggcaagcctgtgatataattccaactgtctctaatcaatatatataataaacattatcaatatctattaatt

SEQ ID NO: 34814 - DNA, 1291 bp, Zea Mays
catctctctcctcatataaaattcgaagcatcctgccgtgcgtccccgaagttccgagtccccattcggtcccccccctctgctctctcgaagcctccaggctccagaacccccaccccctctcctctcgcgccgcgaggggttgatccgtccggcgatctgggccctccggccggcgcccgcgcctgggaggcttttccttacccgccgcacgggcggagatgctctcgctccaacagcagcacggcggcgctgtcgccgccggcggcgatgcgcgccaccacgcaccgcagccgtcggtgctcggtggaggcgcggactggctagtgttcgggggccgcgccgacctggaggagcccgcgaggaatgccccgtcgcccgccttgttccttcttccgcccgcggggctcgatgacagggcggcccagcccgagcccaatcccaagcccgcacagctcgcaggagctgttgatgaagagcgacatttggcacttgcacatcaaaactacaggtcagggaagtaccgagaggctctagagcatggtaatgtcgtttacgagaagaatccacgtcgaactgataacctcctcctccttggagctatatactatcagattcgtaattatgacatgtgcattgcaaaaaacgaggaggctcttgccatagatccacattttgctgaatgctacggcaatatggcaaatgcttggaaggagaaaggtgatattgatcttgcaattcgttactatcttactgctattcagctgcgaccaaacttctgtgatgcatggtcaaatctcgctagcgcatatacaaggaaggggagactgaatgaggcagctcaatgttgtagacaggcacttgctataaatcctcgattggttgatgcacatagtaatcttggaaatctgatgaaagctcaaggctttattcaagaggcatacagttgctacatcgaggcgttacgtattgatcctcattttgcaattgcatggtcaaaccttgctggtctgtttatggaggcaggagacctcgacaaggctttaatgtattataaggaagctgttaagcttaagccatctttcgctgatgcatatcttaatcaagggaatgtttataaggctttgggaatgcctcaagatgccattatgtgttatcaacgtgcactgcaggcacgtcctgactatgctatggcttatgatactcatctcgggtgagatgcgaacaagcttacaagagaatggtcctttctttaccttcaaagtagagccttagtatacctcgtaataca

SEQ ID NO: 34815 - DNA, 2380 bp, Zea Mays
gaaagggctacatttcaatctctcagacactagacactacctatctactccaagatccgcggcggcgtgctggcctactctaagatccgccggcgcgtcgtggcggctcctccgcgtcccgcctccgaggccgcgggcggcgtcaggctgatcggggtggcgcgcggcgccggggagcgccccatcgtattcgtgcctctcaagaggttcgcggacgcaggtcggaccactgccgcgcccttcctcttcctgccggccgccgcactcccgccagcgccgtactacttactacctgcatactgtattctgtagtagtatgaaaaggtaaaggcggcgtactgctatagtatctctgcagaatgttcggaggaggagtacaccaactgaaagaggtttaggaaagttgcaccgtggatctagaattctagatgcattagtgtagcctacagtagccctgtacacacataaaggcatttttcttataaaattgtctcgcaaaatgggatttttttgtgctaattatagggtgctttagcgccacctgggatttttttgtgctaattatatgcagcttccatagaccaccacaggcattcccgcatgcagttcgctctgaatgcctcctttcattctattactatccctgaacgacgacccatctcagggaaatagccattaaatgatagcagccttttttaaagtatggcttggtttgcgatgttattatggttcgaaaagttgctctattttagtctcatttattttataaattgcagtactaaactgttttagtctatagttcctttttagatgactaaaagggattaaacaaaaaagacacccgtaaattaatcagtcgttaaacagtgctagtactatgcatttcatcgcgtaaattaatcaattgaatggtttcaattggtgattttgcagcctaggccatggagggggtatcatcagctccagaaatggacgaggctatctcaactgaccaatcaagcagatcaacaaaaagaagggctaaagtgtgggatcatgttgattcagagctaatagatgggaaagagaaggcggtttgcaaatacttgtaaacaatagagcaatgaaagatatgcgagatgctttgggcagccagatgtttttcagtggtgaacacctccatgtgaggtgttcttctcatgtgctcaacatcatggttcaagctggactaaaggtcgttccaaatgcagaatatcattagcattatatagtttatcttttgtcttaatcaccaaagatgtttttcagaatatcattagcagccagatgtttttgtcttaatctcaacatcattttcttaatcaccaaagttttatcttttgtctgttcttctctaatatccatgcatctaaataagccctaatagtatctctcattctcttgttactattagtatttaaacttattactattagtatttaagcgtgaataattatcattagcatttaagttacattttataaaccaaacgacacctaaagtgctccgtcatagttggctacttgccagccgattatttagcacgcaagccatgctcgatggatacaatagtatatgaccaatatagatgacctacgtacatgtgttctatgcttcagcaagcataatatgtttcttgccttcgcatcaactcaagtgtgtgatgatatgttgctgtctagtactaactctgaatcaattaactctgaatttgtccaggctaaggagttccttggtgcttccggtgacaagcgaaaggaagtcaattaactctgaatcagtggttctgctgcaaggttacacacaacattttattgaatggaaagaggacactcggtgaccacaagatcatcagatgatcatttgttgagctctggaactaaatcctctccgcaggtggtaaccaggcgggttcccatccgagttccgaggtcactgtaatgctaaattgtcaagttcagttatctgaattcagtttgagttataattctcatcaagcatcaatgtcaccaactgtgtagaaatactgaattttagcatggagcgtctttataaacattttagcatggagcagtttctcatcgatcatggctgtcaagttctatttctctacacagttgcactttgtggttgttttctatcatttgtttgtgagcccatggattttactaatttattagcttgtggtggtgcttgcttgtatatgaaggcccttggattggcccgtggatttttaaaaggatcgaggcggattaggatgtcggggcattaaaaaacggattgaattgagttgtatcaaatcaatttggatttaagtagggctgggttcactttttaaacttataggattggagtggggttg

SEQ ID NO: 34816 - DNA, 3615 bp, Zea Mays
gcgggttgggccttcttgttcgcttgggtcttgtcttgttagccgaggaattgatttactaaggaatgccgagaaaccctaagactgcgtgtctcctctttgctagatctgtgactcccccgccatcgatgccaagtttgccccgttgccggcgtcacccctcccctcgacggtgaagctcatagcttccctccaccgccggtgtcgcttctcccccgccgaccaagccgtgcctgtcgccggcgtcgcccctcccccactagtgaaactcgcggtctctccaccgcacgcgcctcgtgtagttgtggctgcgtgcaccccctgtagccccggcgataggtcctactgctccatccggtttgcttccggcaacaagatcaacaacaagcgagcgagctgtgatctctggaggtgctcttcctactctttctggtattttgatggtggcttgatggccagtaatatgcagtcttctgggctgcctcagcctccaagacctcccatgatgggttctagcgctcagccacaaaatcttggaccaccaatgcctatgcagtttaggccagtgatgccttcgcagcatcctcctcagttcatgccaccagcagcacagcagttccgtcctgttggtgagcctatggcgggggctaacgttggcatgccagggcaaatgccacattttccacaacctgggcagcacttgcctcactcaaatcaagttccacctgtatcacaaggggttcccatggtatatcagccagctagaccaatgtcatcagcacctatgcaacaacagcaacaaactgcgtatgctgggggccatttgcccaccatgggtgctcctatgcaacccctgacctatacatatcaaccaacatcgatccctcctgtagcgcaaccctggagtacaggcccaggacagagtgtacatcatgtgcctcctctagtgccgtctgggcaccagccggtgtcagctccaacgactttgcctcctgtcaacttgtctgaacctagctcttcagactggcaggaacacactgcagccgagggaaaaaagtactactataataagaagacaaggcaatcaagttgggagaaaccagttgagttgatgacacctttggagagggctgatgcctcaactgaatggaaagaatttactacaccagaaggacggaagtactatttcaacaaagtgaccaagcaatcaaaatggactattcctgacgagttaaaggttgcacgtgaattggcagagaacgcatcaaatcaacaacctgatcgagaatcaggaatagctactagtgctcttgtcagatctgctgcctttgaaccttctactgcacctgctaatcagtcgtcatctgctgttggtataattgcttccagcgcacatgatggatcatcaaactctgttctttctggtcctcccctgccgcacaatgtggagaatacttccagttctattgttggcatgcaaaatggtggttcgagtactgctgttgttcctgttgcagcaagcacagaagttccattagttgcaacagatgcagggtccagcagaaacaacgatgaaaattcatctctgaccactggggctgacgcagaggatggtacatccgctgaagatttggtggaggccaaaaagaccatgccagttgcagggaagattaatgtcactccagtggaggagaaaacaagtgaagaagaacctgtagtctatgccactaagatggaagcaaaaaatgcgttcaagtccctgcttgagtcggtaaatgtggagtctgattggacatgggatcagactatgagagtcatcataaatgacaaaagatatggtgctttgaaaactcttggagagagaaagcaagctttcaatgagtacttgaaccagcgcaaaaagtttgaagccgaagaaaaacgtatcaaacagaggaaagcacgtgatgatttccttgcaatgttggaagaaagcaaggagcttacatcatcaacaagatggagcaaagcaatacttatgtttgaagatgatgaaagattcaaagcagttgagcgtccaagggagcgtgaagatttatttgagaactatcttgtggaactgcataagaaggaaaaagccaaggctgctgaagaacacaaaagatatgtagcagagtacagagcttttctagaatcatgtgacttcatcaaggcaagcactcagtggagaaaagttcaggaacgcctggaggacgatgaacgttattcccgacttgagaagtttgatcggttggatatttttcaagagtacattcgacacctagagaaagaagaggaagagcagaagcgggtacaaaaggatcaagtgagaagacaagagaggaaaaaccgtgatgggtttcgtaaaatgttggaagaacatgttgctgatggcacacttaatgcaagaactcggtggcgtgattactgtgcacagataaaagattcacagtcctacttggctgtagcatcaaacacatctggctctacaccgaaagagttatttgatgacgtgatcgaggaacttggcaaacagtatcaagaagacaagatccaaattaaagaagtggtgaaatctggaaagattcctatgacaacttcatggacattagaggaattccaaactgctactctggaggatgatgctcttaaaggaatatcaaccatcaacatcaagcttgtatatgacgatcagcttgaaaggctcaaggaaaaagagcaaaaggacgctaagaagcgccagcgcttgggtgaaaatttttcagatcttttgtattccatcaaggaaatatcagcttcttcaacatgggatgattctaaacagcttttcgaggatagccaagagttcagggccttggacagtgagacttatgctagagagctttttgaagagtgcgttgtccacctgaaagaaaggttaaaagagaaagaacgtttgagggaggaagaaaaggcaaaaagagagaaagagcgtgaggagaaagagaagaagaaagagaaagaaaggaaggagaaagaacgcaaagaaaaagaaagagaccaccgggaggagagagaaaaggagaaagggaaggatcgatcaaggagagatgaaatggagtttgatggtgctgatttgaacacccatggtgcaaaagataagaaaagagataaagataaagaaaagaaacataagagacgtcaccatgacacagatgatgtaagctctgagagggatgataaagacgatgctaagaagtctcggaggcatagcagtgatcgcaagaaatctaggaagcatgcacatggctcagattcagatagtgaaaaccggcacaaaagacataaaaaggaccgagatagtagtagaagaaatggagcacatgagctggaagatggtgaacttggagaggatggggagatctattagtctttctgtttgctaccgagattctgaccaggctaaattttcatttccttcaaagtccatggtgctgtctgtgctgaggtaacagattgctcagtttgcaacgagtttctttgtgagtgatgtgcttttgggagagtatggagtgtttgatttgtcgctcatgtcatgttaaggcttgttcattatac

SEQ ID NO: 34817 - DNA, 832 bp, Zea Mays
cgcacacgtcgcgcgcagccgtgtccctatgctcgccgtggccggtcccctgcgtcgcgcccgggattttgtcgcgcatccctgcgccccactgttccgtgacactcgtgctggctcacttcatcaccgatttctaaagaaccagcttcgtctgtttgtcggtctcattctaatttgatttggaattattgcgcctcagccttgatctgtcaaggctgtcacggccgccgccaaatcgttagagtcgttcaactcgccgatcacatcttggtcggtcgtcgatttcttattcgccatggtacaacaccgctgttagatcctgtctccaacctgtcatggcgcttgccggacttcgccggtgaagttcgtcgtggtcatctggtcccagcccgacccatccgtacgctcgctcctcatccatcgggtttcggcgtgttcgcgtttaccgtcgagtcatcgaacccatcatcccctgctcgacccccaccttaccagctcgctccagacttcaatcgaaggtcgtcgtcgttccgcgcgtcatcaagaaatcccaaacgtcgggtgaagacgaagccagcagcgtggtgttcaccaagtgcgcgacaaaaagctcgaacaagtcgtcgatttcgtggtttcaaatcggatgtcataagggtaccttaattaatcatgtgatgcggaagacgacccaagtcgatcccaagcgtgggctaatccgcatggtgatgttgatggatgaacctgaagataggatgatctaatcaagtgctaggacaaggatgatcgccaagtggacgtcacctaacaacactgacctagtgttattcag

SEQ ID NO: 34818 - DNA, 903 bp, Zea Mays
caccaccggacactgtccggtgcacccagactgagcagactttggctgaacaaagccatctcttttccaattcgatttctcctgtttccagcacttagacacaatacattagttctcaaaacattgtactaagtctagaaacatacctttagacttgatttgcactttgtccatcacttggcatagattttcacttaagcacttgtgttggcactcaatcaccaaaatacttagaaatggcccaagggcacatttccctttcaatcacatcaattgcttttgtattatggctatcactttgtattatagggaacaaggcccatgacatttcagtggaaaactctatagtggaggcagtggggagcatccaagaggagccactgctggagcatcatatgtgcatgcagaaggatcagggctatatacgaagttactcgaccgaaagcttggctcttgtgtggggctccaacaagaattagtgagaattttgcactcttcttaatacctcgcgcgaccggggccttgcatgccattggtgcacagcagtgtgtgccctcttggccacatccagaaaagcagagtgagcttcgagaggagctcttgatgactcgattgctaagtgcttgtggtggttggagacggcgttagtagggtgtggtatttgtaagtggccgaaacgaagcgcgaagatgatgtgatcaacttgttagcacatgcatatgaggttgagatgaggattcaggacgccgatgatctgctggatgggttagaactagcgaacaagattgctgtagtggcggacgcaggttaaggtttgcggtttaccctactctattcgcgatctttgccataagccaaactaaggccctgtttgggaacaaagtttttgaaaactacagtttt

SEQ ID NO: 34819 - DNA, 1316 bp, Zea Mays
cagctcttgagctttctctcgctcctgagtgcagtctctctctctgcgccctgcgctctgcgccgccgccatggaggacgacgatgactgccctcctctcgccgttgagctccctccgcgggtgccgtcccctccagagcaatctccctcagacgcctcgccagttggcatcaccgtcatcaccggctacctcggggctggcaagtcgacgctagtcaactacattctgaatgagcaacatgggaagagaattgccgtgatactaaatgagtttggagaggaaattggggtcgagagggcgatgatcaatgaggggcaaggtggtgcacttatcgaggaatgggtggagctggccaatggatgtgtctgttgctctgtaaaacacagtctggttcaagcacttgagcagcttgtgcagagaaaggatagaatggatcatatattacttgagacaacagggttggccgatcctgctccacttgtttctgttctttggctagacgatcaattggagtcgtcaattgtgctggattctattattacggttattgatgcaaaaaacttcagggttcagattgacgagcacaaaaactcttcctcattccctgaagcatttcatcaaattgcatttgcggatgttgtgatattgaacaaaattgacctagtggaagacagtcttgaggatctggaaaaacatattcgtgatgtgaatgctctggttacagtggtgcggtccgtccgttgccaggttgacttgaatgaagtatttaaccggcaagcatatggtgccaagaattcatctcatctgcaagaactgctggactatagtaaatcagtgccacctagtcgccgtcatgataacagtatttccaccttgtgcatctatgaacaggattctgttaacttggctaaggtggagtcttggcttgaagatcttctttgggaaaagaaatctattatggacatatatcgctgtaaagggattttatatatccatgattcagaccaagttcatacattacaggcagtgagggaggtctatgaagttgtgccggctcgaaaatggtctgagacagagtctcgcatgaacaagatagttgtcataggccgcaatctggatatcaatgtacttcaagattcttttagtggttgcaagagctgataatgagtatctgtttgccttgcacaatgttagttggccatttttctgtgaggtacctctgtgcaagtgaatactgaattggaggagaatcttagaacctgtttcttcggttttgtggaagaggcatctgtccaattacgggtcgcactctggg

SEQ ID NO: 34820 - DNA, 701 bp, Zea Mays
ggaaaaggggagtggcctactcatgtttctctccaccacaccgctcgtcctctggatgagaacaccagccgactagacagagtggatgtccctcccaatccaccgtcgatggccactggtctccagagaacgtgggcgacggcggagtggaggacgagcatgccgtcgcgccctgtttggagcggtgcgaggtgctggtttctgcgatcgcggggatgctggccggcgcgctgagggagcacgacaagcgggcggccatcatcgctccgatccacgacggggacgccgctgcaatcgaccacctcaacggaggtggctagatttccaatccggtaaaaaaaattggacgcaccaaataccacttgaaagcaaggattttcagcattcgcgagaggatttcaacaacgaacatgctactcaagtccatacatcaacacataaacaactttgatagaattatttatactggtgcctcaggtggttctatcattataatatttttgtcctattgatcttcatctgtgaatcagcagagtgaatcagcatgaactcatttctgtatgtttacagattattcatctcctgtacagaaagttgataatgaagttggatcaaggtgcaccacttagttcaccttttttaccacttctcattgtttatcttgtgcatgttgtcaatttatagattttccccaaattttg

SEQ ID NO: 34821 - DNA, 993 bp, Zea Mays
ctggagggggctgatgcgtcgcttcatttctgctcttctgccgtctagtcctttgtactgaccggcgctccggtcgtctcctcgcgcttgcgggttccccgtccccaccccacgccgggggcaagagatggagaacgcggtggtgctccgggagtggtttgaccgcgtcgacgccggccgcaccggcaacatcaccgctgcccagctccagggcgcgctcgctgtcggcaacctcaacttccccatctccgtcgtgcagcagatgattaggatgtatgacttcgatcggaatggcaccatgaacttcgaagagtttctggctcttaacaaattcctacagaaggtatgtatgtggcttctctaatttggatctgttgcgcatttaggaattaggattagatgattagtggattactcactcagacaagcatcttctgcaacaggcaatttttctgtttcataatcaactgggtctgatatgtctcataccaactaatggccgtgagaatgttatttaggcttatataagttatacagaagatgtttcgttatgataatgcacaaaagttatggtgtgcaatgaaaggtgcaaaatgtgttttccaccctggataggggtcgtggatttctaagtcttgaggaggtgtaccaggcattaatcaaacttggtttctcgttggattcaccagccttctatactgtttgtgaggtaaggaagaggattcagctgccttctactttggcccatggtgaatcctgtcttgttaaagggagttcatcctaggcctgtttaaacttaaatcttaacacataagttatttgtcctaaggctgtctccagtaacgtcccctaaattttgtccctaaaagaatattccatgtcctttacggaatcctctaaaagattttgtcctctatattttctgcatctccagcaacgtcccataaaatcgatcctctatatatacagtgttaacagaatccactaactacc

SEQ ID NO: 34822 - DNA, 211 bp, Zea Mays
gtccacttggtgagcatctcacatcctggcgcttgatcagatcatctagttttatgttcacccatcagcatcacttggagatcaattccactcgtcttccataacacgttatcaattaacatacctaaatgatatgtatgatgcatatgagtgagtatgaggatgaatagcataagtgaggtaatctacattaaggaggacaaatacatat

SEQ ID NO: 34823 - DNA, 1273 bp, Zea Mays
gctaaactagggctactcctaattcctaatgctaaggtgaaggatgctcttgaacaatttgagaatgcattagagctgaatccaacatctattgaggcccaggcagcgctatataacaaggcatgctgccatgcgtatagagaagaaagcaaaaaggctgcagaatgtttaagggaagctttgagagactacaatctcaaatttggtaccatacttaatgatccagacttggcgccattcagagcatcaccagaattcaaggaacttcaagaagaggctttgcgtggtggagaagatattggttctggtttccgaagagacctgaaactcattagtgaagtacaagcaccattccgtggtgttcgaagattcttctatgtagctttgacagcagcagctggaatttcaacattctttaccattccccgacttgtactagcagttcgagggggtgatggcgcccctgatcttctggaaactgctggaaatgctgccatcaatattggaggtattgttgttctggtagctttgtatttctgggaaaacaagaaagaagagaagcagatcacacaaatttctcgtaatgaaaccctttcaagattacctgtgcgcctgtcaaccaatcgcattattgaacttgttcaactccgggacatcactaggcctgttcaaaagcatctgttactcgggcattgcaaagagctgagaggtatcggactgaactgctcaaacgaggcgttcttctaattcctgtgatctttggtgcttctcagaaagaccaaaccaaaccaaggggttttggtgcaagaagagctgctgcatcagttccttctgttgggggtgactttgaaaagcgtactgaatctattgcagcaaaatcacggttgaagactgaggttcggtttaaggctgatattgtttccccagaacaatgggaaagttggatacgagaccagcaagtgtctgaaggtgtcactcctggtgaggatgtctacataatccttcgtctcgatggacgtgtcagaagatctggaataggcatgccaaactggaatgacatattacaggaactgccacgacttgaagatctgatgagcaaacttgaacggtgaaaaaggtgtgggagcagctaaagttttaccattactctttttcccccattccattcgccttgcccttatctgctgaaacttgaagctggaccatcgtagttcttgtataatatagtgaaattctgctattttgtttatagcttgccgaagtttttctgtca

SEQ ID NO: 34824 - DNA, 1044 bp, Zea Mays
gcaacctttcgttgctttcaggcatttctaatattgaagattggtcatcagttccccatctgcaacttgcccatatgatgtctattgttttggaaaagttttactggagctggtgacagggagacttggaatcagtgcatcaaatgatgcttccacaagcgagtggcttgatgccaccctgcggtacgtcaacatttacgagaaggagcttatgagcaagatcattgatccaacgcttatcattgacgaggaccatctggaggaagtctgggcaatggcgattgttgccaagtcctgcttgaatcctcggtcctctaaacgcccgccaatgaagtacatcctaaaagcactagagaaccctttgaaggtggtgagagaagacaatggcaatggctcgggcaggttaagagcaacatcgtcacggggttcatggaacgctgcactctttgggagttggcggcatagctcgtctgatatagggccttctagggaggacaacattctgaagcgctcagagacaatcaaatcgtctggcgggagcaacggggaccattcatcctcccgcaggaggcaatccaaggagatcttccccgagccgtccggctctcgtgacaccgaggattaagcatgaaggagaatctttttacgaatcatttttcggtaaggcgggagtccttatgaaggagggctctgttagaagctccgcttgctgcttctatagaattctttcgtccaaaaaagtcacaatggcttcacaccagcacaccggcgccatggtaatcatttttgggttaagtagcaatggtggcatgtacgttggtgtaccaatggcatgcagttggcgccagtgtaaaaatcttcacagttggaagtctggtgtctcttctgtccattttctcgtttctgctcctctcggttaaagaaagaatggcgagctgattctttttcttctcccttctgtaattgattgtttcattgttcatcatagaggaaatgttctttttattcatgcttgccatattttttttcaagctttgcatttct

SEQ ID NO: 34825 - DNA, 1373 bp, Zea Mays
cgcgtcagcgctcgaggctgatgctgttgatgagtacccggttacccagagctcaggaaaaggctgctgcgcttggcgccaaggatcgtcagccttcctgatgatgtgaagaaacaactggaggacccagatagcagataccactttggttggagtcgtgtagaagagaaattcgagtctgaaagatgggacacagccaaaggctcctacttcgccaacccagtttttgatgtcccaacaactgatgatgagcttgtaactagatacccatcatactgccgaccaaacatatggccaaaggatcatcttcctgagcttgaaatagcattcaaaggtcttggaaaactgatgttggaagttggcttgatgttggctcatcattgtgatcgctatgtaatacagcgaggggtgggacagtacattggtgaaagccttgagaagacacttgctaggtcaaggtgtcccaagggtcgtctgctgtactacttccccaaatcgtttagcaaacaggacgaagtttcgtcatggtgtggatggcatactgactatggatttttgacaggacttacatgtggcttgttcacgagaaaatcagaggaggtcccctgtcctgatattggaactgggctgtatgttcggactcgtgataatcaagtcgtcaaggtcacacttgtggatgatgagttggtctaccaaattggggagactgctgaaatactatcaagagggcatctatgtgcaaccccacactgtgtgaaggctcccagcagcgaagatgcttctgacgttggtcgctcaactttcgttctgtttattcagccaaactgggatgagccgctgaagcttcctagtgaaatacgctatcaccaggagtgcattccaccaaccaggacacttgcgtacggcgagtactccgaaagagtcttggcgagttttagcggcaagagcgtggaacaaaccttgatgccacagtaagaggctccagccagatgaatactccctctgtttctttttatttgtcgctggatagttcaattttatactatccagcgacaattaaaacgaaacggagggagtatatcatatgtatgataccataccattcaagctacagataagtggacagaagcatatgctgttgtgggatggatgaatcgcacgcagcttaaaataatgcaacaataagactttgtttgcatacctaccatcgtagtgacacatgtgaattgagacgaataacaaagtgtttacacgagaccttttttaaaacgggtatttacacgagacctagaggtacgtaatgtgcaccccgtcctgtttgggattataatctatatagattatataatccaatgtaaataagctagtgagga

SEQ ID NO: 34826 - DNA, 3916 bp, Zea Mays
ggcgtcagggcgatcccgccgagggtataagctggtatcatggcgtccagcgcagtagcaccaagatggttaaggggtaaggtgaaggctgtgacatctggggattgtcttgtaattatggggtgcacaaaggctgagatcgaacctgagaagtccatcaccttatcctaccttatggccccaaggctggctcgtcgtggtggagttgatgagccgtttgcatgggaaagcagagagtttctgaggaagctctgcatagggaaggaggtcacattcaaagtggattatacagctcctaatattggacgagaatttggaactgtttttctatgtgataagaatgttgcatactcagtagtttctgctggatgggcaaaggtaaaggagcaaggctccaagggtggcgaacaaaacccgcaccttggtgagttgttgaggttagaggaagttgccaagcaacagggtgttggtcgttggagcaaggaacctggtgctgctgaagagtcaataagatatcttccaccatctgcaattggtgaagcaagtggttttgatgcgaagggttttgcggttgaaaataaaggcaagagtttggaggccattgttgaacaagtacgcgatggcagtactgttcgtgtgtatttagtccctagttttcagtttgtccagatatatgttgctggagtacaggccccatcaatggggagacgcccatcggcacctactgtaattgctgaaactgatgatactgctaatgacacgaacggtgaagattctgagggaacacctgcccaactgactacagcacaaagacttgttgcatctgcagcttctgctgaaattccaccagataggtatggaagagaagccaagcacttcacagaggctagagttctcagcagagatgtgcgtatcgtggtggaaggcacagacagctttagtaatataattggttctgtgtattaccctgatggagagactgcaaaggacttggcccttgagcttgtcgaaaatgggcttgcaaaatatgttgagtggagtgctaatatgcttgatgttgaagtaaaaataaagctgaagaacgcagaactacaggctaaaaaggatcaattgagaatctggacagggttcaagccacctgtgacaaactcgaagcccattcatgaccagaaatttactggaaaagtggtagaggttgtaagtggggattgcattattgtggctgatgattctgctccatatggcagtccttcagccgaacgtcgggttaatctgtcaagcattagggcccctaagttgggcaatgctcgtacagatgtgaagcctgaccattttgctcgtgaagctaaggagttcttgcgcatgaggttgattggcaagcaagtggctgttgaaatggaatattctcgaaggatcagcaccgtggatggacagagtgttgctccaacagcaaacattgctgatacaagagtattagattatggttcagtttttctgggttcaccatcacagactgatggagatgacatatcttctgctccgagctctgccagccagcctggagttaatgttgctgaacttttactctcacgaggctttgctaaaacatctaaacacagggattatgaggaaaggtcgcactattatgatgctctattagcagctgaatcacgggctgagaaagcaaagaaaggagtgcattctcaaaaagaatctcctgtgatgcatataacagatttaacaactgtatctgcaaagaaggccaaagatttccttcccttcttgcagaggaacagaaggcattctgccgttgttgaatatgtttttagtggccatcggttcaaactaacaattcctaaggagacttgcagtattgccttctcattatctggtgttcggtgtcctggtaaaggcgagccatactcagatgaagctattgctttgatgaggagaaggatactacagcgtgatgtggagatagaggttgaagcagttgacagaacaggaacattcataggttcgttgtgggagtccaagaccaacatgggctctgtacttctggaagctgggctggcgaagctgagttcttttggcttggataggatgtcagatgctcatgtcctaacaagagctgaacagtttgcgaagcaacaaaagattaagatatgggagaactatgtcgagggtgagaatgcttcaaatggatccgcacctgaatcgaaacaaaaggaaatcctcaaggttgtcgccacggaagttcttggtggtgggaagttttatgttcagacagtgggtgaccagagggtggcttcaattcaacagcagcttgcatctttgaaacttaaagatgcaccagtcattggtgcctttaatcctgtgaagggagagatagtcctctcacaatttagccttgacaactcctggaacagagctatgattgttaatggacctcgctctgtagaatctctaaacgacaagtttgaagtattctatatcgactatggcaaccaagaggtggttccctacagtcgtctacgacccgtggacccatctgtttcctcttctcctgctcttgctcagttatgcagccttgctttcataaaagtgcccagtcttgaggatgactttggtcaggaagcagcagagtatctaagtgaatgtttgctcagtagctcaaagcaatatcgggcaatgatcgaagaacgtgatgcttctgggggaaaatcaaagggacaaggaacctgaaatgttctcattgttactcttgttgatgcggagacagaaagtagcataaatgctaccatgcttgaggaaggccttgctcggcttgaaagaagcaagagatgggacactagggagaggaagacggctctccagaacctggaacagttccaggagaaggcaaagaaggaaaggctccggatctggcagtatggcgatgttgaatcggatgaggacgagcaggccccagctgcaaggaagcctggaggtcgtcggtagagctccccaaatgtgagactctgctgggagttatagatgcaacttagagggtaccttatttattcggttagaaaacagaacttagcgaggcgaaactttctcggtttgagcacttttgatattccgttttttacatcgtaagcttataaggttaaaggtacattgttttttctctgaacacaataaaggtcgtctatgcgctgcagttctttgtgtagtcagaatataatatttgttgatactaagaaatgcagtgaattaaagttaatattgcatttaattattctcgtgcaataatgatttctctcgtacgcatttactgattgctttgtggcttgattactgactgctttgttgcttgatgataacattcttcgaaactttgctttgttccttgatgatagcatttttctttggccgcttgctttgtcaagtgaaaattatttgcaatacatacttcgccactattgattctctcttgtaggcttttaagtttagctccaaacaacaaaattttagagctctagtttagagttctaaatttgagttaaagctctaaatagttgctgttgggcctatgcttcgtcgccgaaggtcttctaggaagaagcggctttcggctgaagctgtttgtataagatggccgaaggtccctcttcatgaagcttcggtattacaaaccgacttaaagatagaatgaccttttagtccataaaggtctgagtcaatgttgtaaacttttataaggggcatacttgtaatccctcacaggctgcgccctgtgcctataaatagtgaacagtattcctttactgttcacggattctagtaattgcaatcgcatattctggaattcaaccttttgtcaaggcagaggtattattgtattcaacgattggatatattaagaaaatat

SEQ ID NO: 34827 - DNA, 3434 bp, Zea Mays
gctgtcaatcgcctccccactgcggcagatccgcaatccgctcctccaccaccgcgctcctcacccacgccagggacaagactgtctacctccacgcccgcctcaccaactccgcggccaccgccaccgccacgcccctcccccatggtcgtcgagtccgagtggtggaaccagcgacgcatgcgcgtcgagggcgacgtgaaataggtgctccaccgcgggcacaacgggcacagtggaggtggaacgagcaccatcgagttctggttccaccgaatccaccgctcgcacaccggatccatcgctcccacatgcccgcacaccggatccaccgctccctcccccgcgatggcctggttccaccgagacaactgcggggctagggtttggattcgtgggtggagcccaaggctagatccagcagggggagggaggtagaggaggggagggaactgctggtggtcggcagtgggcgaaggcgcgacaatccaggatatggattcctgagcgtcacccacccgcccatccacgtcgcgcggtgtagtcatcccctatccgcagccgcctcgctccctctcccacaacaaatccattctcctcctcccactcgacgaggatcgcgaggatgctggaggacgtcgtcgctgtcacgcttgacgttagggcctccgatgcttgacgttagggcctctcgcttgaagaggaacacaaacagagctcatgttttttattttgctctgcattatctactgcttctctgtgggggcgttatttacagtatgtggcctgtttgttgtgttgttcctgcggaagggcgggcgggccgaaggtgtttaagaaaatgttgttgtcaacatcaacctcctggaagggccagaacgcaggcagcgcctcaactcgtcaccccatcagcacggatgattatcacgagtacttcaagcgctcattttaggaagacatcgctgcgcaagtgcctcaaggagtggaatggtgagcccctgtccatctactgaacagagaaaataccaggagcaaatgactgcatttttagttaatccttttattcctaaattaattgtgtttgttaatgcttttattcctaaaataagtaaccgagctcgggattcttcgcaatttgatttgcgagatcacccccataaaggcatcatgaatctttatgcctgtaaagacatcccactgtctctttcgttttcgataagatgttttggccgttacataatgcctgtaaggtagaatgccattgcagttgttgcatcagaaagcagccatttaacgccattgtaaagtgagtgatgattaaatacaaccacacttctgtctctcaggtttctgtacatggagtttttattgcacctcttcttccccagcaattagtacttgcagttagactaaatgaatcttgaatgccccttaactgttggctttacatggaactacttttgcatataccagacaactattttgaacttcaatatgtttttcaattccagcaattgatcgaaacatgatatatttgacatattcatgatggatttttgtatttgatgtgtcgctttttcatctatcaatgtaattcttggacataacattgcgcacaggtaccaaattcacacccttgttattgcgagttctgtaaatcatgatgttcacatgtgatggtttgattcagttcaatggttagcaagctatttgaacatgatactatagtagtgcatatttgctgtacaaatggccactgcccagctatttgcataagatattatgtttctcctgtgacattttctatgccacatacatttatatggcatttttgtgcaatttagtaccggtttttggttgatggtgtctggaggtgtgatgagacaaaaccctttgtacgtgatgaatatggactgatcagcaatgaagtgcttgtggaaaacaatgtactacccgttgtgcagccagagccttctatcagaggaactaatatggataaggatgcccctggagccatcatctcagaacccaagcatgcaaatagcagttatccgccatgtggtctctggaatattattacacaataccatatatgacgttgttcccctttctagcaagttaacagttttggacactcagcttcctgttaaacaagcatttaaaataatgcatgatgtgggtcttgctctggttcctttttgggatgaccgtcagggaaccataacaggcatgctcactgcatcagattttgttttaatcttgagaaagttgcagagaaacattcaagttattggcaacgaagagcccatttctgcttggaaagaagcaaagctacagttctatggtgggcctgatggtgctgtcatgcagagaacgccattaatccatgcaacattgatctcagggccaagaaagaagctcaactcggcatgcttcctgtttgaagcaagggcaacaaacttaccccaccagatctctgtcgccaaagcagggctagtgaataagctgtgtttcctcccggattgtcactgcttttatatttgtgcatttattttgagggaaacattttgcccaaaaaaggcctgcagtgcacgttttaaacaagtcatttgaaccaactcttatgctgaaaactgtatgtgatactgcagaaggcaacacactagcttgataggaaagttggttggcaagcataggtggactctggtgccttcatatatctatatatatattttaagttgacgatcttcgtgatgctgaaactgatgaagacctccgatgaaaaaagagacatgctgcacatgcacgagggtacttgcagatcgatgtcggctctatggacgaacactcgaccaagtcagatgaggagtatgagggcctagccatgcgcgacgtgatggctactggtccgacgatgagcagcaagctgtgagttaaagatgaactcacctgccctggagagtaacatccataggagtgaggcaaaatggctggtaccaccacaacatggacccgttcctgaagatgtccaaggaggtggtagccgacaccataatgtcttgtgtcattgtgtcaccggtcggcaacacactgcgctggtaccggcgggtgttgtgtttcttaggcgtctgcttctgtgctttgagttgtgctatagagtggttgtgccaactactgattttaaaagaaaaaggtgagctgagaatcattgttgaaaacaaacatgtaattgttcgttctcatcagttgtgccaactaccaagcatttcattgatcagaatttatcgttgctcatgagaaccaaaagtaagacacttctcaataacattggatgcaaatttctgctagcttatcttcactatcttttctcgtatcaatataacacacatttatacataatttttgtgttattatatgttttcgttgcaacgcac

SEQ ID NO: 34828 - DNA, 3890 bp, Zea Mays
gtgaatatattcgtcgtgaagtaaatcaggcaatggagaaggagcacctgctggacatgttggtgatgccgagcaatctctgaaagctgaacctgttggtgacccacaagttggagtatattcgccatcaatcagtcgtctctttcagcagcttgttcatgttcgaactatcatctcatccttcaatgggaagctgccatctgatgcttggttcaatcatgtaaaaaatttgacctcagatgcagaagaatctctcgaatatctgcactacaagatgatgctggccaagcttggggttgggatagagttcaagaaagtaatgcccaatgtgtcagggacttgttccaaaacaacagctttaagcttcatgcacttactagcttcacaggaacttgtttttttaccagttaccgacaaattggagggccttcgacctggaagccctggtttgactggtgtagttcttggaaactacagtgagatattgtcacttagttcttcggtcatgcggtgcatccttttgtgtcgtggcattttaggcattattaacatagttaacatgaggcttaagaaggatagtctggaacttcctgcatttgcttttgatgatctgacatatgctggtcagaacaagggaactggaatgaatgcgcatcgtgtgccggcacacatgactgaccctatatatttgttgcctatgtttatcaggagtcttttgtgtttggatctctcaaactgcagtggccttacacagctgcctgcttccattggcaacctttctaatctggttgcattgaacctctctcactgttattcccttcacacactgccggcgtcagtaggaagactgaagaacttgcaaattcttgttctttcctgctgccatgaactaaggattttaccagtgtcactttgtgagctttccaagctaaggttgctggatttagcaggctgttccggccttcaaaacttacctgcttctttagtaaatctttgcaatctagagattctgaacctatcatattgcaaagaactgaaggagcttccacaaccatttggtaacctccaggaactgaagtacttgaatttatcaggcagccatcgggttgacttggatgttgagtgcctatatacacttgcaaatttgaagtccctaactttgtcgccgcttacaaatattcaaggctttcctggttccttcaaagatcttgcgaatcgcttggatagtttaagattgtggaagaaccagatccatccccagtgtggcccaaaggctgtttctttgcattcatataggtgttatgagcaaagtatcattgacatgttactttctgatgaggctgacaatagtagcaaccagatagtcacttctgcttgcatagttggtgaaagtggcatgggaaagactgagctagtccatcgaatttacaataaccgaatgattttggatacctttgatttgagaatatggctgcatatgtgtgataaaaagaggctattaggtaagatagtagagctcactacttttgcatcctgtggtgatgcctcaatcagtgttcttgaagaaattgtaatagaagaacttgctagcaagaggttgttacttgtactagacgattctgaaatcaaggaccagtatttctggggttatctatggaagctacttaatgtttgtgcaaaaggaagcgctgtcattgtaactaccaagagcatggtagatgctaaccagactggagcaatgcaaaccttttacttgagtcctctatccaaagaagaatgctttatgattttcaaggaacatgtgcttgaagatttagttgtgaataattactgtcagttagaaagcattggctggaagtttgcggagaaatgtggtggcaatccaatgtgcattaaagccctaagtgggttgttatgtcattctgaagttggattgtctgaaattgatatgattgttgatggtatcttaccagcattaagattatgctacgatcttttgccagcacaccttcagcagtgcttcaaattttgttccctattccccaaagattatatttttgtcaagcaccatatcatccgattatggatagctgaaggcttagtcttctgtgaagaaggtactaagccagaagatactgctctgcattattttgaccaactattctgcagatcatttttccagcgttctccatttcatagtgatcataaagatagctttgttatgcatgagctatttcatgatctggcacactctgtttccaagaatgagtgcttcagatgtgaggaaccattctgcagcttagctgaaaatgtttcccacctatcccttgttctttcagattttaagacaactgcactttctaatgaagtaaggaatttgcagtcttttctggttgtcagaagatgtttcccagtggtgagaatttttactttggatgatattttcgtgaaacatagattcttaagggcactaaatttgagctatacagacatactagagttgccaatttctattggaaacatgaagcacctgcggctcttggctctcaacaacaccaagatcaaaagccttcctattgagataggacaagtaaacagtcttcagacattggaactgaaggattgttgccacctcattgacttaccaggaagcataagtaatttggcaaagctgcgacaccttgatgtgcaaaaagaatcgggcaacattattgttggcatgcctcatggtataggatatctgacagatctccaaactctcacaatgttcaacattgggaatgatatgttgcattgttcgatttcagagttgaacaatctgaatggactaaggggacatgttcatgtaactaggcttgagaatattatgacagccaatgatgccagagaagcaaatatgatgggtaaacacttgctagaggctttgacactggagtggtcttaccaggatgaaggcatggacgatgacatgggcaaagaaattgctagtgagattcttcaaaatcttcaacctaacagcaacattatggagcttatcattcgaaattatgctggagatctgtttcctgtctggatgcaggacaattacctttgcaagctcacctcagttacacttgataactgccatggctgtagtgagctcccttaccttggtgatctaccatctcttaaatctctcttcatacagagaataaatgttgttgaaagatttggaatcgagaccagttctttggccactgaagtaaaatatcccactagatttccatcactggaggtgctgaatatatgcgagatgtatgatttgcagttctgggttagcacgagagaggaggattttccacgactctttcgactttctatcagtagatgcccgaaactaaccaaattgcctcgccttatttccctagtgcatgtgtcatttcattacggtgttgaactgccgaccttctcagaacttccatcactggagtcactaaagatcgaaggcttccagaagattagatctattagtttcccacatcaattgacaaccttgaataagttggaaattattgactgcaaagagctgttatcaataaatgcctattccttgtctgtttcaaattttaaagttgtcaggtgcctaaagcttgatttggttggaagttcaatggaagaccatatcagccacaaagtggttaatggaaggaatatcctgacaaggaagcatatggtgctaaaaactttgacccatacaaatctcttggatgatggcagcaagtgggaaaagtttggagaaaagaatatatttggctacatattcccaaggtgagaacataatgtgggaatgtagagagactactaaaattttagactgtttacatcagtttcatcttttgagttgccttttg

SEQ ID NO: 34829 - DNA, 2835 bp, Zea Mays
tcgccaactcgccaccatgcccgcgctcctcccgtcgtctttgactctttcccctttcctcaagcctccttccccaacccgaagccccaccgcctcgccgcagccgccaccacgagtcccgagtcacccaacgcggcccccaatcccggcagcgtccgcctccgccgcctcattgcccgtgaggacctcgccggtgtcgcgcacctcgtagagcgctccgtctcccgcgacgggaggcccccgacgtctacctctgcaccaagctcatccgcaacctctgccgccggggccgcactcccgacgccgcccgcgtgctcctcaccgccgagggctccgggtcccccgtcgacgtcttcgcctacaacaccctcgtcacgggttactgtcggtacgaccacctcgacaccgcgcgcaggctcatagggtccgtgcccgtcgcgccagatgcctaaacgtacacgccactgatccgtgggctatgcgacagcggcagaccggtagggtcgccgacgcgctcagcctgctcgacgatatgctcctctgcgggtaccagcccaacgtcgtacgctacattgtgctccaggaggccatgtgcaagaacagtgggttcgagcaggccatggcagtccttgacgagttgcttgcgaagggatgcacacccaacatcgtcatgtacaatgtcatcaccaatgacgtgttcagggaaggctgcgttgatgatgccagggagatcttgaatagattgtcctcttacggttacgggttccagaccaacactgttagctataccaccctcctgaagggcttatgcgcttctaagcggtgggatgacattttggagttctttgtcgagatgatggagaagaactgcatgccaaacgaggtgacatttgacatgctaatcatattcttttgtcgagtaggtatgttcttgaacgaatgacggagcattggtgtgtaccttgtgcaatattgttataaactcaatttgcaaataaggccgggttgacgaggtctttaaattcttaaacaatataggttcctacgggtgcaatccagataccattagctataccacggtcctaaagggctggtgtcatgctgagcgatggaatgatgccaacgaacttttgtaagagatggcatgtaacaattactaccctccaaacgaggtaacattcaatacatttatctgcatcttgtgccaaaaggggttgatcgagcaagctattatggttactgagaaaatgtccgagcatggctatatagtgggtgttgtcacatacaatgctcttgtaaatggattctgtgagcaaggtcatattgacagtgccctagaactgtttcgcagcatgctctgcaaacccaataccatcacacactactttgctgacaggcttgtgcaatgctaaatagttagatgctgctgcagatctcgtagctgaaatgcttcgtaggtattaccctccgagtgactttcaatatgatgtacttgcgagttttttctgccaaaaaggatttcttgagcaagcatttgagctcgttgagcagatgatggagcatggtcgcaccccctaacctgatcagatataatacatcacttgatgggattaccaagggttgtagttcagaagataccttggagttgttgcatggcttggtcatcaagggagtatcgccagataagatagagtggaagaggtcattcaaatgttatctctcaaaagaagatagagtcgaagaggtcattcaaatgtttcacgtagtgcaagatattggaatgagacacaaagttgtggtgtataacaggatactacatggtctctatagaagatgtgaaatagataatgctatcaacttttttcctatatggtattcaatggatgcatgcccaatgaatcaacctatattatacttattgaaggccttgatcatgagggtttgttgaaggaggcccaagatctactgagcgtgttgtgttcaagaggagttgtaagcaaagacttaatagaagagtaacactaaggttgacgaccaaactgtgcataccctttgggtcctgaaaatcctggcattaaatgcttattcgttattcacagtgagtcgattgatagcctcgtgtcattcaaggtgcagtgtttcatgtagatggttgtttgagggcccataacatctcgtacgaaggaatcttgacaattggtggctgattatcaactttggtggagatgttacaagtacgacactaatcaacaattcaagatgaaacaaacccaatgaaatcatgatgtgcaataacctttcctccaggttagggcattcaggtatgcggtaagcttttatccttccatatcagtgcagacttaaattggttggtaaactattaaactgcatgagatgctgagctgaagaaatatcattgctcagatagtaagaatcaaatgtctgatctaggacgtgttgggggcatgagtatcaatgccgtgattttcagataagctgggttctggcccttctggatgtacaccggctttgacaaaattttcagtactgtcccaggaagagtgacaagtggcttatgacttggtcaagcatggcatggctctagagacaggcgatgagagtacctggaatagtatttgtagggtttgtacagaacctggtggctagatattttcctagtacaccagtggaatgaaaattcactttcatttacattccttttagaaaatagtcaaaccattatatattgttacttcctcctatcgtaagacaagtccatctcaatttatcataagtctgacgttgtaactttgaccatcaaaccatcaatgtctg

SEQ ID NO: 34830 - DNA, 997 bp, Zea Mays
aacaattatacttgtctgctgcattgacagctcgagaagagggttccagactcgatagcattcagttgctacatttttacttgttctggtgcattgacagctcgagaagagggttccagactcccttgtgctaaaatgtcatctgtctggtatataatcttataaacatttagaagggatattcttgcaaaaccttcatgtggttattatttatatatgtattaatttcacagttctttaaacaattatactacagtattaatatattggtcatgaatccttggtgctaagggttcaaaaatccacttggtgttcaattactacatacaatgtgaagatagaagctacattttgagtttgttaaattaatttcattttttgctgcaattttaacttactatatatgctgcaaacactgcagattttatttcgcttgtgggcaagtggtgatgagagtttgtctctatcggcaactgtttggatcactgtttaactaaatcctacaatacataccttgccagtaccaatcttgtgaatgacagaaacacaaagcatatttattttctgatggactgcctgtagagctgtattctcttgatgttcagaaatcatatgagagggcaataatctccgtggagcaactgaatgctattcttagacaggcttctaaaaccaaggaaaagtgtcatagggcctcattaggtatatatattatatcttctccaggcagatccttggggccttcttgattattattaggtccttcttaagtattttggagaactggagactgggacccttcatccaaataggacccaaaatgtgtccggatgcgttgtattattacacttcccgatgtataatgaattccatctaagtcaataagtgtcggcgtttcgaacccggggggtccctggaccgacgagtaaattatcgccgcgtgccccagcccagatgggtcggcgcgagacggagcgcgaaggggggaagaagccgg

SEQ ID NO: 34831 - DNA, 1124 bp, Zea Mays
gcgccgcgcgtctctcgtctcgctcatcacaagggcaagtggcgagcagcggccgggcgcacgcaacccatgaaaccacaagcttgtcacgggagatcgatgccaaagcaaaccggagtgaaagcgaacggaaatctagcggacgacgagaccgcgattaggaggaattggaccgtccgcaacggcgacccgctcgtgcacctccatatccggcagccggcaccacggccacggccgcgaggaggcgaagaacgtcgtctggtcccgcaccggatcgctaagctgtcatgggcgtccgatcccgaggtgttctacatgctcaacgccgtggcccggcagaaagagctgtgcgtggcgatcaacgtgtgctggggtgaccagagggagaaggtgtgcgacgcgacggaggacgggaggagctccatctcgagtcgctcgtcatggctagccgtggcctcggccagatccaaagatctgcaagctcatgaagtactgctactgatagctggtttccttcttagttatggggagtgctatatgcgattagataggaacagatatcagaacactaatagcgtgtttggtttgcaagatgaccggtctgaaataatccgattcaaacaccgaagctgctggaactgtttggttaacgtagtggagccaactcgtccgtcacaaacacgttcagcaacataccaaatctgcaggttgggtcggttcctccaatttcgccagacaagtatgacgagtgtatgctgaacgtactcaaccctacaaccaaacacgttgtaaaagatgcacatatttgcactagtcactctatgaatttcaaattgttgctgtaaaaaattggaatcagacactgaaaatccacgctgtgctatgttctgttactgtttttttttaaaccatgcacgtcatgctgcaggagacgaaaaattgggacgaaacttgggtccagataaactgacacactgaagccgcctgaaactctgaagcagactaaaagttttcagggagcaggggaacttcagttctttattgcccaacggaagctacagaacgcatattacgtatataatcctctggttcataaggttacaaagctattaaaagggcccaaa

SEQ ID NO: 34832 - DNA, 212 bp, Zea Mays
ctccgacttagcccctcaagtggaggttctcgcaggagctaaagaaagaaaaactaaagaatgttgttgccaataaaagaactgcaagaaaaaaactgaacaaaagctgcaggatgagctgcagaggaagaatgaagaaacaatccaacggattgagacggctcaagagacgacaaaagatgaacttgttgcagctgttgtaaaagagaaag

SEQ ID NO: 34833 - DNA, 2708 bp, Zea Mays
tttttccgctaaagaaaagcaccggatccattttcctctcgggggagcggattgggtagttgcctgcttattgactagttcttggcgtggcggctaactattgtgaattttgttttagtctgtcctgttggcttcttccttccgcttctcctttctggccgccgaaggcaaaccacgcggcttgttcttattgaatccatcaaggacgcaggaaagataggatcttcggctccgattctcggagcaacagcgcgaccgcagcgggttttggtgcttcctttctttagggttgtgtccttgcagaagttgctctgtggaatggggacctgtgggaggagagttctgggggtatggtttttcttctggttcttgttgacacttgagcagtgcacatccctgaatcgtgaaggtgctgctctgctgagatttaaggcggcgatcgaggcagacccatatggtgctttgttggactggaatcaagagagtttgagcccctgtacttggtttggtgtggaatgctccgatgatggactagtcatgtctctgagcttagcaaatcttggtctaaagggcgttttgtctccagagcttggaaagcttatgcaaatgaaatctctagaaataggagacctgcaggatctaaaaatgttggatctgggatataataatttcagtggatcaattccatcagagctacaacacatattatcgctagaatttctatttcttgaaggtaacagactttctgggcgttcaccagttggagtacaccaactcactaggatatgtgaacatgaaaatcaagtacctaccactaccacaaggattgttacaatcaaaatcagaagactgttaatgagcaaacaaaaagattttaaaatggtcaatattacggggcatccaataagatttccattgaattctccggcagcaccatctccttctgatcccattccaccccctcccgcaccaccatctccttctgaacccattccacccccttctgcaccaccaagccaagagaacaagagcaaaagttctgcaacactatatgcatcgattggagcagttattgttttttttatggtggcctcgtcagcactatgtttcttttactactgccgcaagaagactagcactgttgtacctttgtctgcaaacagttcaagcaggcaattgcagaccactaccatggaagggataactttattcagacgatctgagcttgaaacagcctgtgaaggtttcagcaacataattgacacactacctggatttacactgtttaaaggaactctcccatgtggagcagaaatagctgtggcgtctacatcggtggcttatgcaggaggttggtccgctatagatgaagcacattacatgaataaggttggagctttgtcaaaggtaaaccataagaatcttttgaaccttgtgggttattgtgaagacgaaaaaccattcattcggatgatggtgttcgagtatgcttcaaatggatcactatttgagcgcttgcatgttaaagaagcggagcatctgaattggcagtcacgcctacggatagctatgggagtactgtactgcctgcagtatatgcaccagcagaacactcctgtaaccctaaagaatctaaacagttcatacatatacttgactgaggacgatgccgcaaaggtttcagacatcagcttcagcgttgacaagagagaagatgatgagtatgatgctcctgatgagtatagcacagtgtataagtttgctttgctactgcttgagaccatctccggaaggcgtccatattctgaagacgatggcctccttgttctatgggcacgcagatatctcacctgcgctagcccggtgatgggtatgattgatccaacgctaaattcagtccccgaggagcatgccagagcattatcagagctgattcggttgtgcctaagtgaggaccgaaggcagaggccgacaatggcagaggtcaccaagaggatgcaagagatcactgggatcactcaagatcaggcgattccgaggaacagcgcactttggtgggcagaacttgaaatcatgacatcatgaagcctgtcgactgtgcaactgacttgccccgactctacagctcagtccatcttctatgagaaccgtaggaaattgtacagtttacccttttttaatacaaagatacacagctcttctgtgtcgagaaaaaaaaatgtgtacagtttagtatttttaagcggggcataagttgtacagcagtacaggtatacccagggtcacaattcttccgttctttttttaaccaaatatttattttgttatttgttccggggtcaattctttcattctttttgtagccaaatatttatttcattatttgttctatggaaagcaaaacaatctgagaaagcctgcaaagtatttaggcagggcataagttgtacaggtatgcccgggcacacaattcttttgttttttaaccaagtatttacttcattatttgttcttggaaagcaaagaaatccaagaaagcctgtgaagtacaaggatatgccatttgtgctgtgaacagaaaacaactggaacctactgtagctattaactgaaacagtcgcagccacagcaagctcaaacgaccagcattgctggatccattttattgaaatggcaatcgctggtttgtcttttttttttcttatata

SEQ ID NO: 34834 - DNA, 2400 bp, Zea Mays
cgcaaaacccctgtctctctcctcactgatcactcttcttcttcagactcagagccatcgcgccgcggcatcctccctccgttcctgccccctctttctctagcgagctccttttctctctcctagagaggcttctcccttcctcctcgcttgcccccattgcctttgggctatatagagcgggattggattggaaacggagcccccggcgagtttgaaacccaaccaaaacccccacctttctcgcctcgtactcgcgcgctccccaccgcctgccaccgacgccgcgtctggtctagaaccaaatgccgtgagatctgcgcgcgtgacgccttcccccgccggagactccctccgagctccgggccacggagcgcttcgtcccggatccctctggtggctcagggcaagtagaaggaaaaggaaacaagcttgctgcgtgtgacctgcagaccccaagaggatggatcagtatgaggtgctggagcagattggaaaaggagcatttggttctgcgcttttggtgaggcacaaggtcgagaagaagaagtatgtgctcaagaagatacggctcgcacggcaaaccgaccgcacacgccggtctgcccaccaggagatgcagctcatcgcgactgtccggaatccattcattgtggagtacaaagattcatgggtggaaaagggctgctacgtttgcattgttattggctactgtgagggaggagacatggctgaggttatcaaaagagccaatggaaaccatttctctgaggagaaactttgcaagtggctcgtgcaacttctcatggctcttgattatctacatgcaaatcacattcttcatcgagacgtgaagtgctctaatatatttattgccagagatcaaagcatacgccttggtgactttggccttgcaaagatattgacatcagatgaccttgcctcatctgtggtagggactccaagttatatgtgcccagaacttcttgctgatataccatatggatgttgcatttatgaaatgactgctctcaggcctgcatttaaagcttttgacatgcaagctcttattagcaagatcacaaagtcgatagtatcaccattgcccacgagatattctggttcctttaggggacttatcaagagcatgctacggaaaagtccagaacaccgaccaagcgctgcagaactgctaaagcatgtgcaccttcagccttatgtgcttcaggtccagttgaagtccagtccctctcgcaacatgtctccaatctatcaagctctgacagacaaagttaagaagatgacatttcctagtgatataactgattccgccagaagagtggcaagaagaaactcgcttggaaatgagaggactgtaacattctgcaaaccctctcctgagcggaactctattagctctacacggagcatcaaagaatatacaactacccagagtgtcaaagagctatctgttgacagcagtcaaattgatgatgaggttacaagtaaagccattagaacaaagacaacaggcattctaaggacgcccaagagtaccccagccaagacattgactactagaaatcggttggatcctccaaaaacttcttacagcagaacaaaccatagtgagttgacctcaagaacacctctgaacaagagtgctgtgacagcaagaagagcatcgctcccgctgccgacatacagagcacccaacagccgtgccgccagcgtccttgaccaactggactccccagacgtgtccgtcaacgcgcctcggatcgacaggatcgcagaattccctctagcttcatccgaggaccccctggcgcccatgaagaagaacctgtcctcggcgcccggccacgacggctcatgctccacgcctcccttcatcaaccggtccatcacgaaggacaagtacacggtgcaggtgctgcacaggggcgacggggacaacgcgagcgactcgtcggggcgcaacgccaccgccgcgtcgagcggggggtccaacgactcgaggcagcagcggttcgacacctcgtcgtaccagcagcgcgccgaggccctggagggcctgctggagttcagcgcgcagctgctgcagcaggagcggtacgaggagctgggcatcctgctgaagccgttcggccccgagaaggcgtcgccgagagagactgccatctggctcaccaagagcttcaaggagacggcgtcatagcggagggagggagggagggagtcatagcggagggagggagggagggagtcatagcggagggagggagacgtagctgccagttttgtaacgtgcaatgtagttcaggtagtttaagctatgttaggaccccccaggtgtaggtgctggaaggaaggcaacaccagctcagtgttgcccta

SEQ ID NO: 34835 - DNA, 1983 bp, Zea Mays
gtctcccctactcgcttacgctaccaccggccgctgtgcgccgctgccacaggctcacccgtgtagtgcagcagcaccacacaccgaacctagaggacgactggccgctgctaaacctggggcccttgttggctgtctcggccggccggccaagagggagccatgctgctcgagcctgcaaggaagaccgcaatacagagcttcgccactgccagcgcgctggccctggagcggaggcaagaggggtgactacaaggagcttttcgtcatggcactgcctaaggacggctgcctcgatggtgccaagatcacagaggtaggaggggtcggctacaaggagcttcttgtcatggcgctgcctaaggacgacagcatcgatggcgccaaggtcgcagaggccatcggcgtcaagctgccagacgtcgggggggccataaggactattttgaatagcagagaggccagagaatttgccagtggggcactagctggtgctatgtcaaaggctattcttgcacctctagagactatcaggacaagaatgattgtaggagtaggacctaggcacatttttggtagtttggtggatatcatccaacaaaacgggtggcaagggctttgggcagggaatacaatcaacatgctccgcatcattccaacccaagcagtcgaactcggaacatttgaatgcgtcaagaggagcatggcagaagcacaagagaaatggaaagaggacggatgcccaaagatacagcttggtaatatgaaaatcgagcttccacttcacctcttatctccagttgctattgccggtgctgctgctggaatagctgccacactggcgtgccatcctctcgaagttatcaaggatcgcttgactatcaaccgagaggtttatccaagcattggccttgccttccgcaggatctataagacggatggtataggtggtttctatgctggcctgtgtccaacgctgattggcatgattccttacacaacatgttacttctttatgtatgacacgatcaagacctcttactgccgcttgcataagaagtcgtctctgagccgccctgagcttctacttatcggcgctctttcaggtcttactgcaagcacaatcagcttccctctggaagtagcaaggaagcggttgatggccggcgccctgcaggggaagtgcccgcctaacatgattgccgccttgtcggaggtgatccaggaggagggcgtcatggggctttaccgcgggtggggggcgagctgcctgaaggtgatgccgaattctggcatcacctgggtgttgtacgaggcatggaaggatgttcttctggctgacaggaacaagccacgctctttagcgaactaaacaggccgtccttgagcaatggaggcgttgctgggattcctgatctattttcagttttggaatcccggctgcggcgagtggggtacatagggcgcgtttctctcttttttgattgactgatgagtggtaagcgttttgttgtgtcatcggcacacagacaaacatcattaatgtgtcaaaaaactaagcgaaaagacaaacccttctgtatttcctgagtggaaagatggggaacctaaccctacctggagcctctgcaggaaccttttccttcatctaccaatcagatacagggagcttcaggttgacagatcgcaccaactgaaggacgaacctgttctgcgacaacaagcaggataagctgaggaacctgttttgcaagctaagttgagatgtaatttttgtcttgggctgggtggttatagtgttttctttcggcttttcttttctttctgcctcaagtctgaagcgaagtttataaattatttttcctcggctaatataatttgggtggcaaagcttttgccgcttccttaaaaaaagagtggtaagcattttgttgtgtcatcaattctgaattcttgtgctgttataagaaaaaaggatttggg

SEQ ID NO: 34836 - DNA, 1185 bp, Zea Mays
gtagaaggcgaaagaaggtcggaccaatggcaagataagtgtctcaaaaagaaaactagttactacaaggcaaggatattttgtctcttcctcctccgatcgaagtgtgcttgcgtcctgatcccaccaaccgcagaggacagaggaccatggagagcggcacggagcggcggcggcggcggcaccacttcgtgctggtgcacggcacctgccacggcgcgtggtgctggtacaaggtggccacactcctgtcatccgcgggccaccgcgtgacggcgctggacatggccgcgtgcggcgccagccccgggcgcgccgaggaggtgccgtcctttgaggagtacagccggccgctcctggccacggtggccggcctggcgcccgaggagaaggtggtcctcgtcggccacagcttcggcggggtcagcctcgcgctggccatggagcagtacccggacagggtcgccgtcgccgtcttcgtcgcgaccggcatgccctccgctgggaagccgatggcgttcgtcttcgagcagtttttgcaagaagagtacccagcggaccgctacatggactgcgaattcgaaaccagcggcgacccccagcgtcccgtggagacatttcggttcgggccacagtacctgaagcagagactgtaccagctcagtcccccagaggacttgaccctggcaatggcgatggtgaggccgtcacagcggttccgagacgacgcgacgatgaaggggggtatcctgacggcggaacggtacggcggcgtgaggcgggtgtgcgtcgtcgccgaggacgacgcgtcagtgccggcaggcttccagcggcggatggcgtcgtggaaccccggcacggaggtgacggggttgcagggagccgaccatatgtccatgctctcgaaaccaggggagctgtcagaacttctcatggaggttgccaacaagtacagctgaaacttgtatcatgtaaatggctatcagcaaaatggttgttcaggtacgcttgtttcagatgaacaaatggagacggaagtttgaagtaacacgatgaaataagactagattttgtatccaatgcagttgtaactttctaaggtaaaaaaagtcaaatagagagccaaaaataaatagtcccttagagatgctcttagcaaacactacctcagttctcgaatatttg

SEQ ID NO: 34837 - DNA, 3057 bp, Zea Mays
tttttttttggctaccccctcacctcacctcgcttcaattcactgatatatatgcttgcatagacgagcttccagatgacttgaccacccccggccggccctttcttcattctttccttcctttcttcctcctgctgctcttgccgtttcagtgattattagctgctgtacgtgcgtgcgtacattgttctctctgctgacacccatacacgctgtagcttctacacataccagttcgatcgcaagctatagcatggggcttcaatcatcgcccatgctgctgccagcgccgacggcaacggcggccggcggcgggtcacagtggcgcacggctgtggcaggcccatggagttcccgcatcaagaagaagacggatgcagtcgccgtccccgcggccgccggccggtggagggcgcgggcgcgggcccaggacaccagcgaatccgccgccgtcgccaaaggttcgtccctaacgcccatcgtgagaaccgatgccgaaagccgccgcacgagatggcctacggacgacgacgacgctgagccgctggtcgacgagatcagggcaatgctgacgtcgatgagcgacggggacatcagcgtgtcggcgtacgacaccgcctgggtcggtcttgtgcccaggctggacggcggcgagggcccgcagttcccggccgccgtgcggtggatccggaacaaccagctccccgacggctcgtggggcgacgcggccctgttctccgcgtacgaccgcctgatcaacacgctggcgtgcgtcgtcacgctcaccaggtggtcgctggagcccgagatgcgcggcagagggctctctttcctcggccggaacatgtggaagctagcgacggaggacgaggagtccatgccgatagggttcgagctcgcgttcccttccctcatcgaactagccaagagtctgggcgtccacgacttcccgtacgaccaccaggctctgcaggcaatatactcgagcagggagatcaaggtgaagaggattcctaaggaagtgatgcacacggttcccacatccattctccacagcctggaagggatgcccgggctagactgggcaaggcttctgaaactgcagtcgagcgacgggtccttcctcttctcacccgcggccaccgcgtacgctctcatgaacaccggcgacgacaggtgcttcagctacatcgacaggacagtcaagaaattcaacggaggagtgcccaacgtctaccccgtggaccttttcgagcacatatgggctgtcgatcgcctggagcgtctcgggatctcccgctacttccagaaagagattgagcagtgcatggactacgtgaacaggcactggactgaggacgggatctgctgggcgaggaactccgacgtgaaggaggtggacgacacggccatggctttccgcctgctacggctgcacggatacagcgtctcgccagatgtgttcaagaacttcgagaaggacggggagttcttcgccttcgtggggcagtcgaaccaggcggtgacggggatgtacaacctcaacagggcctcccagataagcttcccgggggaggacgtcctgcaccgtgcagggcctttctcgtacgagttcctcaggcggaaacaagccgagggagcgctccgtgacaaatggatcatatctaaggacctgcctggagaggtagtgtacaccctggacttcccttggtatgggaacctgccgcgcgtggaggccagagactatctcgaacagtacggcggcggcgacgatgtctggatcgggaagacgctctacaggatgcctcttgtgaataacgacgtgtatcttgagctggctaggatggacttcaaccattgccaagccctacatcagcttgagtggcaaggcctgaaaaagtggtacactgagaaccggctcatggatttcggagtggcgcaagaggatgctctgcgagcgtatttcctggccgccgcttccgtctacgagccgtgccgagccgcggagcggcttgcgtgggccagagcggcgatacttgccaacgccgtctctacccatctccgtaacagcccctcattcagagaacgcttggaacactccttgcgttgccgccccagtgaagaaacggatggatcatggttcaactcatcaagtggaagtgacgctgttcttgtgaaggcagttctgcggcttaccgactcgttagcgcgagaagcgcagccgattcacggcggtgatccggaggacatccacaagctactgagatcagcttgggctgaatgggtcagggagaaggcagatgcagcagacagcgtgtgtaatggatccagtgctgtggaacaagaagggtcgcgcatggttcatgacaagcaaacgtgtctgcttttagctcgaatgatcgagatcagcgctgggcgagctgcaggtgaggctgcgagcgaagatggtgaccgtcggattatccagctcactgggtctatatgtgacagtctcaagcagaagatgctagtatctcaggaccccgagaagaacgaagagatgatgagccatgtcgatgacgaattgaagctgcgtatacgagagttcgttcagtatcttctgagactcggtgagaagaaaaccggcagcagcgagacaaggcagacctttctgagcatcgtgaaaagctgttactacgctgctcactgcccgccgcatgtggtagacaggcatatttccagagttatttttgaacctgtttccgccgcaaaataatggtaatggtagatgtgaatgtgatatggagataagagagagagaaaatgttgatagtggaaattggcgttgatgtcgcctccacattctttacgcaaaagtagcgtctgttttggataaaaaaaatccagtttctgtaaattatagaataaatcaatcgctgtgtcccaaactctaaaatgttattctgtgaagtatggaataaatcggtcactatacctatcttgtggatgcaatccagatcctgaagttctaaaatatcgtttatgcgcttcatgaacttgtctccagtttggaactct

SEQ ID NO: 34838 - DNA, 2587 bp, Zea Mays
ctcctcgcctgtcaccaacagcagggccccacagtgcccgcgccaagagtgtccacttcaaccctagctccacctgcatctcccctcccgcccgcctccctccgtccactcggatccggaaaaccctaaccctagacgtcgcccggccgccgccatggaccccgacggcgacccggccttccaccgcaacgaggccatctccgcggtccaggatgtcgaccagtactatggcgacgacgacgacttcgacgacctctacaacgacgtcaacgtcggggacggcttcctccacgcctcccaccaggcgccgccgccgctgccgccgccacctccgactcagcaggccccaccgccgcagaagcaccagctccctccgccgtcccagcagctgccgccgccccagcagcatccacctgcccacgtcctcccgccaccgccgccgcaggccccaccgccgcagcagcaggtaagcatcccgggggtggccgtccctgctcctggcagacctcccgcccagaccaacctccctccgcctcctcagccaccggccgctcccgcgccgccgccgccgcctcagcaccaccatattcagcaagacgggatcaaccgccctggagggaacatcgccggtggccccatcgtggtcgggaacggtggccctgctggcgggggtgacggccctggcggcacgacgctgttcgtgggggaactccactggtggacaacggacgcggatctggaatctgagctcagcaagtatgggccggtcaaggaggttaggttcttcgacgagaaggccagtggcaagtcaaagggctactgccaggtcgatttctatgaccctggtgcagctgctgcctgcaaggagggcatgaacggccacacgtttaacggccgtccatgtgttgtggcattcgccacaccgaacagcgtgcgtcgcatgggcgaggcacaggtgaagaatcagcaggctatggctgcacagacatcaaatatgcagccaaaggttggtagagggagcggtggtgccgcagggccacaggcgggtggtaattatggcggtggccgtggaggacctgttggacctggtgccggtggtggagctggtggaggcggtggaaattggggaagaggtggtggaggcatggggaatagaggccctattggtaatatgaggaacaggatgggcccagctggtggtggtcgtgggataatgggaaatggggggatggttgcgccgccgccaccaatgatgcctccaggtggaatgctggggcagggttttgatcctactggttacggcgctatgggaaggatgggtggtggatttggtggttttcctggtggaccaggggctatgccattccctgggctgatgcagccattcccgccagttgttgctccacatgttaacccagctttctttggtcgtggcggaatgggtgccggtggaatgtggcctgatcccaacatgggagcctggggtggggaggaacaatcgagttacggtgatgacgcagcttctgatcagcagtatggtgaaggagggagccatgggaaagagaggccaccagagagggagtggtctggtgcaccagagaggaggcgtgaaagggagaaggatgcgccccctgcacaggagtggccagagaggaggcaacgtgatgagcgtgacatggaccgtgagaggaatcgtgactatgacagagacagggaaaaagaccgtgacagggaaagagaccgagaccgagatagggagagggacagagatagggagagggagagggagagggagagggagagggagaggcatagggatgacagagatcgctatggcgattatcacaggcacagggatcgcgattcggaacgtaatgaagactgggacaggggtagatcatctgggatacgcggcaggtcaagggaggctgaccactctaagcgcaggcggatgacacctcagtagtcgtagctgggtgagctactaatgtagaggcaaacgatgatccagagccgagtcttgcttgcacactggcatggttaacagctagcatcttcttgctgcctctggctgtggtggttctaatatcttgtgtctccggcaatgtgttgtagcaagaacgagagattaattatcatcaatcactccagcgtggcatcttttgttacttgcaatttggagcctaccagacatgatcctgtttgtgttggtacttggaatgtctggttgggacctgttgagctgtgcgaagatggacttccctggatgatagttgctgcctcttattgtacgccatgttaaatgtctgagttttcacaaagacaaaaaaagatctctgttttgtgtgtaattcaggaccgatgctgttgctgttgaaaactgtactatttctgctgtaatcttatgataaaccagtctgtattatgacactgtccttttgttcatcctttctcctttgttcctggttgaagttgtctcatgttttgatggctgcagcgctagttgtgttgccagttggaatattcagaacgcgagacctctaaatatactggcttgtttctttgaaaaaacattgtatttgccatt

SEQ ID NO: 34839 - DNA, 3747 bp, Zea Mays
cgtgcatagaccatttttattctgcccgccgcttcgctcacgcggccacgcctcccgctcttcctccccgccacactcgccccacgcaggagaggaggagagccgccgggcctggaagcttctccgcggcgctgcgtcgccagctcgcagcgatttcaaggtgctggtgaatctggcttggccacatagatcttttttattgttgtcctcagaagacaggtttgctgagactgctttctgtctactgtaaattgatgaaattttggtgatcatatactatggaaaaaaagacagttcacgttctggctgagggtaatggtgagattgaaaatggtacgagctctagtcagaatcctgagacccttgagcatccagttttgctgtctgcatctcaaactgtgccaaataacttggggataaggaaaaactataaaagggcagcaaacagaggtaaaaagggttcccaaggactaacaggtcaggcatatactttgaggtcatctgatattgatgtcagggtgcttcgctctacatcaggttcaaagacaacatctactgagcatgtgcagcctccaggacaaccagctgccaagagaagaaaaaggagcagagcctcaaacaaaaattcgacagatgagttctcacaaattcgtaaacgggttagatacattttgaaccgaatgaattatgagcaaagcctaattgaagcttatgctagtgaaggctggaaaaatcaaagtttggataagataagacctgagaaggagcttgaacgagccaaatcagaaatcttacgatgcaaattgagaatacgggaagtcttccaaaatattgattctcttctatccaaggggaaaattgacgaatctttatttgattctgaaggagaaatatcttgtgaagatatcttttgtgctacttgtggttcgaaaaatgctacattgggtaatgatatcattctctgtgatggagcttgtgacagagggttccaccagaactgtctaaatcctcctctgcgtactgaagatattcccatgggagatgaaggatggctctgcccagcatgtgattgcaagttagactgtatagatctaataaatgaactccagggcagtgacatctccattgaggacccttgggagaaagtttttccagaggcagctgctatgaccaatggctctaagcaagatgaagcatttgatcttccatctgatgattcggatgacaatgattttgaccccaatatgcctgaagagcatgtggctagtaaggaagaaggatcttctgaagaggaagaggatgatgacggaggatcagactctgacgactctgacttcttaacctgttctgatgatttggaacctttgatagataaaaagaaggttgatgacctgggattaccttctgaagattcagaggatgatgactatgatccagcaggtcctgattcggataaagatgtcgaaaagaagtcaaattctgatgagtctgatttcacgtctgactcggatgatttttgtaaggagattaaaaaatctggtggacatgatgaagtttcatcgcctccattacccgatgtcagggtgggtgatatggaaaagaacactgctcagtctaacacaacaagttctgctgacgaccctatggagattgaaatagaccagagtgtggttttaccagcttccacttctcctcctcccgctcccgtttccgctcccgtcacccttgctgcaccagcttccactgcccctcctcccgctcccgttttcgctcctcttatcccacctgctcgcttccgggagcgcgatgagactgaggtgcgacctctagctgcagatcctaggttgtttgaccttcagcgtgctacagcagcacgggtacgtcggttcagatatgtacccgtggagtcttggttaccggctcagagggaccctgctgcagttgacctctttagcacccgtattcaggagtcctttttcagagcccagatgtctgcacagattgctctgcgagtgcaccggcttttggaccttcccgcttttctgctagccgccggtgctgactctgaggtgcacctctcttatctgcctggccttcttactcttttgactactagcggcaggtatgttgaggaatgggtccgagttttctacgcgactgtatggatcgaccctaatcaccactggatgaggtttcgttttgagcgagaggatgtcactatttatgccagccagattcgccagctatttggatttcacgagtcatcgactcgtcttcacagcttatgctatggcacctctgaccctcctcgtcgccctcacggcggtgttgctccgggtacagcttacgtcgcggctctgttccgaccgcccttctcagatgggtcgcgacgctcaccggcagatttcaccacaacagcaaagtttctctatcagcttatgagacggacacttctgccgcggatagggtccagggaggccaccactcatatccagctctggctccaagaagccaagatatctcactcagagttcgatgttgtggatttccttatttgtgagatcgaggacaccattctggatggtctgcgtgcacgacgacagctgccatatgctcactatctatgtcacatttttgctcagctgattcgacctccacagttccagggcacacttgaggtctcacgcctcgtctttgggtcctaccgtccagcgcctgaggatcctgtgccagcacctgctccagtatttgacactcaggccgaggatactgcccttcatcagttcgaagctcaggacacagcagttgataataatgattttgggattccgcctcctatgcctccacgctcacatgatcatgaggttgagagttctcgtgctacccctgctgcccctcctgccattgaccctgcttttgcttcgattctccagacacttactcagcaacaggctcacttggcagccgagcagacccgccaggcagcagcccatcagcagttgaccgagagaatgctctcgatgtttcagacaatacaggacaagcatgattctcttatgcagcagcttcttcaggatcgggctgagagaagggcattaatgactcttatgctacatcattctggtatattgattcccccggttcagtcagtcctgcctccacctcttcaggctcctgttgtgccaacgattcagccaggaccctctcttcctacagttggtccttcttcctctccgctccggtcggttaccctggctttcacgtcaccggtttttagctctgtctgccctcagccgtcagtgccaccagcttctgctgttcccactactgctatggcggtgtctgtgaccacttcagatccggcagcccctgcagcgcagcctcagtccgagtcagtatcagctctagcttctacagcagatcctggatccgagactgactctgaccctcagctagcgttcgctctactgcctcgaccgcgaccggatgtgcccccgccgcctcctccaacttctgatgcgtaggctcgggtacccttttggtgtttgacgccaaagggggagagatatgagttgtgagagctagggggagttagttagttagtagagagttattttgatgtaatatatgtgcttgcaattctctgtactagtttggtgcttttggctcacaaactctatatatactctcgatgcttatgttgactgtgtgtgtatattatgttttcaccttatatattatcaccag

SEQ ID NO: 34840 - DNA, 237 bp, Zea Mays
gtgtgtatatttgaaatataatgtgtacttgtgtcaaaagtttggctatgatccaactctatcaaaacaaatgatttaaatcattacatttgtgcaatgacataattaggctatctccagcagcgtcctttatattcatcctttatacccgtcatttacagtctgtacgcagcgcgtgtggcgagctgccccctccccttgcacagtgcacgtgtagggtagttttttaggtgcagc

SEQ ID NO: 34841 - DNA, 2296 bp, Zea Mays
acagctgcgtgcccacccgatcctcgcttgacaccggggaaatccacggcctgctgctacagagcatcgccgctgagcacactggggtgacagtgacaacccgtctccctctctctcgccagatccccctacctccgcgtctctctgtctactttttttttggggagggggggggggggggggggggggggggatccgcgtcgaggcgaggtctgctctggtcacctctggcgatcctccttcgcccattgcctccgccggtcaattcccttcgctggtactcagagatcggcgccctcctcccgtcttcccacgcttgcgggcactaactcagagtagtgtcgctcaatgaatttcctctaccgaactacgcagcctgcagcgactgagctgccaagaatttcagagcaagatcacaggaatgccttacaaaagacgacttcgacactggagggtctcattgcggacgattcacaccaccagccctcctctgcccacatcgaagatggagctgctaataatgggtccagggatatcagtggggattcttcatctgttgatttgaaaagcccagtcccactggggacacatgccgatgtcatggaagacgaaggatggatcacaattccatgcaaggcacttcctgaaagttggaacgacatatcagaaatggttcagttgcaggctctggaccgttccttcctttttccaggttcctatactggcgtgcctgtcagcttctaagcaagatgtacaggttatatccccctttagaattgctgcagtaatgtctaagaatggaacttctatgcaaaactttacaaataaatctagccctgtcagtgcaaatggtcatgataatggagcagctggagaaagtggctatcaggatgttgaacccaatggtgaagcatctccttcaggacatgatattttggagactcaatctctccttcagatggaggatcataagcagcagatcgaacatgtgttgcgaagatttagagaatcaaatttttttgtccggattgcggaatcagtggaacctctatggtccaagaaaagtgtaacttcaactacgatggcagatgaacgatcagataaccagggaaatagtaagagctcaaggagtaatgtttataataccatttctgataaaggggtttttgatggtaacacatctgggggagttgctcgagatgttgtcaagtgttattctctgcaaaatggagacatagtggttgttttgcaagtgaatgttagcgttaacaaattggaagatcctgtgcttgaagtccttcagtttgagaaaacctcttctgttcagacaccaaataatataagaccaccaccaatatctgaaagtcaagaatttatgcctgaaaaacctgcaaaaaccccagatattataaatgatgggcaactttcgtttagaggagttcctttagaacctgaacggtattctaatattgctcctactcatgcaaaagatatagtcgtattcatcgatgcaattactattgtatttgaggaggcatccaaaggaggtgctcctttgtctttaccaattgctagtattgaggttgggcatggtcacagcttgccaaacctagcactcaggaggggcgaggaacactcttttattctcaaaccagcaactatgtcctcaagggaacggaagaccaacagtcatgcacctctggccttatcactcccaacgatgaccggtgctactttaaatactcatacaccaaaggctggtgagccgtatgctgatctaagcgaccaatatgctgtactgatactaacactcgaagctactaatatgacatccgaaaaccttacattaactgtccttgctcctgaagcatctggttcttcttcagttgtatccttgaactcatctccaaccaccccaaatggttcttttgatggtgttaatgagtcatcaaaaagatctgggctgggaaaagatggaattggctttcgaagattgaattctgtcctagctactccaaaagaaggtgataatggaggaaacagaatgagtaatgcttcaggctgtactcatctgtggttgcaaagtgcagtgcccctagggtgtgttcctgcccgctcaagcaccactgtcaaacttgagctgctaccattatcagatggaattatcacacttgatactctgcaaataaccgcaagggagaaaggccttgcttacattccggagcactccttggagatacatgccacctctgtactggaagcagaatcccagatcatggcccggattgaacggtag

SEQ ID NO: 34842 - DNA, 1289 bp, Zea Mays
cgcgtcggggattgacctcgcctcctcttcctctctcaccggcaccgcccggcaacccggcttccaacggccgcgaccgaaacgggacccaccagacgcaattccccaacacggcaacacgtccgcctcgacgaatttcgatcgattccaacttgggatttccgccttccaatcgctccgtttccttcgtattctagaatctagcatttggtttgattccgccgcttggtccggccccgaggaggaggcaagggagggagcggtggccgcgcggccatggcgggctcgtctacggcggcgatggacgcagccgcggcctggtgggacgacgtgaacaactccacgctgtggcaggaccgcaccttccacgccctcgccgcgctatacggcatcgtcgcagtcgtagccctagtccaactgataagaatcgagtgccgggttcctgagtatgggtggacaacgcagaaggtgttccatttcctaaacgtcattgtcaatggcgtgaggtcaaccgagtttgtactgcggcgggatgtgcaacttgtacaccctgagatacttcaacacgtgcttattgatttgccgggcctagcgttcttcacgacctacgctctgctagtgctcttctgggctgagatttactatcaggcacgtgcagtgtcgactgatgggctccggccagctttctacacaatcaatggaatgatatatgtcattcagatactactgtggctgctcatgtggtggaaaccagttcaagccgtggtaattttgtcaaagatgttctttgcagctacatccttgttcgctgcctttggtttccttctctatggagggaggttattcctgatgttgcagcgtttccctgttgagtcaaaaggccgccggaaaaaattgaatgaggttggctatgtgaccaccatttgctttggttgcttcttgatcagatgcataatgatgtgcttgagtgcttttaacaaagatgctgatcttgatgttctgaaccatccaatcctgaacttcttttactacctgctggccgagattgcaccctcatctttggtgctgttcatcttaaggaaactgccgccaaggcgtgggattgcacaataccatccaatccattagatgaatttgagcgccaccctaaaccctacttccaaaattgatctctcaaaatcagcagctacctctggttcagctggcgcagacagaagtatacaggatacgacgcgcaggaagatacggtgcacgagcctcgcagctgattgcacctagctgataatctg

SEQ ID NO: 34843 - DNA, 2594 bp, Zea Mays
gtgccagtaggtggcggggctgggggcagaccggcaggcgaggcctatgggcgggcagtgctgtgagttagagcagtgtggcaatgttggtggtagtggtgacacccttcgggagcggaaggaggctggaacttcaggcaaactcttctggaagaaaggtgtctaaaactatgaacgggttacagaaagcatcgcaattagccacaagatcacttcgggaggcaagtgcgatttcgatctcgcagccaccttttttttgttctgttgtgtatctagtagttggaggagatatgcagtttgcacttgcattggacacgaactcaggtcctcaccagataagatcttgtgagggtgatgggattgacaggttggaaaaattaagtattgggggcagaaagcaggagaaagctttgagaaataggtgctttggtggtagagttgctgcaactacacaatgtattcttacctcagatgcttgtcctgaaactcttcattctcaaacacagtcctctaggaaaaattatgctgatgcaaaccgtgtatctgctatcattttgggcggaggcactggatctcagctctttcctctgacaagcacaagagctacgcctgctgtaagggataacactgaacatccaacgttgattactctattatagtattatacagactgtacttttcgaatttatcttagttttctacaatatttagtggattcttctcattttcaagatacacaattgatccataatcgaagtggtatgtaagacagtgagttaaaagattatattttttgggagacttccagtcaaattttcttagaagtttttttggtccagatgttcataaagtcgccgctttcatactttttttaattttttaattggtgcactattaggtacctgttggaggatgttacaggcttattgatatccctatgagtaactgcttcaacagtggtataaataagatatttgtgatgagtcagttcaattctacttcgcttaaccgccatattcatcgtacataccttgaaggcgggatcaactttgctgatggatctgtacaggtattagcggctacacaaatgcctgaagagccagctggatggttccagggtacagcagactctatcagaaaatttatctgggtactcgaggattattacagtcacaaatccattgacaacattgtaatcttgagtggcgatcagctttatcggatgaattacatggaacttgtgcagaaacatgtcgaggacgatgctgatatcactatatcatgtgctcctgttgatgagagccgagcttctaaaaatgggctagtgaagattgatcatactggacgtgtacttcaattctttgaaaaaccaaagggtgctgatttgaattctatgagagttgagaccaacttcctgagctatgctatagatgatgcacagaaatatccataccttgcatcaatgggcatttatgtcttcaagaaagatgcacttttagaccttctcaagtcaaaatatattcaattacatgactttggatctgaaatcctcccaagagctgtactagatcatagtgtgcaggcatgcatttttacgggctattgggaggatgttggaacaatcaaatcattctttgatgcaaacttggccctcactgagcagccttccaagtttgatttttatgatccaaaaacacctttcttcactgcaccccgatgcttgcctccgacgcaattggacaagtgcaagatgaaagatgcatttatctcagatggttgcttactgagagaatgcaacatcgagcattctgtgattggagtctgctcacgtgtcagctctggatgtgaactcaaggactccgtgatgatgggagcggacacctatgaaactgaagaagaagcttcaaagctactgttagctgggaaggtcccagttggaataggaaggaacacaaagataaggaactgtatcattgacatgaatgctaggattgggaagaacgtggtgatcacaaacagtaagggcatccaagaggctgatcacccggaagaagggtactacataaggtctggaatcgtggtgatcttgaagaatgcaaccatcaacgatgggtctgtcatatagatcggctgcgtttgcgtctacaaaacaagaacctacaatggtattgcatcgatggatcgtgtaaccttggtatggtaagagccgcttgacaggaagtcgagcgttcgggcgcaagatgcgttgtctggcatgctgttccttgaccatttgtgctgctagtatgtactgttataagctgccctagaagttgcagcaaacctttttatgaacctttgtatttccattacctgctttggatcaactatatctgtcatcctatatattactaaatttttacgtgtttttctaattcggtgctgcttttgggatctggcttcgatgaccgctcgacccttggccattggttcagctctgttccttagagcaactccaaggagtcctaaattttgtatcagatacgaaggacttcagccgtgtatgtcgtcctcaccaaacgctctttttgcatagtgcagggggtgtagacttg

SEQ ID NO: 34844 - DNA, 2655 bp, Zea Mays
ctccagaataccaaaatggcgatacgtagctacggagtaataaagtagcgaagccgcgcgacgagattgctacaatctcagactctaaactcgagtcggcaacaagagtgctgacaacacaaagcagtcaaacaatttcaccggcgggcggcggcggccaccagcgcgtcgccgcgacgttagcgcttgatccggcggcggtgactcagcccctttctctcccccaacgctcaaatgccaccgcgcgccttgcccactacctcaacacccgcatctaggcgcgtcgtctacgtcctcctcgcggcgctcgccacagcgccgttcctgctcctcctcctctacggtggcgcctccccgtctgcgctctgccccacctcctaccgcactccccgccgcctcccgtacccgtccgtgctctggtccaaggtgcccccgctcccggcgctctccacctcgccgcacccggacctccgcggctctcgctggatcgtcttcaccgcgtcgccgcacgccccgcggcaccgcccgctgcgcgcggtccccgggtggcaggtcctcgccgtcgccgacgaggctacccccgcggactggtcccacccaggcgccgtgctgctcacgctcaccgaccagggccgccttggattccgctccgtcgctttccttccggcccggggcccggcgcgcaaggcagcggcgtacctcttcgccgtacagcgcggggcgcgggtcatctacgacgccgacgcgcgcaacgccgtcctgggcgggaacctcaccaggcacttcgatgtggatctggaccagcgccacggaggcgccgtgctgctgcagtacagccacgccaatcctaaccggacgatcgtgaacccgttcgtgcactttgggcagccatcgatctggccgcgtgggctgccgctggagaaggccggggagctggatgctgaggagttctacactgagatattcagtggtggccaattcatgcagcaagggatgtgtaatggccttccagatgttgattcggtgttctacttcactcggaagtcattggagatggaggcatttgatttccagtttgacgcggatgcacccaaggtcgcgctgccgcagggcatgatgacaccagtcaactctgttaacacattgttccactcgccggcgttctgggggcttgcgttgccagtgtcagtgagcccaatggcatcagatgtcatacgcggatactgggctcagaggatactatgggagattggtggctacctagttgtctacccaccaactgtacaccgcatagataacgtgcgtggtcacccatttgatgaagagaaggatctccatgtcaatgtagggaagctgataaagttcctaatggagtggcgatccagtaagctgacactattcgagcggattcttgatctaagctatgcgatgacagaggagggattctggagtgagaaggatttgcatttcatgactgcttggctgcaagatctggttgctatcgggtatcgacagccacggttgatgtcattggagattgaccggcccagagcaaccattggacatggtgacaagaaggggtttggtcccaagaagctgccttcagtgcatcttggggttgaagagattggggaagtaagcactgatattggcaatctaataaaatggaggaagcattttggtgatattgtgctcatagtgcattgcaccgaacttgtggaccgaactgcattagagtggaggctgctttatggtcggatatttcgagcagttgttgttctttcagagcaaagcaattctgatcttgctgtggaattcagcaacttgacacaagcctacaaccattttgcgttgcaggtacttgccgaaggtgtttgatcggtttggaggtgcccaaggatttctgttccttcaagatcgtatggtcttcaattactggaacctcttgaatgctgataaggctaagctctggataaccaaccaggtgaaggaatcttggtcggatgtgcctctacatggtaacaacattgagtggtttgtgaaccaaggggatatgattaaaaaggcggtcagcaattttccatctcaatatcaagataactacaggagaagtgtaggtgaaaataatctgattcgttgcagcagtgagatattttacgtacctcaacggtacacccgtgatttctcagatcttgtaaaagttattgggagcttagacattcatcacagttttgcagtccccatgttattccttgcgatcgattcaccgagcaactttgagtccaaagctttgacaaaacttgtctacagggcagatcttccatcagatacaactctttcaacaatttatactactgaagcacatgcagtgtaccctgtgaaggttcagaacgagatggattttgtaaaactgataagggctatggctttaggagatccatttcttatggaattggtctgatctaggattgcctttttttttaattcgtcaggttggcgatagaaaacaaaacaacgagataatgtttggttcgtctttgtcctcccttcttccatatgaggatgaggataatctagtgttactcgatctcagtttacatgtacaatcagataatacaggcttactttgttgagctaaaaaacgaaattccgaaa

SEQ ID NO: 34845 - DNA, 1549 bp, Zea Mays
ctcccctctcggaagttagctgaataccgctaacgacgttaaagtcaggctcacagacggcctgtatgacccttgcctctgcctttcccttttctcctcctatccctaacgcagccgccgccgccgctcggctctcccttgccaatgcacacatgcactcgccgccgccgctcgactctcccctcccaatggcaccccgtcgctcaccatcaaatgtttcctcccctacaagtgcaagatcgccaatgagatattgatggcgctgttggtggacccacctgacatcaagagggagatgtagatggagatgcagcccgcaccaccaccatctgctgcggcgtcggcatcgcagacggcgtggccactggattggccggtggacgggcgctcgctcaatcctccatcgccgcccactatatcagtccagtatgtgagtcatattgattttataattgattttatgcgccagttcttgcctcgactaatgggtcctcttccattttgtaatcacctctgcatgtttactgtatcactttggtaaattactattgttccatgttgtcttccacaacatactgcactagttcagtggttagtttcctattcaaccatttcgtaatgaaggaggtattggtatttaggtaaatatttatttatgattgtgctggtattatctcaataggctggaaaattttaaataacctaatatgacataaacctcaactgcccatgcactcttagttgttgttttgaaccggtctttcgttgtttttcttttcaccaaaaaataaaatcttgatgatgtgtgacacacctgtttggttatatcatgttatctatgtagttcggccaattaaactatgttatcaggtataactagatgaggcaaattatatatatatatatatatatatatatatcgaaataaattgttttatgaatatccaaataaaccatatagtgtcgaagctgggtactttccattgccatcattaatggacaacaatatgctactatctcacatatattatgaaatgtttctacacgcatggagcatttcttgcagtagagcgctaggtatgctctctatgcctacgatgatttatatgaggatgacttagataaggaggtggatcacatgtcagtttcgagcaaggtgtttggactggaatgcgcacagtctgttactttgatgcaaaacgtatgaattggttggacagagccgccaacgaagtaccatgggatgtgctggacaatgaaagcttctgtcttgaaataataggatacaagaagcttgcaagtggttttgtgaaggcttttgtgaatcacttgaatcattagttcttttaagaatggttttgtaaagcgttagcaaatatgtgtaaaacacaataagatgtgtggcaaattcagtgatctagttgtacaattttttgtgtttatgggatatgtggatatttcattgtggaatgttaatgaagtgtgtatgtctatgtgattatgtgtataaaatatatgttttgtggtgcttttgtgataatatctattc

SEQ ID NO: 34846 - DNA, 2179 bp, Zea Mays
ttaattataatgctggcccaagtgttcacatttccagaacagaatctctaccaaaatctgaaaagtgtaggctatacagagaattaagaagttgtcttgacctcactggacccagagactactcgtcaccagaggaaatggtacaaagactaacatcagcttctactgtactaaggagggtgttggataatccagcactccaggactgtcaagagaataatggatttggagacatgatggatgaagatgttataaacaatatttcagttcgcttgaagttaagccttactgtttgggacttcactctcccagtgacaccttctttacctgctgtttttggtgtatcctggcaatattcctttttactgtgttctatttccatttctgtgctgtgcaactgttatgggactgggtgcaatgggctgcgcttaatgggcctgcttggcccagcagaactggcagcaacagaaggcagtgttgggattgctgctgccctagccaaaccagcagcagggacacccgatcatccgaaggctaatgaatattactctgacccaagattagcagcatatgctgtaccctatgcacctatcctatcgtgtacggatgctgcaaaaaattccctgaggagagaggttgaaatcttaaaatcgaagcctcattggtccaaagcttacttctatttgtgggatgagccattaaatgtggaacagtatgacatgatatgcaacatctctaatgagctacggtcatatgcacctgatgtgcgaattttgacaacttactattgtggcgccacctgtgctgatctggaacatcctgttggagttccaggttgtccactaagctctagagctgcaggtccaagtggctctgaactggctccctctacatttgaagcttttgcaaaagttccaaatgttctgcgtccgcacacgcaaatcttttgcacaagtgaatgggttcttggcacaagagaagacctagtgaaggatattgttgctgaattacggcctgatcttggtgaggagtggtggacatatgtttgtatgggtccttctgatcctcaaccaaactggcaccttgggatgcgtggaacccagcaccgggcagtgatgtggcgagtgtggaaggaaggtgggacaggatttctttattggggttccaactgctatgagaaggctatgatcccaagtgctgagatctgtttccgacgcggccttcctcctggcgacggtgtcctgttttaccctggtgaagtgttttcttcgtcacatgaaccagttgcttccacccggctagagcgcattctcagtggcatgcaggacatcgaatacctgaagctttattcttcacggtatgggagggaggaaggcctggcccttatagagaagactggcatgtaccttggaccggatcgatatacgctggatcatggaccggtagatgtgatgaggggtgaggtgtaccgcacctgcaggtcttagtgtagcaatgcctgccagatgctgtccttccagtctagggcgtctgttgtattatatatggtggtatgtgatctatgtagcgaattaatctacccttggtgatcgatcagatcatcaaacctggactaaactagtcctggtgcatcttttgaatctggctcgagagttgcatcaagtcgggagaaaaaaaacccaagagatctggccaagagatggagcgacccaggtccggctctggtacaaggcccagttagctaccggaagtgggccctatctgctgcaacaggattgagacgagattggcattgtcctctcgattccatgacgctgtgcccgcatacagctgaagctgaaatattctcctattagctgttaccttccatttcctttctgcgatttgcaccgcaggttacaccctccaaaggcgcattcgtttctaccgtgtgccgtgacgaggattcccgtctcagcaacggacgctgccgccgcgatgccctgtctctttcgaggtcggtagcgccatggcctaacgcggagctgtgtttggttggaagggaataatgcatgcgatgcatggtgaggaaggatgagtctatcccgagctctgtttggtccagagacatgaaaattaggtccagactgttaagtaaccctagttagggttatgtgggcaaatacctgctttgtccctg

SEQ ID NO: 34847 - DNA, 1137 bp, Zea Mays
acgactgacagtgaaaaaataggaaatgactcgtcaacgcaactaccccaagtcgccgctgagccactctctccgtccgcgaatccgtaaatggaaggggacgaaatgctcagggtgaagctcggcaggcagggccttgaggtgtccaagcttggcttcgggtgcatgggcctcactggagtgtacaacgcccctgttcctgaccaagctgggatcgacataatcaagcacgcgtttgaggccggcatcaccttcttcgacaccgctgatgcctatgggccacacaccaacgaggtcctgctcggaaagatgggagagctcaagaagttggttgaagaagggaaagtgaggtatgttggcttatcagaggctagtgccgataccattcgacgggcacatgctgtccatccaattactgcggtgcagttggagtggtcactatggaccagagatatagaggaagatataattccagtctgcagggagcttggtattggaatagttccatatagcccacttggccgtggcttctttgctggcagggcagctgtagaacgtgttccatcagaaagtctattgtctaaacatccaagatattctggggaaaacttggagaagaataaagttctgtatacacgacttgaaatgttgtccaagaagtatgggtgcacacctgctcaactcgctctctcctgggttcttcatcaaggagaagatgtggtccccatccctggaacaacaaaagccaagaaccttgacgaaaatatcggtgctgtaaaggtaaggctgagcaaggaagacctcgaagaaatctcaggcgcattccctgctggtgaggtggctgggtctagactccttggagtcttggagcctttttcctggaggctcgcaaataccccgcctccaaaatagcgagttcagatgcaaattcttggccatcctaccatttaggtcatgttatgttagatcatatctacatgatgcaaatgattgttcctgtgctcgcgcgtgaaaatgcatgtacctgaaacaaagagatgtaacagttggttctctgtgtggaacgtgctgattgctatagttgatcaaagaaatacgttggaattaagctaaatgtccttcatggtgcactttgat

SEQ ID NO: 34848 - DNA, 489 bp, Zea Mays
cttaccgcctaggtgacgcttaagcgtcgccttggggatgggacaccttaacaactatgtgcggatggcaaatatttgttatcaggtggtgaagatgatcttgtgcaagtatggagcatggatgatagaaagatagttgcatggggtgaagggcataattcatgggttagtgcagtttcttttgatccgtattggtccccaccaaattctgatgaaacggaagaaaatgtcatgtatcgctttgggtcaattggacaggatacccaactgcttctctgggatctggcattggaagagattgctgtccctctacgccatccgtctggtggctcaccgacattcagtagtggaagcccatctgcacagtgggataatgcgtgccctccagccggtgttctacagccttctccacggatgcgagatgtgccaaagctctcacctctcgttgcacaccgggtacatgtagatcccctatccggcctggaattc

SEQ ID NO: 34849 - DNA, 808 bp, Zea Mays
aaaggttcacaataggccaataaaaagaccaagaaaagggttcaaacaagagagcaaagacaacccgaaaggcaccctggtctggcgcaccggactgtccggtgtgccaccggacagtgtccggtgcaccaccggacaatgtccggtgcaccagggcacttcagctcgaactcttcaccttcgggaaaatcagagggcgctctactataattcaccggacagtgtccggtgcacaccggactgtccggtgtgccagcggagcaacgactccttccgcgccaacggtcacctgcaacagcatttaatgcacgccagagcgcgcaaaaatcaggcacgcgcgagaaggcgcaccggacagtctataggacctgtccggtgcaccaccggactatccggtggtccagaagacttcagctccaacggtcagaatccaacggtctgctgacgtggctggcgcaccggacagtgtccggtggcgcaccagactgttcggtgcgttatgcgactgcagccttccaacggccatttttggtggttggggctataaataccccaaccaccccacattcaatggcatccaggcatccaagttttccactcttctacaccttacaagagctagcattcaatacaagacacaccaaagagatcaaatcctctcccaactccacacaaagctttagtgattagagagagtgatttgtcgtgttcatttgagctcttgcgcttggatcgcttcttttctttcttcattcttcttgtgatcaaactcatttgtaatcgaggcaagagacaccaattgtgtggt

SEQ ID NO: 34850 - DNA, 3297 bp, Zea Mays
ggcgtccacagggggcgacacccgtgaccctgcccccgttcgacatcagcgctcctccccccgaccaccgtcgatttggtgtctgagccctcgctagatctcgcaccctcaccgaagccctcattggattcgacgccctcactggaggttgcaccgcgatgggatctaggaaccgtagatggcctcgaccacccacgtgggttgttgcctctgcggatgagacgcagcgccaaggggccagaggaaacgacgtgatggacctcatatcacagctcatgtcatggttcatgcctctcatcgcctcccgccgtggttcgccgaggccgccccatgctgcacgccatgggcagcgatgtcgccttcacgaagctcggcatggagtgctaccccaaggaggccaccgctgttggggtcaagggattccccgacatggaaaaataaccgacgacgagatcaatgccgcctccgtcacttgctgccgcatctacctcaggtccgagtctgaacctggtatatcgcaagttcttcggcgggtactgcaactgctcataccatgattgcagagctgagaacaccttgaagctaggagatgtcatccagtaccatgaatgtggttaccgcattctctataagaagcgggcaccgatccatgtgtagtaccagcaaacttcccattttctatgactccaagcaatggcagttgccgttcagtttggactatagaattcaattatgagttcagtttgttgatattaaaggaaagatacaggtcagcctcttttacttaacaaggattcatacttaaatacttaacaaggtaagagctctaaatttatgttagtatagtagaagttttttttgttgttgtaaatatcacttgcatatacgccagctagatgctcactatttgtcctctctcaaggtctgaatctgtctgatgttttattcaactgattaactatcatcataaacctgaataacattttgctttgttcatgttcaggattcatacttaaatttatctgatgcaatttttcaactgaacgtgaacttggcaggggtgagtacggagtagtgtacaagcgagttctgcattgagctgtcgtagagagcgtagacagacactctagccaacgttgttggctgggattggaacacaaaagcgagacaagggatgagaagcacaggaggagccagtttggcggaggcctcaatccgggtctagaccaaggtcatggtggcgacgaaggtggaggccgaggtggagggtgatgcttccactctcagtcttggggtggggtcgtggggatgacatatgagagtggggtgcagtggtggctcgtcgacatcagccattggcacccttcccctgcccagttcgatgatgcaccctccctcctactacttcacgatggcaccaccatctccaggtaccgtgccgatggaggaaaggagaaacaaggtattttgaagattaagagtgatgccacatacttagcgatggggtgcttgatatcctagatattgtactagcttcagacctcgccgaattgacaccttcgaagaaatgaagtcgccagattggtaggctttgagtgtttcaccagaggaagtatgtagtgcagttaaggaaggaaatgaacttccatcagacttgatagacacactactaaagtggatcccaagcaatgatgaggagcttaggcttcgactgtcctcccatagcaccgccacaccgcatgcgtccgcggcggcgtccgcctcggcgccggtctcgcacaccgctccctagctggggaagttcatcgcctccgagcccttcaacgtggggggattcgattgggcgatctacttctaccccgatgggaagagcggcgaggatggcgttgtctacgtctcgctcttcatagccctggccagcgaaggcaccgatgtgcgcgcgctgttcgaggtcacgctcgtcgaccagagcggcaaggggcaagacaaggtgcatacccactttgggaggtctctcgagagcgacccatacaccctcaagtaccgcgacagcatgtgatgagtctatgtacaggttgtttcctacggtatgcttatctatggtggaaagaaaaagtgattgactcatacttgaaaagaaaagatggcctttgcccattgacgcctgagacaaccagaaatttgccatgacctcgttcctgaccaagaaaaactgtcaagcacagaatcacagttgatatattgggattccaaggtatcagaggctgatatggatgcaatgtggaaacatcctgatgtgtataaggagtggataaaatctggtgagagacgtggaaatgtacgattctcccatgatgcaaagaacatgccttacctttctcgcgtcgaggtgaaggatatgattgccttctcatgttgtgtatatgatggtggtgatgaggagaaggaaatggatgcagccagagaaataggttggagagggaaatttactaagagaggacgtgtaataagaccaggaattattagaatgagtggaaaatgtcctcttacacctttggaggttgggttaatgcttcgtggaatggatttcagcaataagactgcaatctttttggcatctggaaagatttacaaagcagagaagaacatggcttctcttcttgaaatgtttcctctcctacagacaaaagagacactggcatcagaagaggaacttgctccattcaagatggctgctgttgactatagtatttgtgcccaaagtgaagtttttgtgaccacacaaggtggaaatcccgcattttttatgggtcacaggagatacttgtatggtgggcattcaaaaacaattaaaccagacaaaagaaggcttgctgtactcttcaataatccacgtatagggtggacggcattgaagcggcacttgcttaatatgagagcatacagtgatgtcaaggggatcgaaatgaaaagaccaaacgaatctatatataccttcccgtgtcctgactgcatgtgccgcttgaacagaacagaacactcgaaatccaaacagagtagatagtatatttcgtatgtagaccaaatggctaaaaccatccaatattttcatagactgaaaatgcagagaaagcaacaaaggtgtatcaatacagtcgtacaagcttagtatcggatggtttttaatttgtatagcaaagcacgggcacatacctatatatcttttaatgtatgtaaatattcttaacctttaaaagatactaacaagcaggtataacgataattaatgtttctata

SEQ ID NO: 34851 - DNA, 1672 bp, Zea Mays
gaaagcatcgctgaaacgagatcctcgccgtttcgcgaacaaatcggtgactgtctcctgctatctccccctttccgccacttcgctccgctcccatgcctcctgccccctctcgccgtggaggcaccccaaaccctagcccctgaaaccctagatcctcctcccctgttccgatggcgggggccgcggcgtccccagcggcgggccacgtggtggagcggttccggtcgcgactgcgcgaggaagcgggcggcggcgagccgggcgccgccgcggtcgtgcacgtgtacgcggaggcgctccgtgagctaaccttcaactgcaagccggtcatcaccgagctcaccatcatcgcgggccagcacgccacgctcgccgccgggggaatcgccgacgccatctgcgcccgcgtcgccgaggtgccaccagatcagatattaccatctttgtatctgctagatagtattgtgaagaacataggtggggaatatgtagagcattttgcaactaggttgcgaagtgtatttgttgatgcatactacagagttcatccaaaccagtatacttcaatgaggcgcctctttcgtacctggtggccagtgttcccttcttctgtgcttcgcagcattgaggatgaccttcaattttcttcctcggagaataaccgccccaccacatcaacaaatctgcatcaaacagagtcgttatctcctaggccatctcatggcatacatgtaaatcctaaatacctggaagcacaacataagttcaagcaggccaatgtggtgcaccagccagcagctcgggacactaggcaaatgactgatgtgcaggaggatctgataaatggattagcatcgaatagttcgtgtgaacggccttcaattttccagaaatcttctttacagtatgctgatgatcctgatcaacaagagacgtttcggcctcttgctggaacaagggcagcatcaccacatctcttgagtacacatgcatctgatatgaatctagatgggccattagtcaattcaaggagaaacttgtccatatcaccacctcttgatgtgttctctaggaatgtgtcccccaagagagcactagagaggctgccaccatctcattctgtattgggacctgatcccagaaaattcactgatcgaaatggcaggttaagatggggtttggatgatggtgcacaacggcctacaatcagtatgcttgatgaagagtacaggaagcaaagtgcaagggaacttattgatgcatatgggaattgtcaaggacgagatgctgatgaacgacttcctaaagtgcagcgcctggatccaaatggtatggctagcagatctagtgcacgaaattggttaacttccgaggaagaagagtattcatgggaggatatgagcccaactttgactgatcgagtcagtagcagcatgccatcttttcctcctggaaccatgagaactggatttcctggggcaaatgcagggttactggaatctgatgttgggaggcacaatttcccaagccaagctactagattatcggttgatggttcaccgtttaatcttgaagataggttttcaactgcaagtgatcatatgcagacttgtcaacatgatagtgctgtctcgatgaatctatgaacacctattgacacaggaacacc

SEQ ID NO: 34852 - DNA, 3456 bp, Zea Mays
ccagaagctacgcaccaattcaattcccgagaaagtgattggggttttacatcttttatgcctttgttggatctgtatgattcaagtaaaggatatgttgtgaatgataaatgtatcatagaagctgaggttgctgtgcgtaaaactcttgatttctggaactatgactccaaaaggatgactggttatgttggcctgaagaatcaaggggctacctgttacatgaactcccttcttcagactttataccacattccttactttcggaaggctgtatatcatatgcctactacagagaatgatacgccttcagggaacattccattggctttgcaaagccttttttataaacttcagcatagtgataacagtgttgctacaaaagagctcaccaaatcttttggatgggatagctatgattcgttcatgcagcatgatgttcaagaattgaatagggtcctatgtgaaaagctggagaacaagatgaagggaaccactgtggaaggagcaatacaaaaattgttcgagggtcaccatatgaattatatcgagtgtattaatgttgagtctaaatctaccaggaaagagtcattctatgatcttgcactcgatgtcaagggatgttctgatgtctatgcatcatttgataagtatgttgcagtggagaggttagaaggtgataataagtatcaatctgaggaacatggtctacaggatgccaagaaaggaatgctttttattgactttcctccagttctgcaacttcagttaaaacggtttgaatatgattttgtgcgggatacgatgctcaagataaatgaccgttatgagttcccacttcaattggatcttgatagagatgatggaaaatatctttctccagacgcggatagaagtgtgcgtaacctatatactcttcatagtgtactggttcatagtggtggagttcatggaggacactattatgcctttattcgtccgaagctgtctgatcaatggtacaagttcgaggatgaacgagtgacgaaagaagacatgaaacgagcattggaggaacaatatggtggtgaagaagagctcccgcataccaaccctgggttggatactgcaccgcttagatttaccaagcattcaaatgcttacatgcttgtttacattcgagaaagtgacaaagataacattatctgtgatttggatgatgaagatatttcagaacaccttaaggttaggttgagaaaggaacatgaagagaaggagtacaagaaaaaggagaaggctgaggctcatatgttcactgcattgaaggtggcccgagactttgatattaaagagcaaattggaagacacatgcactttgatcttgtggactttgacagagttaatagcttccgtgcacctaagaacatgtcaatcaacgaagtcaaggaggagctttctaaagaatttggcatccctgtagaatgccaacgattttgggtatgggcaaaacgacagaactgtacctacagacccagtcgtccattaacctcccaggaggaaacatctactattggggttctcaaagatgcaacagtggcgaagttaccgaattctgaagtacgattgttcttggaggttcatttcagacaggagaaccaaccaattgctccttggaataccaaagaagatatattacttttcttcaagctctatgatcctgaaaaagaagacctaagatatgtcggcaatttttttgtgaaagcatcaggcaaaccatctgatatagtagaaaggctgaatcagattgctggatttctgtctgatgaagatattgagctctatgaggaaataaagtttgaaccagttgtgatgtgcgtacccattgagagtaatgcttcgttccgttcaagccagattgacaatggtgatataatatgctaccaaaagcactgtttgccagattcaatggatcgatatcgatatcctaccgtcccttctttctttgaatatattcataatagacagattgtccatttcagattgcttgagaaaccaaaagaagaaggcttctctcttgagctttcaaaatgctccacatatgatgatgttgttgagaaggttgctaagcaactacgtatggatgacccttctaaaatccggcttactcaacacaatccatcgtctcagcaacccaaacctcacttcatcaaatacaggagtcttaattatctttcggacatgctacataatcacaatcagatgtgtgacatattatattatgacatcctggatattcctttgcctgaactagaatctatgagatctctgaaggtcgctttccaaaatgccgcaaaccatgagatgtcgtttcacattatgcggttaccaaaaagtaactctctccttgatttgattgaagacttaaagtcaaaggttgaaatttcttgtaatgatgctgaatttcggttttttggagtctaccttcacaagatatgcaaggtgtatcaacctggagataagatagattcagttaatgaccatggacccttgtatattgaagaggttcccgaggatgaaaaaaatgccgggcctcatgaccgtttggttcatgtctatcattttgaatataatcatcatattcagtattttggtgaacctttcttcttcctaattcgtgatggtgaagctttgtcggatatgaaagtacggattcagaagagacttcaagttcctgatgagcagtttctaaagtggaaatttgctcatgttacattcagtaagccagaatacctccaagattcagatattaaacagagacctgtttatggaggttgggaacaacaccttggattggagcatacagccaccaccccaaaaaggtcctacttaggcaacaaccagaaccgccattcttttgagaagcctgtgaggatttacaactaaagctaggaatactttttacatgcgatgaatgatgaacaggatatgaagcagtcttgttccaaaagcagtcttttggtgatgtacatggagcttttgcatagagtagtttatgtggcaattatctcaagaattttcatctggtggatgtacagggtccgtatagcaacatttccttgtagaaagttgaagctgtatatcgagggtggatttacatgtgttaatcttttcgaccccaagcctctgggaggctgtgaaccatagcctcatgaaatatgcctgttgttcattcagtgtttgtgtttttctcgtttgtcattattgtgcactcgcttttaatatgctcggtctattggaccgagcaggaaaatgatgttttaccttatagtggtctaactggttcattaggcgcgcaagtgcacagttgaattactcctttggaagcttgaaacgagaaacataggaaatgtctatgacggtggacatgccaagaccccaagtcctcggtttcaaggcctcccaccgctggctttctag

SEQ ID NO: 34853 - DNA, 2986 bp, Zea Mays
aaaatcctaaaaattccaccaccaccgaaccgagcactttcgctacgcaaacacgcgcgtggaaaacaaaacggcacacaaattatttattttttttcctttttcgatcccagacacaacacaagactgaaaaagtcagcgaggaaggaaaaaaaaatctgcgaggcagcgcagccggacgaggaggaggaggtcaggactcaggaggagaggcgtcgcggactcgcggtggcagtgccgcgcacggcaacccaacccagctcagctccggcgaggacgcaaccgttgacgtcgctcttggcctcgcctcgttatttgaggtcgcgcggccgcgagccggggtccagatcgagtctcgcgcgaggtgtttcggcaccgcgaaatgccgcctccggctgcgatgctgctccttacggcggcctcggggcctcccacgctgtcgctgaccctggccgcgaggcgggcgccgctccgggccccaagccggcggaggctgcgggcgctgcggccggcgaggatccgcgccgccgcggcgatcggtggcgagttcggcggcctcggccggcgccgcgtcgtcgtgggagagttcatcgagcgcctgcgcaacgttctgcccgggggcagttggtggcgcctcgaggacggcgatgaggccggggacggggccggccgcgcagaggggagcggtaccaccgccgtgtccgcgctcaggcggatgtgggccctcgttgccggcgacagattggtcatctatgtcggcttcgcgtccctcgtcggcgctgcgctttcggagatcgccataccacatctccttgcagcgtccattttctctgcgcagaatggaggcgcggtgttctaccgaaatgccaagcttctggttgtcctatgtctggtttccggggtgtttagtggcatacgaagttgctgttttggtgttgcaaacatgatattggttaaacggatgagagaggagttatttgattccattctttcacaggatatttccttttttgatgaagaaacagtaggagatctgacaagtagacttggttcggactgccaacaagtgtctcgtgttataggcaatgaccttaacctgatttcacgcaatttacttcagggtgcaggtgcattaatttatctgctagtcttatcttggcctctcggattgtgtacaatgtttgtttgtgcaactctatcagcaattatgctagttcatggacggtttcagaaaagggcagctaaatttgcacaggagttcaccgcaaacgccaataatgttgctcaagaggtgataactttggttaggacagtgcgagtatatggaacagaaaagcaggagtttaaaaggtcattggagtggtgattggaggcctagcaatcatgtctgggaagttaactgctgagcagttgacaaaattcacactctatgctgaatggctaattttgtccacatggtggattggggacaactggtcctccctgatgcagtctgtcggagcaagtgaaaaagtttttcgtttaatggatctccttcctagcaagcagcttagctctgaaggcctcaagttagagaagttgaaagggcaaattcagtatgctgatgtatcattttcatatccatcaagacctacggtaccaattttgggaggcttgaatttaacactgaatccaaacgaagtagttgcaattgttggtcttagtggaagtggcaagagcactataatcaatttactacttagattatacgaacctacaaatgggcaaatactaattgatggtgtcccgctcactgagcttgatatcagatggttcagggaaagaattggtttcgtcggacaggaaccacgcttattccgaatggatatcagctctaatattaaatatggttgcccaagagatgtcagtcatgaagaagtgatatgggctgcaaagcaggcctatgctcatgacttcataatggctttgcctgatggttataacaccatcgttgatgatgctcttctcagtggaggtcagaaacaacgtgttgctattgccagggcccttctgagggacccatctatcttactgcttgatgaagccactagtgcgcttgatgctgagagtgaacattatgtcaagagcgtcatcacaaaagttagtcgagattcaaaggctaaaagaactgtggtaatcatagcacacaggctatctacaattcaaacagctgatagaattattgtgatggaaaatggtaatattgtggaggatggtaaacacattgatcttattgagaagggtggtctatattcaagattagccaggcgacaaaatgacgatctcaagtagccctggatcacagaatgtggtttagtgcacgccttctttttaaatggaatggcagaagggagagtcgtctgtcattagtgtattctttgcaagaactgacctggacccaggagctcgaataagctggcattgtttttcccatgaaccagaaacggtttgtgactgatcaaaataaaccaaaacggtttcccccacgaggacgagcacattaagcatcgagagcggcagtatggagaacagacttctaagaggtccagtattgtaaaagtagcttccataacaaagtgtatatgcgtttttatcttgttatcgggaactctgaaacttatcttacactacacacggaggaaacgctccaattttgttacgagcactgtgtgccttatttcctgaattttcgtgtaaaaatgtactccctgcgtcccaaaacagttgacgttataatatttatagttaaacttgtaacttaaattattagcaacataaattattataaaaatatatttaaagatctattgaaatattttttttggttgttttaggatcgggggactatgccattcacgtagaatcgtgtttgtattttacgaagaaattggtctccttgttacgatgcactatgctttgccctggcagccccttcatccatgataac

SEQ ID NO: 34854 - DNA, 956 bp, Zea Mays
ttttggttgtggagtttggcaaggttcagtgtccttgggcagggcatgcaaacctgcgtggagctgaagacaggccacgtatgattggtccatgcgttgctggcacccttggagtctctcttcctcatgctgtggttgagctcggtgacacctgctccttattcaatgatataaaacttgattcagtgaggatgctccctgtccttaagtctggtccgtgtttatcaccagagtgacacagctcttgagttcaagtcgatatacatcctctccccagccaatagctcggtctgcccttgtgcttagcgctccaacactcagtctggtgaccacgctcacccaactgctcacctcaccgtggccgagacgcttggagcaattgcatccccgggtaaggagtgttctgcgctctccataataccatgaagctcactgaagaagaattgttaactctaccattgtcaggtggtcagaacagtgccacgctgccgcagaacagagtcgtggacagctccaccgctggctttccaatccatgttgatctcgaatgatcttgtgcgagcactgaaggtcgtcgacgtcgtggccagcgagggcgggtgcttggctcgagcatgaaaacattggagcttgttaacatggacgtgttttgacggtgattatgatgcgcctgaggtgatgaggagtattcaaggagttcctgaagctaggagggcgtttccagttctgggggaggattagttaggtttgggtataagctttggagggttcctaccttcttgctattgtaataagttatgcactttgagtatatcaggacttgtaataaatgtaactcttcctatgtaatgaccttcagttttagaaatgaaaataatattttgtaaagtctttcgctcttatctccgaagtgtgtgtatcgaatgtgattactgtaatatacatgaatgtgggag

SEQ ID NO: 34855 - DNA, 575 bp, Zea Mays
ccgcatcgatcaccctcctcgctcccggtcaacagcagcggcgcagagcacgacaccgacacgcgccatggcggcggtgaggcaccggcagctggaggccaacggcatcacgatgcacgtcgcggaggccggccccgtgaacgcctccgcgccggcggtgctgttcgtgcacggcttcccggagctctggtactcgtggcgccaccagatgggctacctcgccgcgcgcggctaccgctgcgtggcacccgacctccgaggctacggcggcaccaccgcgccgccggaaccgaactcctacaccgtcttccatatcgtcggcgacatcgtcgcgctcctcgacgccctccacctcccgcaggtgttcgttgtcggccacgactggggcgccatcgtgtcgtggaacctctgcctgctgcggccggatcgggtgcgcgcgctcgtcaacctcagcgttgccttcatgccccggaggcccggcgtcaagcctcttgagtacttccgcgccgcatacggggatgagtactacgtctgccgattccaggatcatccctcacccgcctctagctcggatg

SEQ ID NO: 34856 - DNA, 1577 bp, Zea Mays
tctttctcccgatcgtcccattatcccgggttcccatcgaaccgcatctgagtatctgaccacgtcacacgacaccaccaccagccctccccttcatcaattggagcacggcgcccgttcattcccctctgctccgctgcttgcctccggctccccaattccacgagatctccaattccaccgcgtcgtctctgcatccggaccccataccccgatcgatccctaaggcccatggttttctccgccgccgcgtcgcctctagtagccaccgctgctgactctgcttcctcctgcgtcgcccacctccgctgctgctgtcgcgttagttgctgccgttgttgaagacgcgtagctctttagggttcgcgatttctcgccgatcggttcgagaattggtaagctatggatctctcgcggcccacatcgtcggacctctcgctcgggctccactctcacggtcacgcccacgcccacgctcgcaggcacgcggtagccgcgccgctgcgcctgttcgacgacgcggaggagccgaagccggagcgcgtcggggccggagaggccgacgcggagagggatgacgaggacgggggcgaccagcacttctccctcctcgggcactccctctgcgtcaagcgcccgcgccgcgccggcaacggcggcgggggcggagagacgtcatcctgctcgtccacgtccgcggcgcttcgccctgccaagcgacaggcgacgggggagggcagcggcgcagatctggagacccgccgcgccgcggtccgcgcctggggcaatcagtcgctggcggaggccgacccggacgtgcactcgctgatggagcaggagttggaccgccaggtgcgaggcatcgagctcatagcgtcggaaaacttcgtctgccgcgcggtgctcgatgcactcggcagccacctcactaacaagtactccgagggggccccgggtgctcgctactacggcgggaatcagcacatcgacgccatcgaacggctctgccatgagcgcgctctcaccgccttcggtctcgaccctgcctgctggggcgtcaacgtgcagccctactcgtgcacgtctgccaacttggctgtctacactgggctccttcaacccaaggaccgcatcatggggctggagccaccgtcgggcggccatgttagccatggttactacacgcccagtggcaagaaggtgtcaggtgcctctattttcttcgagagcatgtcgtacaaggtgaacccacagactgggtatattgattacgacaagcttgaagaaagagcaatggatttccaccctaaaattctcatctgtggtgggagctcttaccccagagagtgggactttgcacggatgagattgattgctgataagtgtggtgcggtgcttctttgcgacatggcacatatcagtgggcttgtcgcagcaaaggtttgtggatgatgtggcttgctgacatggttagattgcatgaaatgtcataattacatgcactggtgggctcctgctgtggatggcttgcattttaagatagaaggctagtggggtttatgattataaaataaata

SEQ ID NO: 34857 - DNA, 1236 bp, Zea Mays
tgtcagatatgggatacagcctcaaggaaattaggaatgatgagtcatcaacagcaaattgcccctcctagtaggggttctgtgaatggattcccccatctaaagctggatagggtgggtagtggaaggcatgaaagtaaaatcgtgaggtcatcatctggcggttttaccaattcaggaaatgacatcaaactagggcatggaagccattcgagggaccgactaatctatgttctaacacaacttattgggcatcatgtcaacgtgcatgtgaaaaatggctctataatatctggaattttccatgcaacaaactctgacaaagacttcggagtagtcttaaaaatggctcaggtcataaaggatggttctgccagaggacaaagatttgcttctgatgttgtaaagaaacctgagactatgataataccagcaagggagcttgtacaagtttttgccaaggatgtagcacttggcggtgatgagctgccaaaaggtcctggtcatgacaaaaggaaggacttgctgattgattctgccatttcccgctctcattaccttgaagagagggaacttgagcgctgggcaccagatgaaggagattcagagtgtatcgaactggagaagtatgacagaaagggaaataggagctgggatcagttcgaaaccaatgcagccttgtttggggtaaagagtacattcaatgaagaaatttataccacaaagcttgagagaggtcctcatatgagagagcttgaaaagcatgcttcgagaatagctagagaaatagaaggagaagataccaaagatattcatcttgcagaggagagaggcttattcctgggtgatgacttggaccatgatgaagagataaaatattcagcagtgcgtagagacaccgataacagcaagtacaagccaccatttactaatgtcccaagcagtacataccaagttgatttgtttaacaggacagtcaatattgttcccaaggatttgctgggatgttcatcaacaatggatgaagaatcatcatcccacatatttgatgatattgatgcatctgccactattcaaaccaatagcgttagacagccaacatctgattaccttccagatagactctcgtccaatgatgaaaacaggtactatctcccatgatgaagtttctatttattgttgaccagtagctaaactcaatctagccagctgcatatcgatttagctttagttagg

SEQ ID NO: 34858 - DNA, 1520 bp, Zea Mays
tgcatattgattcaatgaaggacgacgcggtagtcctcgcagcaaggccgaggcctgatgcagcagcagcggtcgtcgtcgtcaccttgcgccgcatgaacagcagcggcgacggcaggatgagctacgccgacaactccggcttccagcgggccatcgcttccgtcacaaagaatgccaggcaggaactggcggcggcgctctaccgcgcccgcggccgaccgagctccatggtcatcgccgatctgggctgcgccacggggcccaacgcgctgctcatggtgttggacgctgtcgaggccgtgctggcggtggcggaggagagccacccctcgccgccgccccagctgcacgtcttcctgaacgacctccccgccaacgatttcaacgccgtcttccgactgctgccatcgtcgccgctcgccgctaccggctgctgcttcgtgtcggcgtggccgggctccttctacgagcgcgtcttcccggaggccagcctggactacgtcgtatcctcaagcagcctgcacttcctgtccatggcgccgacgatgaggacggagcatcccaaccggggccgcgtctacgtctcggagtccggccccgcggcggtgcttgacgcctaccgctcccagttccacgccgacttcctcgccttcctctcctgccgcgccgacgagatgaggccccgcggcttgctcatcctcaccttcgtcgccaggagaaccgcccgccccaccgcgcacgactgctacctctgggacttcctcgccgacgccctcatggacatggccgccgatggcctcgtcgacgaggagcaggtccacgccttcaacgtgcccttctacggcccctgcctcgacgacctagccaaggtcatcgccagggaaggctccttcaccgtcagaaccatgcagctcttcgacatctcgcgccgctgcctcctcctccagtcggcgtcggacgatgacgacgacttgccgcagtggctagccatggagacgacaagcaccgttagggcggtcgtggagcccatgctgcgagcgcacttcggcttggaagccatggacggactcttctgcaggtacagcctccggctagaggagtactaccgcagcaacaccagcagaaacaaggacgacctcaccaacgtcttcctcgtcttggagaagaaactgcactagcgctagtgcgctactctagctagctatgccatggagatacatctactgctagtgctagatgcgtgcatgactcttcggataaacgtacggaatgggacatccctggtcccttcccagtccccagctccagacctccagtctccgtcgacaatcctcatcatgcatctgttttttttctagaaaggaaaaaatattatgtctacctgttttccgtctactagtactagcttggatcaattattcaatttcttaattagtactttgtcctcctattcgtcggtctgatctataaggggattgaaggcgaataaatactctcctaattaattttgactatga

SEQ ID NO: 34859 - DNA, 472 bp, Zea Mays
tgttcctgttcttgcctctgcctggctgcctggcagctattcctggtgggcggtgagccgacaactggttgttcctgcaggctgcagcctacgccgctgttcctagcgcccagcgactggctgcttcctgcttggctacccgtctccgaactccggtggccggctggcggtgtaccgtgtatgacagtgactaaaatatgaagaagcagggagatattgcctctctttttcgcaatcatgctacaaagaaacataagtttatttcttcttcattatctccggatgttactcaagcgtcgacacctcaagaacaagaggaagagaggataaatgaagaaattgtgaatccaatgccatctgcaccgccatcgccaacactttatgatgtcagtcgtcttccacatgatccatgtgaaagacaacctattgcaagttaccatgctaatgatcacgatgcaattcgaagagcata

SEQ ID NO: 34860 - DNA, 1310 bp, Zea Mays
aatttggcctctatttaatggatagatagtacttatagcttctatgctgtctagcaaactattgatctagtcaagtgcttggttcaagacttcaattatcattttgattcacataacttgtttaaataagaagtccattttacaatccccaacaatcaagtttgtctaccttaccctttaagaaactcccggatcattttactcatctaaactatttcaattggtacaatctacctcctaatgagattcatatttcttgtttctctgcttatgtttaaagttcaaattttctggagtgacaaatgagaaacgacatctatcatataccgaaaagtacattagaatttttaataatcattcttcataggttaagaccatctaatactaaattaatatttgggataccaaatttcatgaaaagcaactatgaacatttttgtcctctatcaccccatggaatttgaatgtgaaaactcaacttgtatgcagagaaacaaaaggacaaatctcattaggagatatactggatcaattgaaatagcgtcatgagtaaattgagcccaagttttgttatgggggtggagcggacaaagtgttttgtcgtagtacttacaactaagctagggtggggtttgttggtggtgatggtgtgtgggatgcgagggtgaggtattcctctgcaaattcaatgtatcttacgctttttcagcatggctctgctccactccagagcaactccactctaaaactctgggtggagcagatttgctccagatttaaatggttttctcataaccggtggcagtggcgggtaaataactccaagctccacatctaggttgcctttttagagtttttgaagccgcaaaagaggtactccaaaaaactgtactgcaactctgaaaactccatggagtttgcaactctagagttagggtgtttggcagactcttgccagctcctccttggagttctgctctggagccatgctaaacacgcccttaatcttctcaataaaaacaaaatatccctcagtttacatactgtcaaatttgggacattgagaaattcatcctaaaaatgtataaattgtttggcactggcaaactgctggcagtacatccctgagacatattttaaaatattttctactattaaggcagacctggtgcagtggtgagagctgtctcactaagtcattaggtcacaggttcgtagcagccttcccacatttgtgggggaaaggctggcatcggtttattccttctccagaccctactcgtgtgggagccttgggcactgggtgactg

SEQ ID NO: 34861 - DNA, 2415 bp, Zea Mays
acctttccaggaagctgaatcaacagaaacgcgtagaaataacgaaaagtacaaaaatattgcgctgaagtttccgtgtacgacggtcaggctcaggctcagcatgaaatagccgcgtccggcgtttcatcatctcagtccccggcgcggcaggtgaaattcgagtactcctgactgttcagttcactataatatcccttggtgccgttgcccttgcctcaaatctatacgtaagtggaaacgttggaggagatcgatcgatcgggatgggtgggtgcttctccgtgcacggtgacgtgcgcggcggcatggagggcgtcggcggtggcgcgaggacccagggcggcgcggcgtcgtcgtctgcgcagcagggcgggccgaacgatgcggtcgactatttcttccagacgcgcgggctccgcggcctctacacgcccatcgagttgtcattttcagcatcgaagttgcggaatacagattccttttcaaagagtgatcctatgttagtggtctacactaacatcaaaggaaagctagaggagattggccgtactgaagtgattttaaattcactggagccctcatggattacaaaggttacaatgtcttaccaatttgagattgtgcaaccactcatgatatatgatgttgacacaaagtaccacaacactccagtgaagacattgaatttgacacagcaggattttctgggggtagcatgctgcaacttatcagagattgtaacaaaatttaaccgtagcctgacattgaatcttcagagtgattgtggacatggtcttcatggaacaatgacagtacatgctgaagaaagtgactcctctagaatggcagttgagatgactctgcgttgcgtgaacttggaaaataaagatgtgttctccaaaagtgatcccttcttaagaatatctaaactggtagagactgctggtcccattccaatctgcaaaacggaagtagtacctgacaacttgaaccctgtttggaggccaatcactttaacatcgcagcagtatggaagcaaggataacccactgctagttgagtgttttgattttaattccagtggtgaccatgaactgataggggccttccagacaactattactcagcttgaaaatctatatacctcaaagtctgcagcaattttttacaaccacaagggacaaagaaagatgaaagaacaattgtttgtggacaagtttcaggaaacagtccagcatactttcttagattatatatccagtggatttgagctcaatttcatggtggctatagattttactgcttcaaatggagacccacgtgtaccccagtccttgcactacattgacccctctggcagacctaattcgtatcaacaggcaatgctgggggttggcgaagttctgcagttttatgacaatgataggcgatttcctacgtggggttttggagcaagggtacatggttatgtatcacattgctttaacttgaatacagctacaaatgactctgaggtggttggagttgaaggcatcatgtcagcatacacctcttctctttacagtgtttcccttgctgggccaactatgttcgggcccgtgatcaacaaagctgcagatattgcaagccagtcccttcaatattcaaacaataaatattttgtccttctcattatcacggacggagttctcactgacatccaagaaacaaaagattgcattgtaagggcatcagacctgccattgtcgattctcattgtaggcgttggaaacgctgatttcaaacaaatggagatcttagacgcggacaatggtaagcgactggaaagctctacgggtaggatcgcgacacgcgacatcgtccagtttgttcccatgagggaagtccaaggtggcgagatctccgtcgtgcaatcccttctggaggaactgcccggtcagttcctgcagtacatgcgcactcggggaatcaagccacagcgggctccggggcttgcttcagcgcccgtttacccacctcagcagtgaccagaagaaaacgtgcacgagctgatccatttgcctcaactgtggattccgctagcgtcccgtcccgtggtagcctagtactcttgttcatacggtctctggttagctttctctttgccgcagttggtaaatatccatgctgtagaatctagatccagcacaaatagatagtaaaacactgctttcctctaggttaagctagacgatgtaaattcgtgctgcagattgccaagtattcaggttgtcgtgaaacgtcattattatcacctgctttcatattaagtactatcttgctaatagttgatttcgagcttgttctcagaagaagaagaaaaaaaagctatgataatgtgcgaggtttgatggtaataataaagaaaaggca

SEQ ID NO: 34862 - DNA, 1047 bp, Zea Mays
agcacacgagctcggaaggcggctccgtccttcggcagagagaaactgcaaagcgagacttcccatccattccactccgcagtggcggcggcggcggcggcgaggtctctacgactttcagatctctccgaagagggcggaggggagggagatgtcgtaatgctgccggagggctgctgacgaagatgcggaagctggtgaagggcctcgccaggcccgagcccaggtggctcagggccatggaagacaccagtgacatttcctcgcatgatgggaagattaaggggtgtttgtttgggattataatctgtccagattatatagtccaacaacttgaacaccccctaagaagatcgagtttctgatgatgtgtatgttaggaagctaaacaaaaagaacatccggattcgctatgccatgatgcaatcaatggatttgatccaccaccagcacgagcttttgcttggcggtcctggagttgaaagaacaaggagtcagtgaagatgatgtgatggctgtagcagattagcaactggccatggtctcatattgctcctggcctatcatttggaaattcttgatttacaaccgaggaaaaggtttctcagcaagctgatcaagatgtattttgcttgcttcagaatattttgcttacagcttgcattgtgacatgttggcaggatgtcagtttcccttcaacttagctcttgtatgcatcctatgtgcttgtcgtatatccatccctaacttggctcttgtatgcttcctatgtgcttgtcgtatatccatccctaacttggctcttgtatgcttcctatgtgattgtcgtatatccatccctgtgatgaacattttagtaatctgagtgctcattcagttggtgctccctcctcatcactttgatgggaggttgaaggaaccaatatctgtgagtacactgttgagacctggcgttctgagggatatgtcatattggttgctcttaacattcaagacatttttcctttttttctttgctacaagaattttgtttttggggcgggggtg

SEQ ID NO: 34863 - DNA, 3695 bp, Zea Mays
ccgcttagtcctttgtagctacctacctgcaatggccgggggcttcgagtggaggacctctgcatccacgaccagaggagtggagcaggccattattaccctcaaggaaggtgcacatctcctgaaatgtgggaagagagggaaacccaaattctgcactgtcaggctatcttatgatgagagagcactaatatggtactccaaaaaatagggggaaacatttaagcttgaattcagtgttcagtgtagttcttggacagaagactacaaaacttttgcgtctgcattggccagaaaaggaatctcactccttgtcaattatatacaagaatggtgaatcctcgcttgacttggtctgcaaagatagagatcaagctgaatgttggtatttaggccttacagccctaatatcagcaccatcgacccctttacttctggttaattcaacaaacagccgtcggataaacagctgcacgaatagccctcctagctatattcagcaaaggagtaggcttttcactgtgcgtgatggaagaaacttcccaaaggtacattcgctatatggcagtcctaggttgatacagaacaagtacttccataataatttggattgctctgaaccattcttttctccaagacagagagcatggtcagaactagattcctacatggaaaagattagtcccgaattgataaatcgagtacaaaataatttgagagacataaaatctgcggaaacaattaacgaccaaagaattatgcaaatgcctaaactgaaacaatctaaggggtcaaatgcagcaacagattctctgaaggacatttttgtatagggtgatgttctgggtcgtatgtcagataatggacatgtatcaggaaccaatatatcacttccaaggttattgaaatcgtcacagattcttgatgtgcagagcattgcctgtggagagaaacacgcggcaatagttactaagcagggtaaggtattctcttggggtgaggaaaatggagggagattgggacacaaaacaagtgacagtgtctctgaccctaaaatcattgactctcttgcctccacacctatgaagactattgcattgggggcaaagtacacctgtgcagtttcagtttcaggagaactttatgaatggggtgaagggattcacagcctagggttcaagaacaatcagtgtcaaagaagcccatggttcccacataaattgatcagaacttcagatggtatatctgtggcgaagattgcatgtggtcagtggcacacagctatagtatcctccacaggtaagctgttcacatatggacatgggacatttggtgttcttggacatggtgacacacgtagtgttgttcagccgaaagaagtggagtccttgagggggttaagagttaagtccgtcgcatgtggaccatggcacactgctgctattgtggaaacatcaggaacacccaagagcaatgctcctggtgggaagctattcacatggggtaacgcaagtggagagaagctgggccatactgacaaaaagtcgaagcttgtaccaactcgtgttgaatcactcattgattgtgattttactcaggtatcatgcggtatgtcattaacagctgtgctaaccataacaggtgtcgtatttaccattggaagcaaggaccatggtcaattagggaatcctcgatctgatagcgcatgtatttgtatggttgaagggccacttaagactgagtttgtcaaagatatatccagcggaaattcccatgttgcagtcttgacaatgaatgggaaagtgtttacctggggcaaaggcacagaagggcaacttggtttgggggattaccttgacaggaccttcccaactctagtggaggccctggaagataaacaggtggacagtatagtttgttcttccaacttcacggctgtaatttgtgtgcatggggaaatctcaagcaaggatactgtatgcagcagttgcaggttggcattccggtttacaaggaagaagcacaactgctacaactgtggttccatgttctgcaattcttgcagcagcaacaaggttcaaagggccacccttgcaccagataagagcaaaagatgtcgtgtgtgtgatgcttgtttcaatgaactgaataaaacagctgagcatggcaaaatgagttgtgaatcaaagatccaaaaagaaccgcctttaacagaaacaagaacatatacaccaaagttatcacgaatgcttaaggaagcaaatttcatcatggaaaaaatgggttccatacgaagtcccaaccagagaaatcaggaatcagccactctgaatcaaatgcaaaaacaaaggtggggacaggtagaatgccccgatcaattcaaatgtgcaagagacaacatttcacattgtttgacatcaaagaagcagccagttgatattggtcgtatagggagaatgaatgatccagtctcacaaaagactgctgcccctttaacacgaactactgataagaggaggaaagaacaagatttgatagaaaagataatgttggaggaggtcaaacagcttcaagcacaggtaaccactctagcagaagaatgccggcataggagcctgaaagttcagttgtataaacgaaaacttgaggaaacctggttgatagcaagggacgaggccacaaagtgcaatgctgcaaaagagattataaagattttaacaaatcaggatcgtccctgacccacccgacaaaactcctgtcaccggcaaaattccaccgctaaacagcatcagggatcaacacaacatagaggaagtggatatgcaatctacaacgtcttctaacactgttgtggcggatgactcggctgtgcatcagaatggcagaagagcctccaatagcagcagaggttatgacgggggaacagatagcacagttgctcctactgactccagtggaatgatcgagcaaattgagcgtggggtgtacatttcagtcgttacatcccccgatggtaagaagggaatcaagagcatccggttcagccggaagcattttggggagaccgaggcacagaaatggtgggaagagaatgagagcagagtatttgcaaagtacaacagcatggaatacttggcagcacaatgtcgataaggaaaatgtacaggagaagccagttctttgtcacagtgtctgtagaacatgtacactgcaacaccatattgttcggtaaagtcgtaggatagatgagatagaaggaatgatagtatcctatctattaagcagataaaccgcagcatatccccgttctggattaaacttaggtccatggttttacttcgactcaataacaattcaattctacgcgaattggggtttgtgttcgacgggatcgggttggagcctgtgattcggattcccgacgcggcgacgcgagtacatttgttggctacaccgatcggtgaccataggtgaagagtaggatttcgtagcctgactaaccctagttcactcgagtgactgagtgagcagagacgtaccggaacgtcctcgccgtagccgtctgtcggtctgtgcacccccgctccctgcccctgtgaagcctgcttcccttggcgcgaccggtgacgcctcctcccgaggcgcgtggcgcgggccctcagccaccgcccgtcgcctcctccgaccaaccccgc

SEQ ID NO: 34864 - DNA, 1743 bp, Zea Mays
tccgcgttgccattctcgccggcatcgtcgcgcccccaccccatacgagccgcccccgcgacgctgaccccactgccgtccagcaggatctctcccttcccccgccccacgcctagcaggatctctcccttccctcgcgcgtccgagacgacatggacgaaggtgggaggctcccaacgcatccccgccgacctcaacgccgacggtcctttcctaacccgcagcccccggccacagtctctctcttccggtccagtgggggctgctagcttccaggaatattggagatgtgccttcaacactctagggctcgattgcctccagataagcaacttgctgcagaaaaaagttttgccttgtattgcaagccagttgaattgtacaatattatccagaggcgagctattaaaaatccaccttttgttcaaagatcccttctatataagatacaggcaaggagaaaaaagaggctccaaccgcgcctcctcaagttacttcgcagcaatgccttcaaggcgaagcccgcgctcatcaccctcatcggcgcctgcgcggccatgggcgccaatgccgaagtcaccgcctccatcacgtgcctccgcgatgcaatcgctagcgatgactgggcagcgaggaaggccgcggcggaggcgcttgctgcattggccctagagcacacggatcttctcacgacctacaaatcctcttgcgtcaccttcttcgaggccagaaggtttgacaaggtcaaggttgtgcaagagtcgatgaaccagatgattgaggcggggaaggagatcccaggtgctgaagaggacgagtgctcctcgctctgccaccagcgtcccagtcacaacgaagatcttctcttacagggagtgcaagtgatgggcgatatccagctgcttcgctgggctcaaactcagttcctttagcaacaaggaagagcatattatctgtaagcagatcatctctgtctgacgtgtctaccagtgtaattttctggaccttctccagttgcaaaagaatatgtgaattaccagtcagtggagattgagagggattccccggctagaagctcaagcggattaggaagtggctcatcttcatccagtggtacagtacagtggagcaaatgagtatctatcaccattaatgctgagttatcgatcaagtagctcgttaattcgttaaaattccttgcagattctgactctgatgttacagtttattttttcagtaaccagaggatgacaagcctactacaagagttggtcctaagttataaaataagcctaactttttttacagagtacacaaatgtcaggttttcctgtttgggctagcaccacaaatggaaacaaaaaattggactcagcccatcgtgaagatatgaaggaagagcactgtcccattattctgtttttcgaagaccatgtttctagcatgaacatgccagcatggtgccatcaacaacttccctgttagctcacggtacaccatgctccagcctgtcccctggttatcactgtggtgctgattgtgttcccaagatgcactgaaatagagcaagatcaaatgaggatgaagttactgtgtagagatttttgttccccctttgtagcagcacccatggatttttatttgcacagaattactctcttttactggttcattcaataattcaatttgttgcttggaaaccactgtataataaatacaaatgctatggtatgattttgtgaa

SEQ ID NO: 34865 - DNA, 2847 bp, Zea Mays
ctgctaccccaaatacgttttttcccttcaaaatttaccctttccagttttcttaagtacttttgctgttttctttttttccctctgacctcaaattaccaaattacccttcatgacctgaacgaagtctcagcattatttttccgtcttctcttaagttctcgtgttctgtctctatccatttgtttactcccgatccccatcagccatggcgataaagtgagggttccaggcggccgccgcttcagggagggctcgcggcggagacaggctcggcgctcgcgcggtcggcaggagctcgcagcgggcaagggctggctctcgggcaggaggtgctcgcagcacggtgctggcaggggtggctcgtggcgcaggcaaggagaagctcacgacaggggcggctaagacttcggtgcgggcacagttgcaggttgcagcagccactcgttgaagatgtttccctctgacgtcgagttactatgaacaattttgatcacttatgtgcttctaccggtagagtgaagaccagaatgacaacataccgttggatagcagagaagtcaatcccatttttgaagaaggatccaaatatgggcgcaaaaaagttacaagaggagctagaggataaatataatgtgaagctaggatactcaacagtgtgggctggtagacagaaggcggtggaacaaatatttggaacatgggaagaaagttttgcagatttgtataggttcaaggcagagattgacgcaaaaatgcctggaagtgttgtcgatttagaggtgcaggaggaagaggatgactccacagcgctcaatggcagatggaatgggcagttttctgaaaaggaagagtcacgccaaacaagggcgaccattaggatcagcaagtacttgcacgcccaaaaggcaaaaagttgtgcaaaacgagtcaactaatattagtccggggcctgttacaagaagccaatcggcgttatcaacgattggtgaaggctcaagccaggaaatggccacacccaaaaggcaacaagttgtgacaaatcaatcaactaatattagtcctgtccctgtcacaaggaggcaattggcattatcaatgctcgatgaaagcacaagtcaggaattggccacaccttcgagggcaaccaaatccccttccaagcctacatcaaggattgcaaggaagatcactccaagaaaattcaaaaagtgaatgtttttgtgtctacaaaactatgatattggatgcttttgtaatcttaattaattagaacggaggcatttggatgatattttggcatatgtatggattgttgacattaaacttgttattgtgcttgctgttatgcttctgtatgggattattgacatttggatgacatttgggcttaatatttaaatcaaacttgctattatgcttgaacgtggtgcacatgtgtgcacgttgctacaattttttaatgcatgagtttgtattttctaccatacctattcttctttttttacattttttattcgtaatgtcttttatactttgggcaaactctgattatactttgggcaaactctgatgtggatgaggaggaccaaacggcgcagctctaatgtgcacaagcagaagggtactttggtcatttgaggtcagagggaaaaaagaaaacagcaaaagtacttaagaaagctgaaaagggtaaattttgaagggaaaaacgtatttggggtagcagccgaatggctaacgtactaagggataaagtctgaaaggctaacgtattgaggggcagcagctgaaaattctctatattaggccccgattctgatgaggcccatatgtcccggcacgtaattacgagcacctcccagtccgacctgttcggatacggagcccacgaggccacgaacgaagccctaatcatccgctccaaactccccgcaccggcagagatcagccgtccacgagagcatcacggctagggtttccgatttcaactaggacccctggatctatgattctatgaaccagaggcgagacgagtggccgcagcatcaggaccgtctccaactcgccagtactcagccgccgcaatcagggacagggagctcgagcgcgcgccccacctgcgccgacgcgatgcgggccaaggtatagggacattctgttggctgtcatcgtttcatgctacttcaagttgtttcttttcacaatgatggtttgggagtttccatcatctgttatattcatcgttgaaatgtttgttttctagtcagtgggatgcatatatacattagtaacagtcttgttgttccgcagtttccaaaagcccattgtttcgtggtctgcttactagcgcatgcagcaaaatacttgacccagcgatggatccttggaacgacatgagcctactcgtccacatcatcctcgagcttcaagcacggccctaatcttcggatggactgttctggtgcttctagagacgtttaggtatattgtgccctgattgatgagccttgccatttcctacccagaaaaaaaaccaaattagagttgcttaatgattcaaacaaagctgcttaatcacgcaactgatttaatagtagggctttatataacgagaggggagaccatatgtctctaccaagatacttttcgtgtactcatgttacagtggtttggacttcatgctctaacaatattataaagtaagaccactgcttcacctgttttacatctcccctctcgggacaaaagaaattggattcttgtgtttttgcagataggaattaatttaggctccctttggaacaaaggaaagaatatagaaaacctactgcccctttggaaagt

SEQ ID NO: 34866 - DNA, 4225 bp, Zea Mays
ctggactctggtggagctggcttcacttgctcgtctccgctggacgctggttggtggttgccttcgctcttcatccttcaaccaccaagccttggcatcgttctgccctgcgtgtggcggcggtccctggagaggagacaagccgacgtgtggtttccgttcttggcattgctcaatctccccccccccctccctctctcttgctttgttgcttcttgactttcgtcgtctccctatctttctcatccttttatctgttggttttgaattcgacggcacggacgacaatgaagaaagcgggttcgtgacgcgtcagtcacggcctctcgtgtaatccaaagccccaaacctctgccacttgcctgcctagcgttgccgccgttcatgagagaccatgcatgcacgcacgctgccattcaccgcatggggaaagagaagagcctgtcgccgttgcaggttcgcaagtcgcaacgacggggctttgcattgcagctcggcgcatcaggagccgggcgccaagtggcgtgcacgcccgtcccgtggagttcattcgagcacgcacataccagctagacctactagctgacgaccgagattctttgcgttctactctgcgcgttcgtagcccccctgtccctgtgcccctgttgggctttactcctactgcctcgtagccgtaggagggcatggcatgctctgcctgcgactgcgcgtggcgtgaggaggacacaaaagccgcctgctttcttgggggaaaaaaggcggggtcgtggtcgactggtcgccatggggacccaaacccccaacccacccaacaccatcgcttggaatgcattgctagcagcagtaggcagtagccactagcagctactaccaccgctataccactaggaaatgcgtttgggttgggggcttgggttccgtcttcttcacctggcctttactcccctcccaacctcctctttgcctgctgctcgcaaacagaaacagcttgcttgccatttaacacgctcgtcctctctcacagtggcatgcaggcgtggtagagctctcacttcccctcagccaccaatgctaaagtgcgcataagctgctgggagccgatattgcatccgtcgggagcttggcaccaacaaaagctcgagttttccctttttcagcttcggtctggtgcgtgcggcgcggcgcctcccggagatgatggcctcctcgcaggagaaggccacgtcgggtgtcctgaggaacgcggcggcgctgctcgacgaaatgcagctcatgggagaaacgcagggtgcgaagaaggtgatcaactccgagctgtggcacgcgtgcgcggggccgctagtgtgcttgccgcagcgcgggagcctcgtctactacttcccgcagggccacagcgagcaggttgctgctaccactaaaaagataccgaattctcgcatcccaaactacccgagtctcccgccgcagctgctatgccaagtccacaacatcactttgcatgccgacaaagaaactgatgagatttactgccagatgaccctgcaaccgttacactcggaaacagacgtcttcccaattccaactcttggtgcctataccaaaagcaagcaccccaccgaatacttctgcaaaaatctaaccgcgagcgatacaagtacgcatggcggcttctcagtgccgcggagagctgccgagaagctgtttccgcaactggattactcaatgcagcctcctaatcaggagcttatcgtccgagatttgcatgataacatgtggacgttccgtcacatttatcgccagccaaagcgacatcttctaacaactggatggagcctttttgttggggcgaaacggcttaaagctggagactctgtcttatttatcagggatgagaagtcacagctccttgtcggtgttaggagggccacccgacaacaaccggctttgtcttcatccgtcctgtctactgacagtatgcacataggcgttcttgctgcagcagctcatgcagcatcaagtggtggctcatttactatttactacaatcctcggacaagcccgtcgccatttgtgattcctcttgcgaggtacaataaggccacgtatctgcaaccatctgttggaatgaggttcgcgatgatgtttgagacggaggagtcaagcaagcgcagatgcacaggtgctattgtgggaattagcgactatgacccgatgcgatggccaaactcaaagtggcgcaacttgcaggtagaatgggatgaacatgggtatggagaaagacctgaaagagttagcatatgggatatcgaaactccagagaacatggttttctcttctcctttgaattcgaagcggcaatgtcttcctagctatggagttccgggcctacaaattggatctgtaaatatgtcatcaattccaagggcacaaggaaatcctatcggtaacttgcagcacatgccagggatgggctcagaattggctctactgcttctcaatcaatctggccagaacatcggaagtccaatcgcttgtcaacaatcatcattttccagcattattcaaaatgctaagcacagctatttccctccaaagacgtttggtgcttccactgcttcaatgaagcaagaaagcatgccttcgactgaagcccagccacagttgaatgctcttggtattcagagaagtgatcgagtaagctgtgaagttcagacagctagtgattcaaatcctgcacaggagatgagtgttaaaccaagagcaccaagaagcacagattcacactcaagccaaagcatttcggatcaaaacagcaagggtgagcctagaacaaaaactcgaaggagcaagaagagctcgtatcagaaaaccatttcagataaatctgagctttgttcagtaccttctcagatttgtgacgacaagaagcatggttcagagccaagactggctgactgtgaagccgaacaagctacctgtgggaataacgaagaatcatctggagcacttacacatggtgattttgctggagagctccaagttcagcagcaggttgaacagcatgaactacttgcgccaccaaagatagaatcatcaaagtcacctgatggagggaagtccgtcagttcgttcccaaaccaagggtgtatcccacagttctttgagggtctggactggatgattccaccttcctattaccaagactccaatggcatccaatcagttaccgcgtcggataacatttttaatccatctgaagcaacttgccgagcacatccaactcctatgtgcagatgagtttctcggaggagagccacagcgcatccttgagtggccttcacatggaagccatccatataaacagctcgtcatgctctcagccactggcgacggggagcttcgatgcaggggcgttcccgaaactgtcaaacataagagaatgccaacccttgcctctgcaagagatccacaccagttccatgggaacaccttcatgcagtatggacgcggcggcagagtacggcacggatagaagtgcgaagcaaatgaaaccaccggtccggacctatacaaaggttcagaagttaggatcagttggaagatgtattgacgttacacggttcagagattaccatgagttgaggtcagccattgcgtgcatgtttggactccaggggaagctggaacatcctggcagttcagattggaagcttgtttatgtcgactacgagaacgatgttcttctcgttggagacgatccatgggaggagttcatcaactgtgtgagatgcatccggatcttatcaccttcggaagtacagcagatgagcgagaacggcgtgcatgtcttgaacgactgcatccaaatagcttagcaaagtcacggctgtatgctctacagcctgcacagtgtaggctcttcttgtaaataaaaatatacagcatgtgcgtcaaattctctggtcgctctgtttcttttgtagcacgagaagaaacaattacagatgtcaacatcctgccaatgccatgtgtgtttctttcaggagtcaaattatttttttacgaagctgaatcgagctaacggacgtgaggaaattctgtaaaacaactgttaatcataaattctgtaaaagtatggtgtcgtggtaggtggggcattaccttagccttccggatgagctggctcgacaacagaccattccattcatagtgagggggcggt

SEQ ID NO: 34867 - DNA, 2768 bp, Zea Mays
aaaataaagaaaaaaaataaaagaaaccccctcttcccctgaccgccgccgtcaccgccgagcacacctctagtcagcttccactggagcacgccaccccgaattttctcccggagtcgttgccctcctctcctacccccgtacactaaagctggttcgcagatccatccggacttgatcggttccttcttttatttcttgcccatagagcccaaacattattggatggactctgtcacttgctgcgacggcggcaaggaattggaataggacgaggtggggatcacgggctgcgacggcggcaagaaattggaaaaggacggcgtggggatcagggtattcgtcttgggaaaggggatggggggtctctgctcgaaggtctcagctgtagacaagtcaccgagcgacaccgcgcttggccggaaccaggtcgccgatcatgagccaggggcgtcgttggagttggagaagccaccggtgtcccgagagtcagctgcgccggcaaagcggctggacgagcagctgcagtctttctcgttccttgagagcgtcgtccctggggttgcttttcatgccggggctaacacgggcggcgaagcggggtccaggacctcgccgcagctgaccaggtcgctgtcccagagggctggtgtgggcaaggcaaaagccggcgctgccaaggtttcagaagtgagctcaattttaggtagagctagcactgctgggcttgaaaaggcagtggaggttctagatacacttggcagtagcatgacaagtttaaattccagcagtggttttgtgtcaagttctgcagcaaagggaaacaaaatatccatgctggcttttgaggtggcaaatactatagttaaaggctctaatctgatgcgttctctatcggaacctagcataaagcatctgaaggaggtggtgcttcattcagaaggtgttgaaaaccttatatccaaagattttgatgaactgctcaagatggcatctgctgacaaaagggaagagttagaagtattcacaagagaggttgttcgctttggaaaccgttgcaaggatcctcaatggcataacttggaccgctactttgaaaaactggcatctgaacgaaccccacaaagttatctgaaagaaaaggcagaatcagtgatgcagaaactggtcacctgcgttcaaaatacagttatttgagcatgattgtcgtcttaaacagaaagaacaggatggcttgagttcaagaggagacaacctggatatactgaagcaggaattgaaggtccagagtaagcatgttaagagtctgaaaaagaaatcactttggtccaagaatttggaagaggtgatggtaaagcttgtagatattgtccacttcttatatttggagatatataatgccttcggtcgtcctgacagtgaagagccacaagaacctgccaaacaccataatagattgggaccagcaggccttgcattgcattatgctaatatcatcaatcagattgacaatcttgtttctcgatcatgtgcaatgcctccaaatgcaagggatacattatatcatagcttaccacctaccatcaaatctgctttccgttctaagctacaatcttttgaagtcaaggaagagcttacagcttctaggatcaaagcagaaatggaaaagactttgcgttggcttgtcccttttgctagtaacacaaatagggcacaccatggcttcggttgggttggagagtgggcaaatacaggatctgaattaaactgcaagatatcagggcagatggacatgtcccgaatggagaccttgtatcatgctgacaaggagaagaccgaagcacttatcctggagctagtcgtgtggcttcatcatcttatcagcaaatcaggaaacgccagtggaggtgtaaggtctcccatcaaatctccagtcagctcaccaacacaaaagggtgctgcaatcacactgttgtcgggcaaaacaaacaatttgccaccgattctcacccaagaggaccaggatatgctaaggggtgttaagtacaggaaatttgttccaggaataagcaaaagccaagagtttgacacaaagtcaagtcacagcaaacatagtaggttgagcaagagcaacagccactctccggccagtggcagcagaaaagacttgctcccagttaggaggtcttccatgcttccagttattgacttcgagattgacaggaccaaggctttggatctaattgacaggcttgacaacctaaaagtacaatgagcatgaagcttattgtggtcatccgcagttcttgaaaccccagccgcgatataaacagttatcgtgtatcagcagcaagaccgcccgttaggctctgcggttacaagataacaaacagtatgataagttggtgtctcagatcctgtaccgaatagaataggaaaaaatgttgtaaaaattacctgtcgtttctacctgtacaagaaatggaaagtgcagtttttaagaaaaaaaggagggtgaaagggatctaggtgttctatgttttcatggccattagactggaatggtgtgtatgaaccatagtactcccgtcccaaaatattagtcgttttagctcttgatttttatatatctatattcaaatggatgatgaatctagataaatatataaaacaaatacattgattattgtatgaatcaactaaaaagataaataaattttattttgagatgaagggagtatctttttttgcagaaaaaaataaaagca

SEQ ID NO: 34868 - DNA, 324 bp, Zea Mays
gggaaagggttgtgggccgttggatgcaaaggcagaagtcatctggggcgtcggttcttttctcccacaaaaccctagggggccaccccttttccctccaccccccctctcttggccgccaccctcccccatttttcccttggttggtcgtcccctctcctcccatggcagccgcccaccatttcttcctcctccatagatctccccctcccccacgcagcaaggatcgagaagaggaggagcaagatggattgaagaggaagagaggatgaaggagatgttctaccccccccatctattgcagattttcttggggaaactcta

SEQ ID NO: 34869 - DNA, 2224 bp, Zea Mays
agcacagaggcggcggtgcctagggcacagagaaggcggcggcgacatctatactggctgaccggcgccattccatcggtgtccgcttctcgcaggtcatgtgtgacctgcttggtgtggttgctcgacactctcctcaattggtgatattttcttttggagcccaagttcttcgtctaaggcatgactggacatggcattttggcgacatcagaatagcacatgctgctagtgttgtttgatattagagacactttttgatttgcttgcatgttttattttcagtttgaggggcacgagtggtcggacttgtttcagtttcagaaaactagggacacttcttttagtttcagaattgagagaagtgtattttagtttcaggattcataatgatagggacacttcactcagcatatgttcggttgtgattaaaaccatggttgtggacgttctccatagcatctttctactttattttagtttcatgattcaaaatgctagtgacacttctttctatttttattttatagaaagcaacattgtacatggcaggtctatgtaagcccactaggcaacgttttacagtgttgccaggtctatgtacagccggtctctagtgggcttacagtgttgcttccttgttgaattatgttgcatatatggcggggattaaccgaacaaacattttgagacaggtatttaaaccataaagatattaaatcccaaagggattaagtgaaaaggagggatccactcaatccctccctggattagatccacttggggaattaatccattgcaaccgaacaagcccttaaggggaaccaaaatttcagaagataggtatgagagttataaactattcttggaagaaaaggtgaggctacctgcacttgtttggatctcacagcaggaaacgagttgatgttgctaatccttcactaaaataggaaaactaggcagttttctagttaaattccatcttagggataggccctttgtagttagtacttacgaatgagatggacatgcaccctttctcttgatgcacacaagatttaatggtacaatatgaatacaatatgataacttccatgacatttcaaaatatatagttccactttagtaaaatagttttggatgcatttgctacaatttactgcatattcaaattgaggctaaccttgtggcgtcgataaccttgaggctagtcttttgtatgcatttgctacaatttagtgcattttctacacaaaggacgaggaggggtgggtgctgattcacttagtggcaagcttcgactactctcaaatcatcgacatcctgcttgagcgaagcatatcttatggtgagcgtgctgaacacgaaggacgaggagtggtgggcgctgattcactcagtggcaagcttcgactactctcaaatcatcgacatcctgcttgagcgaagtatgagactgacgcggcatatcttatggtgagcgtgctgaacacgaaggacgcgtaggggtgggcgctgattcactcagtggcaagcttcgactactctcaaatcatcgacatcctgcttgagcgaagcatatcttatggtgagcgtgctgaacacgaaggacgcgtaggggtgggcgctgattcaaccagtggcaagcttcgactactctcaaatcatcgacatcctgcttgagcgaagcatatcttatggtgagcgtgctgagcacgaaggacgtggaggggtgggcgccgattcactccatggcgtgctccgacaactctcaaatcatcgacatccaccttgagcgatgtatgagaccagcacgatacatctgtattcggttcaagcggctttgatgcagctccagctgaccatcctcttgtcagtgggaatggttacgagcatacctcatgcactatttgctgagttaattggataagaggtttgcttatgcttgtgaggaagacaacaagagttcaattagtcgaacatgaaaatagtctaaatgcttgcgcttaagcggggaaaaacaataattcttcctattgtgatggcaaaaggtgtcctcgaaaagaacagaaccaaaaaatgttcctattgtcacggctcaacctcatagaaaatcttgagttggcgtttttaagttctatggcaacgcacgtgcacatatctagtagtctaattataaaattaattatacatatgagaactaaaaggtaagacgaacctatta

SEQ ID NO: 34870 - DNA, 2545 bp, Zea Mays
ccgagaaagcagggcaaagcgtttgtgccgtgccgtggccttgtgggaagagaaagaaagggagagaaagacaggactggagaaggtgagtgagagggaggcgcgcagcggcagcggcggcggcggcgtcgccgtccatggcgaggaagcacggatggcagctccccgcgcacacgctccagggaagcaagtcctagagtatgttgtgatcggtgtctacactgccgtggtgttttctgtcgccatgctttacatccgctgcactagtataaaccctgctgatcctggaatcatgtcaaagttcgacaatgtcctcatcgatgcacctggaagtgctgccaacatacagggcacggatttgccagtgaaagctggtattggcgctggaacaatctccccatcggcaacatctacttgtaggaactctgtagatgggcattctaacgctggtgctttagctgctggagacacaaatctggatttaaggtctcagccgccaacaagtccatggagctgcttacttggagggcttgtttgttttttgtttgtgaaggaggattgtaggaaatacgatgattcagagaatcaagttgatggggaaggagccttgttctgcacgttatgtgacgccgaggttcgcaaattcagtaaacactgcagaagttgtgacaagtgtgtggatggatttgatcatcactgtcggtggctaaataactgtgttggacggaagaactatttcacgtttcttgctctgatggctaccagtcttctctggcttgctatcgaaattggagtaggcatcggtgttcttgttatatgctttgccaacaagaattcagagagaattattcaagacaggcttgggaatggtttgcctcggcctgcctttgctaccattgtagcgttttttactcttctttctctagtcgcttgcatacctttaggggagcttttcttcttccacatgatcttaatcagaaaggggatcacaacttatgaatatgtcgttgcaatgagagctatgagtgaaacacctcaagaggaggaagagcacgaggaggaggagggggtaaacattgtttattccccaacaaattcagccaccactgcgttcagtggtgctagttcactcagtcttcactacaagggctcatggtgcacacctccaaggatttttgttgatcaggatgaagtgatcccgcatttggagccagggatggtgccttcaaccatcgatcctgatgctgttggacgcgccgaaagagccaacaaagccaagaagcaggtcaaaatcagtgcctggaagcttgcaaagctggacagcaatgaggcgatgaaggccgctgctaaagtccgggcatcatcgtctgtcctccggcctattgattcccgccgggttccaggtgctagccctggctccagtggcaatgccagcatgagaagcagcatgagtgccggttacagcgccagtggcaccaaggaaaggggggctggtatgcttcagagtccctcgtatcctcagagccctgcaagccaggacgactacgagtcgggcacgcagagtggtagcagcaggaccagcccggtgcacattcacagacccgccgcaccgcacgctcagatcaacgtgccactgccacctcgtgtgccccaagcacctccaaggcctgcgccggcgttggcaccgaggccgcctgttccagccacgcagatgtccaagccaacgttccagtcggcaacatcttatgtccgtgagaaccggaaagtatcggttgtttgggatcaagaggctgctaggtacgtgtccgtggcaccggcgcccacaaggccagtaactggcaaccatggaagaactctcgcatccatgaatccttcgtcctcagcgttgccatctggacagccgtccgagaggttggcatacactgggcagtcgatattctttggtggaccgcttctgggtgctgctgctgctgaccctcggaggaatgaagctgtcgcgggagtgccgccggagacaaggaggaacgatggcactgggggagagaggagacgaactgcggagtccttcccggtgtttgctccaggatcccttgagaagaacccgccatccaacaggtgatctcgtggcggtatggcaccaccttttctgaccatcgtgaccaagacaatgggacgatcgttactcaacaaggagccctggagagtccaagggtgattactgtgagttcatcggcgatcgtcaccaattccacacgcagagaaggcgtcacagggacatgctacaagtctgaaatgggggcatcctagtactgagcctgaacccgaggttgagggatgtgagtgtctgagtgacaaatgaaccgtgcaggtgtcaagaaagctgaaacagggaggacacacacaaggcgtgagtgactgattggggtgtaaatgttttgctcgtttcgttggagtaacttttgggttagacgtgtgttttgtagagacaatataagttaggtcaagacaatggctattgattaggtgtatatggatttcatgtctc

SEQ ID NO: 34871 - DNA, 888 bp, Zea Mays
ctcctccgtccttcaccgcttccttgaccctctctctcccccaccccacccacggaaagcttcgagctttcactctataccccagggagaaggaaggaagccggcacagtctactggccttgtggtgccggcaactgactaggatcgagaaatagggttcttggagagcggccggtccatggcacagcggggcgagctggggcggcagctcccgctgagaggccccctcaaagccctagaggcagacatccaccacgctaacgccatggcagatgctattcagaggaattatggtggcgcatgtgtgcagatgaggctgtcgttcagctccctggctccattgtttttgtacttcatccaatggctggactgcggctgctgttatgcccttcccagctatttaggattgtttcacattctcatatgcaaggtttatgctgatggagatagctcagtgtcgacatatgaaaggcgggcaagccttagggaattctacgcaattatctatccgattctgcagcagcttgagagtagtttgatcgagagggacctgaaagggaagggccgatgcaaggatatagtgagtaggaggaggatggaggattggaaaaaggtttccggtagggatgtggaaagggaggatgaatgcgggatttgcatggaggcatgcaccaagatggtcctgcctaattgcagtcatgcaatgtgcataaagtgctatagggactggtataagagatcagagtcttgccctttctgccgaggaagcctcaaaagaatccgctcgacagacctttgggtgcttacaaattccaacgatgtcatcgaccctgcacatttagaaaaggaaaacccaaggaggtcctggttgaggatacgaatcaagat

SEQ ID NO: 34872 - DNA, 1185 bp, Zea Mays
aaaaggcccatggggctttcaatttagcgggtgctcccatctttcgttaggataagaggaaccctagtccctagcaacgcctacagcgtcacggaacaccggcgaaccaaacctcggagaaaccctagcaaggccgcttgcccctctcaggcgcgacacagcatcggcgactagcgatgacaggatatcgcagccgcagtccgagccgaagctacagcccacggaggcggtacagccggagccctcctaggcgcaagcgctacgacgatccacgcgaccgctaccgctgggccggggccggcggaggcggggaccgacgtggttacggtcggccgttggcgcagtccggtctcctcatccgtaatatctccctcacagccaggccagaagatattcgagctacatttgagcaattcggccctatcaaggatgtttacctgccaaggaatttccacacgagggaacttcgtggttttggatttgtcaaattccgctaccctgaggatgctgcagttgccaagcgtgagatgcatcatcaagtcattggtgggcgagaaatttcaatagtttatgctgaggagaatcgaaaaacgccacaagaaatgcgcatgagaacaagaactagtggtaggtacatggatgaaagatacacaagactgtcaagatctccaaggtctcgttcccactcttattcaccaccgccttctccagttaggcgtgacttcagggagcgcccggatagttattcccctcagtactcgcactctccacgccctcgggacagcaggcaccacaggtcagatggtcgctctccaactccaagcctagatgaccacaaacctaaggcgacaccagtcaatggtggacatggtccagcagttgcatccagatagtatgatgccattatggatgccttgaattgtgttcggaggctggagactgcagactatcttttcaccaatcttctctaagagatgagtagggttgtagtaaacagatacttggtagttgtattacaggtgatggtttcggttatgaggtgcgctgttgcttttgtgacgctgctttaatgctttcccaaccgagggtagtagggtaccgtcgtggaattttgcgtgtttgttttttggctacaatattactaatactagtaacttgctcgcttcgagcgcgagtctttatcta

SEQ ID NO: 34873 - DNA, 3910 bp, Zea Mays
gacgaaccctgccccaccaccaccgcctccgcctcgtcgtcgtggggcgctggcgacgcgtttgttttgttcatcacacgcccgcgggtttcctgtttcttctcttcccccggccgcgcgcgtccgacgcggggcagcgagccagcgaccactctcgcctgcctgcctacctacccatcccacacccgcctggggaaaatcaaagcgccgccctcgcacgcactcgcgctccccactcccctcacctcactcctcgtaacggctcggcaaaacccccagcacgcggtcgacgagacgagagccgagaaacagtccactcctcactcccgttccgtttcgtttccccagttccgcatggccgccgcgaggtagcggcgcaggcgctcaccggggatggcggccggagggaggggcaagctggcgccggcggaagtggcgcccgcggcgtttccctcgcggggcttggcggtggcgggggccgcggcgggcgaggtggtgcggcgcgtgaggcccacggaggcctccgagcgccgccgcgcggaggtcgtcgactacgcgcggaggctcgtcggctcagcgctcggatgcgaggtttttgcatttggatcagttccactaaagacttaccttcctgatggggatattgatctaactgtccttggaaatacatcttatgatagtactttggttaatgatgttttctgcattcttgagtctgaggagcagaatagtgatgctgaatttgtagtgaaggacttggaacgaattgatgccgaggtcaggctcattaaatgcactattggaaatattatagttgatatctcattcaaccaaactggtgggatctgcgcactctgcttccttgagctggttgatcggaaagttggaaaaaaccatctatttaaaaggagcatcatattgatcaaggcatggtgctattatgaaagccgcctactaggagctcatcatggacttatatcaacctatgcactggaagtacttatcctttatgtattcaatctattccacaaatctctccacagccctgtggaggtttctggaatattttagcaagtttgactgggacaactattgcataagtttaaatggccctgttgctttgtcgtctttgccaaacttaattgttgaagctacagttacacataccagtgacttattgtttgacaaagaattcctcaagagctccatggataaagcaactgtacctccaaaaaattccgattcatgctatccgaggtttcgtcctaaacatctaaacatagttgatccactgaaggagtacaacaatcttggcagaagtgtcaacagagctagctttaatcgcattcgaacagctttcttatatggtgctcgaaagcttggtcatattgtcacgttaccatcagaagttattcctgatgaaatttatgagtttttcaaaaacactttgggaaggaatgaactaggggcaagaccagatattgacagcaattatgcttttcattcttcctttggtactgctgagactattttggaagatatatcaagtatgaagatttccgatggtgaagatgagaacataacctgtcatctttcaaagagcttgggtgataaaaacttatacgttggaatgaatggacatacacatttgagtaattattttccaggagtccgtaacactgcattaagtactggtttaagtacaagagcatcccattttgttcataatgcaccaaaactacattcatcgttttgccatgataacagtcacggtgacagtgaaaaatgttacttgaaccatggaatggagcaggtatctcactacactgctaaagccttctgtatagatgataagacaacaatacagtcacaagtttttgtgagcaacccatcactattgagcacctctgctgctgtcactgcttcagaacttgccaccaaacagaaaaaatggagtactgcctatgtggagaaacaacatttttctccctcaccatcaagcttgccagatctttcaggggatctggattcacaatttagatgtttgcgtcaagttcagtaccacctcgaatacttgtttgatgggtttttgcagtcagttcagggagcatcttctgctgataagtttcacaaggacccctttcacatttctgcttgcagtatcttgttggacagagatacaggatcgccaaggttgcagttgctttcacctgctcgaagcaatggaagggatccatctcccgtttcttgtagtcagagcacagaatgtgtctctcagcattcacagaatggaagcccatgggatatggcttctcaacggagtgtctctgtgccctctggaatcgatattccaccaaatggagtctcaccgtgttcttcttgtgctgattctgaggtttcttctgtttcatggtttcatggctctggggatagcgctatgatgcatggaagtggaaaagacacatactttacaagaaagagctgttatactcgctgggagcgattggcatcttcaagaaagaatgggaaaatactgccaaatcaatcagtgaaatataaaagcaaccagaagtcagctccaggagcaagatttgtgtctcacaaggagcaggccgcaatagacagtagaaccaaagaaataacaatcgatcaagctttgaagatacatgaatacattgaatcagacatgaaaattgttgaaaaactcagttgtcataatcaaaaggaagtccgtcatgacaatgaagcaagacaattaccaaataacaaccaggatgtttgcttgaataagaactttttgcaaaaccgatatcatgtggagtctacacgagctcccagagcaacacatcagattcctaaatatcaaccgtttaaaattcaaaatactacagagtgtgatagagctagcctaagtaagaacatgcccagaaagcacagctgtggcacttggaaagagtatgagatacttgaccggccaacaaagcagagaccaatttgtggcccattgaagctagaaaacagacatgtctgggattgcacaaagaagatatcagctggaaaccagaagtgtaataatcataaggattacctatctttcgtaagaggtgcagtgccacgcagccacgcagcaagcactccaaatggtttagaaaaggaggcggctaattcaaataaatccgctgacaacggaagtcccgtaaggccaatcttgccagagttattgctttcttgtcatgacatcaatagccaagagaggtccccatcatctagtgctcatcaatcatacttccctgctgcaaatgatcgaccactggagactatagagtttggatctttgggaccttttgcactgcctttatcctcattgaagtcaaatggaactactaacacagaagctacaagtaaggtgtttacagatgcctctccatttgtgttacagaggtccagggccgccgcaactgaaaacagaccaccaggactttgcaaagtgggagacgaggacgaatttccacctcttagagctgggatccggtgagaacttacgtgtaggtcttacggatacaactgatcatagagttagcaaaaggagctgaccagttgagctttgtgcagagtttttttgggcgcctcatagaaatgaggattattgcagtggcatagtacagcctaccgtgtaaaatgtcgtcggccccttatcaatctctctctttttcccgtagttgtcactagagttacaccgaacaaggtttatacagctaatgttcactagtataacttagcaaggagaaagatcagatacaaaaaaaaacggagtacttacgtttaccttatcagtctctctgtttcaggtcttcttgcctttgctttgcttcattgcagtatatatagatagatgatgaaaaatcggaaa

SEQ ID NO: 34874 - DNA, 1463 bp, Zea Mays
attttatcccaggagaggtcgctgcgggcgagctggctcgctcacccacccttgcccgccgtttacggtttagccgcgtgctctctctgtctccctccctccctgtcggggacaattcggctaccgctgccgccctacgccaggttcccagctcttcgccaggcccttctccggcgacgagcacccaccaggccaccagcgagacatcatgcaaggataggttcagttgattttcctgttaagaagaacgtgaagtcatcccaagtgcaaaacgcgacatgttttgttggtttagtgcggcagttgcagtgcagacggtcagcaaaaagccatatcctgaatgtaaagtctgatacagtagcccaccaaaaggtttctggtgtaagctggagtttggaaaatatgccacgaagaataggatgtgtagtctctggactaggttttgcagcgtatgggctggcgagtgctgagggtcctgttaacaacaacatagatagcactgaatctgccatgtcatcaacaaatttatctcatgggaaagaagttcacacagactattctgttactggcattcctggtgatggaagatgcctgtttcgttctgtggttcacggtgcctacattaggtcaaggaagcccatacctaatgaggatcatcaaagaaggctagctgatgagttgagaacaaaggtcgcagatgaatttatcaagaggcgggcagagactgaatggtttgttgagggggacttcgacacgtacgtatctcagattaggaagccacatgtctggggaggcgagccagagctgttgatggcttcacatgttcttcagatgccaatcaccgtctacatgcacgataaagccgctggtggtctaatagcgatcgcggaatacggccaagagcacgggacggaagctcccgtccaagttctttaccatggctatggccattatgatgcgctgcagataccaggagagggtggtccgaggtcaagactgtaacgttagtggctctgaatctaaatgaaccgaatgtaagtaaaatacaaaagaagaaggaaggccgaattgaaagaatcgaaagtggaagaactggacgtgccttcaaacaattagaagacaatcctagcaggttagatatttagaggtctacgaccataatagttgttctgttgccaaagggaatatagcgtggttgagagagagaaacatctggagaaaaaggaaaaaaaacaaaatatgcacctgttagatcagatagtagagaagaatcgaatgcggaatccattggctcaatggaaatgcagcgatttttttaatgcaaaatggtttacagaaaaaatctggagaaaaacaaaaacaaaatatgcacatcttagattgaatagcagggaggaatcgaatgcggaatctattggctcaatggaaatgcagcgatttttttaatgcagcgtggttgacag

SEQ ID NO: 34875 - DNA, 2243 bp, Zea Mays
gttgcagcctattccaccaccgacgctgaaggccatacgcccccaatcgaatcgatcacatctatgccgtcgatcaccagaggtgggcgtggggggctcttctccacgcaccggggcgcgctcttgtggctccgccgttgccaaagcccactcttgtcgacactagccggcggcggaggccggagcgacgcgccacatctgcccgtactcatcgtcggagctggccctgttgggctcgtcctctcattcctcctcaccaaattcgggatcaaatgtgcggtgatagagaagaatgtggagttcactaggcacccacgagcgcacttcatcaacaaccgcacaatggagatcttccgcaagttggatggcttggccagggacattgagaggtcccagccaccagtagatttgtggaggaagttcgtatactgtacttcactctccggttctgtccttggatcggttgatcacatgaaacaggaagattttgacaaggtcattagtcctgtatccgttgcacatttctcacagtacaagttagttgatttgctactcaagaagcttgaaggtattggtttccagacatgctttcccagtgagattggtaactcaacacaagatttggtactggaaagcaagatattgatgggacacaagtgcacatcccttgatcagactgatgagggcattctggttggagcatcagttaacaatggagggatgataatagagagaaagctacactgtggtcttcttatagggacagatggcgcaagaagtacagtgcgtgaattggcaggtatatctatggaaggtgaaagggatttgcagaaactggtcagtgtgcattttcttagcagagatctaggcaggtatttgtccagtcagaggccagggatgctgttcttcatttttaatccaggtgcaattggtgtactagttgcacatgacctagagaatggggaatttgtattgcaggttccattttatcctcctcagcagatgtttgaagattttagtgctaagttgcagagaagtacatctgctgcaataatcgagtaatcctctctggtgatgccgcacaccggtttcctcctgctggtggttttggaatgaacaccggtgtccaggatgtacataatttggcttggaaattgggcttactgctgaatggtgtcgcctcaccatcaatattacaaacttatgagtcagagcgccggcctgttagaatcttctcacacgctttctgttcatccaatcgtggagaatttcaaggcagctatgtctattcctacaacccttggccttgatccaactgttgcaaactcagtgcatcaagttataaatagaagcctcggatcaatcattccaagaaatgtgcagaaggcagttctagaaggattgttttctcttggtagggcacaagtctcagactatatcctgaatgagaaaaatcccattgggtcgttgagactagcaagattgagaagtattctcgatgaaggcaaaagtcttcagctgcagttccctgcagaggatcttggcttccactatgcagaaggtgctctagttgttgaagctagttgtgagaagactcatgaaggagaaaaactacagcattctaagagggcatcaagagagtacatcccatctgctaaggttggttcgcggcttccccacatgctagtaagagaagtgcctgcttcgagtgagggcgcgttctcaacactggacctagtgagtggggataaactcgagtttgttctcatcattgcaccagtgaaagagtcatatgagattgcccgtgccaccctcaagatagcagatgagcttacgctatcagccagagtatgtgtaatgtggccacgaggttcgactgatgctgaagtggaagagagcagatccgagttgacaccctggacaaactacatcgatgtcgaggaagtgcctagggtgtcgggtggttcatggtgggagatgtgtcgtattagtaggaagagtgtccttttggttaggcctgatgagcacatagcatggctaacagaactggacagggtgagggatgctgagtcagaaattaggagggtcttctctcatgttctgtgcctaaatagccaccgggtgtaagaatttataaatttccttccatttaggctttgtttagatactttggtattcactttaatccacatgtatggaagcggattaggttataaattaaattaatttacatcctaatccac

SEQ ID NO: 34876 - DNA, 1838 bp, Zea Mays
acaccaaccaccttccccatcatcagcaatctctctctctcactctctcacggtcgattgattagtccaaagctggacggagaccttgaggaatccatcccgaactgaacggcattattctttctcgccactgttactgttctctctctctctctccaccttccaacagaattcacaggaaggtggttggggttgggcggaccagcaaaggcacatgggccgctccttcagtagtacagcggcgcctgttcggcctgctgcgctcgcggcgccgcccctcctcctcttcctcttgctcgggctcctgggagctgcggctgccaatgtcggggactcctgctccacgagcgcggactgcggcgccggccagtggtgcttcgactgcgagccccagctctccggctcccactgcgtccgctccgccgccaccaaccccttccagctcattaacaactcgttgccgttcaacaagtacgcctacctcacgacgcacaacgcgtacgccatcgtcggggagccctcgcacaccgggatcccgcgcgtcaccttcgacaaccaggaggacacggtcaccgaccagctgaatgtgataacggagtccgggcgctgatgctcgacacgtacgacttcaagggagacgtgtggctgtgccattcgagcggagggaaatgcaacgacttcaccgcgttcgaacctgcactggacactttcaaggagatcgaggcgttccttgcagcaaacccgtccgaaatcgtcacgctgatcctagaggactacgtccacgcgccgaacgggctgacgaacgtgttcaacgcgtctggcctgctcaagtactggttcccggtgtcgaggatgccgccgagcggccaggactggcctctcgtcagcgacatggtcgcgaccaaccagcgcctcctggtgttcacctccgtcagctccaaacagagcgcggaaggcatcgcttaccagtggaacttcatggtcgagaacaactacggtgatgacgggatggatgccgggaaatgctcgaaccgtgccgagtctgctcctctcaacgacaacaccaagtcgctggtcctcatgaactacttcccgtcgctccctgtcaagtttacagcgtgcctgcagcactcccagagccttgttgacatggtgagtacgtgctacggcgccgcggggaaccgatgggctaattttgtcgcggttgattactacaagagaagcgacggaggcggggccttccaggccacggacttgctcaatggtagactgttatgcgggtgccaggacatcagggcatgctcgcaaggttccggtgtagtatgttctgcataagtccataacaaatagagatcaatttgattggagtggcgaaagaagacagagagcacagagggattgaaagctgtgagctccttaagccggcgtctacgtctttgtataggacagggatcaccgttgccttggtttgcaagcttaaagataaagaagtctagatttagttgttatattttttttatctttgtctaaaccaaatcagtatatctcttatatttagaaagtacatctaatgttatgtatacagagagaattttgcaagcttaaagataaagaagtctagatttagttgttatatttttttttatctttgtctaaaccaaatcagtatatctcttatatttagaaagtacatctaatgttatgtatacagagagaattttgcaagcttaaagataaagaagtctagatttagttgttatatttttttttatctttgtctaaaccaaatcagtatatctcttatatttagaaagtacatctaatgttatgtatacaga

SEQ ID NO: 34877 - DNA, 3941 bp, Zea Mays
atggcggcagccgttgccgttcttcgcgccgccctccgccggggccgtccggcagctgcgtcgctactgcaccgccttcccaacccctctgctcggagcctcccgccaccgcctcctctcggtcgagcgcttcgtcccctctcgcggcttggtttctccgccggattcgggcactcctcctccaccgaggattttggcttcggctactcccccgccaccgaggattcagcggccgccgcgaagcccaagaccaagaccaaggccaggaagcaccccatgaagcagtcgcgcttcgacttcaccaaggtggacgccgcgcttctccccaccgtcatcctcgtcggccgccccaacgtcggcaagtcagccctcttcaacagatttatacggaggagggaggcgttggtgtacaatactcctggggaccatgtcactcgtgacatccgtgaaggagttgccaagcttggggatctccgtttccgtgtgcttgactcagctggacttgagactgcagcaacatctgggagcattctcgctcggacagcagacatgacagggaatgtattggctaggtctcaatttgccattttcttgattgatgtgagggatggtcttcagccgctggatcttgaggttgggcaatggctgcgcaagcatgcatctggtatacatacgcttgttgcaatgaacaagtccgagtcacttgatgagcatggatttctgactgctgctgctggagaagcacacaagttggggtttggtgaccctgttgcaatatccgcagagacaggcctggggatggcagaactctatgagatactcaggccattgtttgaagaatacatgtttcagcttcgaaataatgacctcaaccaagatgatcctatctcggaggttgaaactgaggcccatgatggtgatgagagcaagttacctttgcagttggcaattgtgggacgtcctaatgttgggaagtccacccttttaaataccttgttgcaagaacagagagttcttgttggtccagaggcaggcctaacaagggactcgattcgggctcagtttcaatttgatagtcgaaccgtgtatttagtggatactgctggttggatggaaagatcagggaaggagaaagggccagcatctttgagtgttgtgcagtctaggaagaacttaatgagagctcacattgttgctcttgtgctggatgctgaaaagattgctaagtccaaaagtagcatgaatcatccagaaatcgtgatagcacggcaagcaatagaagagggccgtggactagttgtgattgtcaataaaatggatctccttagagataaccaaacactgtttaacaaggttatggacgctgttcctagagaaatccagacagtcattcctcaggtgacaggaataccagctgttttcgtgtcagcgctggaggggagggggcggattgctgtgatgcgccaggttatagatacctatgagaagtggtgtttaagattgtcaacatcacggctcaaccgttggttgcgtaaggttatgagcagacattcctggaaagattcagctactcagccaaaagtcaagtacttcactcaagtgaaggcacgaccaccaacatttgttgccttcatgagtgggaagactcagctttctgatacagatactaggttcttgacaaagtccctcaaggaagatttcgacatcgggggaataccgatacggatcatacaacgttctgttccaagaaaagcttatgctaagcgcaacaacacaaggaacactggccctagggttgtcaggatgaaaacagacaaacggacagcggtatctgacccagccctgtcatagagggtgagcaccagtatcagccgcctaacctgaagaagggaggtcatgtttcgcgtttgagctatatatatatgcttctcatggggaaacgggaagtgaatgtttttctgactcgggaagttatacaaagctatgagctagccggtccggctgcctgcaccgcatgctcaagaagaagaatgactgtaagaaacaagcccagcaattcgaaggacagcatcacttctcaacattgggtgcaaggtggtattgatgagcgtcaagcactcaagttcaccccagaactccagatcagatgaagaggactcctatgtggttcaaaaggatgctatcaccgtcgaagaagactgaaaatagtccagtatttaggttttttatggatctgaatgatgcagtatcctatgtaaagcgactaaatgtgccaagcggcatggtgggggcttgtcgccttgatgtagcatatgaacatttcaaggtccaggctgccaataagctattgaagtcacttccacaaaggggcagaaggaaaaaacttgatggggttcctgtttttagtgcgcaaaacttgaatattgcagtggcaacaaatgatggaattagatggtacacaccatacttttttgataaaaacttgttggacaatatccttgaagcttctatggatcaacatttccattcgataatgcaaaatcgccatacacgtcgtagaagggatattgtcgatgatagtttaacatcagaaataattgaagaaagtgctgaaagcttgcttgagcccccagaggttcaagaattaatgaatgagattggcccagctggtataccattaaatgttgtaacgaaagctgcagagattcagtttcttgatgttgttgataaagtccttctaggaaataagtggttaaggaaagcttctggcatacaaccaaagttcccttatgttgttgattcatttgaagaaaggactgctgtttcaattgccaatattgctactaccagcagtttaactgcttcaaacgacgacagcagttgccagaataatcaagaaactcaatcttccgagccaagtggtgataacagcagctacagaaatcacaataatgaagatcataatcactttccgtttagcaatctgcttccaaatatatggccagggcatgacagaaagttcaaatcacaagagagtgacaataagtttagcagatatgatgccgacgtgaagagtaagttacaagcaaaccctcttcttccgaaaatcaccatggttggcatctcaatgggtgatggtgcacagatgagcaaagccaacttaaagaagacaatggaagacttgacaaaagagttggagcaaacgagtgaagaaaatatgttcggtgatgaaaaagacccactttttgttgccaacgttggtgactactcaaggataacaaagattagctctgcatgaggctcgttgaccaacaggcgacagcaagggtgttgtactgaactgctaacgaagtctacagtccatgatactgatcttagagggctctactgatataatgatgcaaatcggaggtcatcagatcatatggacattcgactgtcgaccgttctgactttagaggctatccaacgtcaacagttacaagccaatctaaattttcggatatgatttgccaaaaggatgattgtaaatagaaaagtttgcagaatgtccaccatgcagttaggcgtgaagatctgaagcaacatgttgttggatttctaagatcttagctcgtaacagctgtagagtatggtggtatatagcttcaggattgagatgggggtcacaggagtctgtcaggtgagcagagtcgaataaattgatgtgggtagcatttttcttcactagctgcgtatcggatctgagtgtgtatggcgagagttacggtaaatgttggttcgcatataggtccttggattatttattgtacgcgatatggtgaaaggaggttgtagctaacatgttgtgtctccgatcatcatactgacattattgtctctcatgatcttatacttgcttataaatagaacttaaaactttattttgagttgacagcatg

SEQ ID NO: 34878 - DNA, 578 bp, Zea Mays
ccttaatttcttatcccctcgtcctctgcgtcttgttgcacttgaagcttcctccgcggcctcccgtcgagcaaccatggcggcggcggtaaccctcctccgccttcctctcgcccgactctcctaccacctccgctccgtaccttcctctcgtctcccgtccccgcgcctccgtatctttgcctcccatcgccttttctcctccctggaccatggctccgcctctgcttccgcctccgcggccgtggccgaggttgtaggcgtgccggacgcggaggagtcggtagaggaggaatctgcggccgaggccgaggcggaggcgcccaggtcgttcgtgctcccacggctgccgcggccgaagctgagcgtgaaggagcggaaggagctggcctcgtacgctcacggcctcggcaaaaagctcaagtcgcaacaggtcggtaagagcggcgtcacaccgaaccttgtctccgccttcagtgacaacctcgagtccaacgagctcctaaagggtttcccctctcgttgatgtctctttccggttacagcatacggttgctccagttaatggttggttgctg

SEQ ID NO: 34879 - DNA, 2389 bp, Zea Mays
acagcgccagccgcccaccaccaacaatgccaaaatcccctccctctcttggtctttcctatatagccgcaggagagggcgggggatcggagcaggtgataggggggaaaatcgggaagccttcggagaaaagaaaagggcaaccgagaccgtgagagaggggaagcggggagccttgtccgatccggtgcagcccgcgcgtcaaactcccggataactgtggcatatgatcccaaatcttgatccacttgaagtgttcagtacattctgtaggttagtaccaaccttttgtgtaaatgtcaaatgaacatattaattatgtgcttcaggtctctgtttttttcttgatctgtcatttccttttttttgttatataggatgtgctcagttaggccattttttacagtaaacctactttatcatttttttccatgccattgggaagctaatgtgaactttcacggaatgacatttccttgggtacaagcactatatttaccttgtataggatagtcttatttaatgttgccactatgtcttttaggacaatatatattgccatttatggccagtaattctcgatttgttttattattgtatttgttatatagaatgtgcaatttctctgcaactttcattgggcggcggtacttatctgaatgtttatgtcctactacctttttagaagtatgttttgaaggcaggagatcctttcctttgaaccagaatgccctctttgaaactaaaatatctgttgggaaccaaaattgtcccttaaatgatcttaatattaatttaataaacttcagtggaactttgatacttattattgacttatcttctttcttggtcttggcacttgcttttgtgtttatatagaagaaaaaaaaatctgttctgatgagtacagaaaaatgtgttttcagatttttttttttgcttaaactgcttaacttcttaacttgaaacaacaacttattttttcaacaattctaactgttaagtgaattcaacacagttggtttcaagatgacaagtaagaaaagtaacagatctacagtcacaccacacactgctctgcatatggaatgggacaggatttcttgccctatttgtatggagcaaccccacaatgctgttttacttatatgcagttcatacaagaatggctgcagatgttacatttgtaacacaagccatcgtcactctaattgccttgatcggttcagaaaaatgaatggtgatagtaagacgttcacggagcccaagactcggaagacatgttgataatgagggatcttatcataccgatgtaaacagtggcccaaatccagatgacatatctagatctgaatttgatttcgctaaccatcaagaatttgagaactcaaccttaactgttgaaggtggtattgtatcgggggaatgccatgatgccatgcaaagttctgctgaagttaagtgtcctctctgtagaggatctgtatctggctggattcctgctggagatgtgagacagtatctagacaataagttgagaacttgctctcatgaatcctgcaaatttactggaacctatgaacaactgcgtgaacatgctaggactgcacacgttcttacagagcctgctcatgtagatctgtccaggaaaagagcttgggatcgccttgagcgtgagcaggaggtcggtgatgtcattagtgcaatcaggtcccaggtacctggggcaataatagttggtgactatgttattgagactagagatgacatgtccccagacatagactctggcgacgatgaaagtagtgaatggtggtcagaccaagttgaatcaccagatgctagacttgatcccccaagggtttggccacatgaagccctagggtcacctagcatttggtcagatgaaaggcgtaatttggcaaggataccacagaacaacagagtaccacccaggttttcattaggcagtaggcgacccctgcattcaggttggcaggggggtcgtcggtcaagcacacggaatcgactgcaacggggcttctcaaatcaccactctggacaccgtagcaactatcgtggacatcgtcacttgcttctggataggtcctatgttggtacccgagattcaggctccggcaggagcctaaattcgtcagtggtgccaagcaggcggcagcggctgcggtacacgcacagaagccactactgatggaagcaatatcagttctacgtgtagagctttattggttaatccattcatgctatctttgtaaatatatgttaaggttatgtttttatttaatgtatttaatctgtctaaacaatctatcctagatgcaaaaagaactacattatttatcataaatgtcatttgtggtgtctctgc

SEQ ID NO: 34880 - DNA, 933 bp, Zea Mays
gtacaacactgtgaccaaggaatcgggctttagggatccctatgtccagtaccaccacctcgcctccgccgccggccgccggggaccatccccgcgttctgctccgaggtttcctctcccgtgagacatgcaaggagctggagttcgtgcaccggagctgcggcgcagcggggtaccgcccctcggtgatatcgacatctctgccgcacctggcggccaccggctgcggccacctcctgctcccgttcgtgcccgtccgcgagcgcctccgcgacgctgtggagtccttcttcgattgccacttcgatctcttcatcgagttcaccgggcttatcagttggtgcaagggagcttctattggatggcacagtgatgacaacaagccttatcttaggcaaagggcattcacagcagtttgctacttgaacaatcatggagaggactataagggtggaattttgcagtttcaggatggtgatccttcctgtattgttccagttgctggtgatgttgtcatatacacggctgatactcgtaatgttcattgtgtaaatgaggtaactgaaggggaaaggttgaccctgactctttggttcactagagaccgtgcttatgatgaggatccaaaacttcttaactttctgtctcagacatcattgagctgtgaaccaactgagcaaaattcttatattcctgtaccagcttctgataacatgtatcgcttttcttgtgatcagtctggttttgacatacgatgtgctagagtgcatattctggggtttagttttcactcaagtagtggtgaatgcaatatatctgcgtcaccagctgaagatgacccaatagagttgcttggaaagcaactgcggctcgggaggggagatgatgtctttgagaaaatattttctaacagcttacatgctcttcaggtgg

SEQ ID NO: 34881 - DNA, 3897 bp, Zea Mays
cggaggcacccgcaccgcacgccgacccgcgcacactcccccgcggccgcgcccccgatctcgccgggccggtggccctcgccgccggcgacacccaccgcccaatcgcccacgcccggggggcgatggaggcggccttcgacgcctacttccgcgccgcagatctggaccgcgacggccggatcagcggccaggaggccgtcgccttcttcaagggctccggcctgccccagcccgtcctcgcgcagatttggacgtatgctgataaaaaccggtctggttttcttgggcgtgaagacttcttcaatgcactcaaacttgtcacagtagctcagagcggccgagaattgacacctgatattgttagatcagcattattcggcccagctgctgcgaaaatccctgctcctcggataaatgtttctacagctgctcctcaggcaagtagcgtagctaacctcccgaatgccactcaagcaccaggtcctgttcagcagactcctgtcgtaagagggacacaagggcttcctggtatatcgtcaaatccacaagtcaggccaccacaacctccaaatgcaaacactgcgccccctgctcatggtcagggagttgcctcaaggccacccgtaggaagtggtcccactgggataaaccatactagctcaaccacaccaagtctagcaactgattggttcagtggtaagagaagtgcaagtccgttgggtgcaacttcacaaactccaacaagaggtatttctccacaggccaaccttagcagtgcgggaatctcagtgcagaattcagctcctgtaccaggctacaattctcatacaccaggtgtcaatgcaatttcaacaaatttgaacgtgatgtcttcccaaccatcagtcaatgactccaaggcgttggtgccattgggtaatggattgtcgtcaaactcaacttttggtgctgaccctttctctgcaactccacgaccagaacagggttcaccttttccccccaacgttccaaacaatctgctcagctctacccctcctgcctcagctgctggacatcatcaccctcctaagccaatgcaggctggtcctgtgcagagtatatcctcgctttctcctcatactagccagttgccacacaatcagccacctccgaggcaacaacaatttaatgctacaccaagtgctccaggaccagtgagttcaaatattcccactggacaaattccttcaagcccaagccagcctcaggcaccatggccgaaaatcactcaagtagatgtcagaaaatacatgattgtatttatcaaggtagacagggatcgtgatgggaaaatcactggtgaagaggcaaggaatctatttttaagttggaggcttccaagagatgtcttaaggaaggtgtgggatttgtccgaccaggataaggatgggatgctatctttcaaggaattttgtattgctgtgtacttaatggagagacatcgagagcaccgtcctcttcctgacacagtaacagatgctatttgggctgagggcaccgcactaccctctactggacagtttgcagaaaatcctagtgcccccgctcctcaagcaagtgccggatatacaagtagaacaatgcaaggaccacatcatgggatgcttccctcatccatgaagccaccatctcggaggcctcttcctttagatgctgacgatactattaagccagagcaacaaaagccaaaggtccctgtcttggaggaacatctagttggccaactaagcaaggaggaacaagatacactggatgcaaagtttaatgaagcttcagtcgctgataagaaagtccaagagttggagaaggagatccttgattctagagagaagaccgagttttatcgcacgaagatgcaggagcttattctttacaaaagtaggtgcgacaataggtttaatgaagtctcagaaagtatgtctgctgataaacgtgaggtccaatctctttctgcaaaatatgatgagagatgcaagaaggttggagatgtggcatcaaagctaacaatggatgaggctactttccgtgagatccaggagaagaagttggaaatttataacgccatagttaagctgcaaaaaggggatgatagcgatgagaagtttcaggagcgggctaataagatacagtcagatcttgaggagcttgtgaaatcattgaatgagcaatgcaagagatatgggttgagagctaagccaactactttagtggagcttccttttggttggcaacctggaattcaagagacagcttatgcatgggatgaagaatgggataattttggagatgaaggattctctataataaaggaactaacagttgaagtggagcctcccgttgtagcaaagagtcagcctactgaggatgttaaagcatcttcaaatggggcatcaacagaaaaagaagacaacaagggtgataaatctgctgctgctgtggagcaggttgtcaaacctgaaacagcaccttcgaatatcaaaccagagtcagcaaaaagtcctccagttagtcctgtcaagaacaaagaggatggtcccgatgaacatgataaaaagcaatctggaacaaatgatgtctcaccacgtgagagtatcagcaaccgtggagcaatggattcccctactcatggagataaaacccatgatggacactcatggggcatggataatgactccctatggaactttgatcataaggagggtgagaatggtgattcagatctcttctttgggccacaaggccttcccccgataagaactggaggttcctcatctggcacgccagttcagaaatccgtgtttgattactctgtccctagcacaccgatgcagaactcagtctttgattattctgtcccaagcacgccgatgcagaagtcactctttgattctgtccctggtacaccggtgcagagatcagttttcgattctgttccgagcacaccaatgcagagatcagtttttgactctgttccgagcacgccgacgcagaaaccattcttcgactcctttccaagcacaccaatgcagagatcactgttcgattctgggccaagcagagcagaatctcctaccgccagcagcatgtatggcaaagagcagaagggattcttcgattcttcagtcccgagtactccaatgtacaactcaagcttcacgccaagcacttcagatcagggtgggggcaacagcttcatgaggtacgattccatgaacagcagcagcgaccatgacgggatcggcacgtttgcgaggtttgattcgatgaagagcagtaactacaacagccggggctactcgttcgacgacgaggacccctttgggacagggccgtttaaatcgacagagaccacgagccacagcccgacaaaacatgggacggacacatggagcgcgttttgacaggcaggggctgtatcatatattcaatagaggtcatgcgcttgtgcaccttactgcagatatatacacacgtacaggggcaagacaattttttgttgtgtgcatgggcctctgctccaacacacctggggaaggggaagggatgggacggggatttgcttgtgtgcttgctttgtgtttaattttgtacgtaggctgggaacatgtgtttggtgggatgatgatgatgatgctgctgctgctgcttataaactcaacattctttataccttgtattgtacaagtgcatgtacaagatgtgagtcgacccgtttgggttgagtaactctcgagtgttttttcttccatggtgtagcgttttcctgtttctccagaattttctgagcaatgtacagacagacaaacttttgtgtgaaacacctgttgtccaatactgagacccttccattcgttg

SEQ ID NO: 34882 - DNA, 1241 bp, Zea Mays
ttagcagctcgctttcgcagtgggcggcgaggtgacgcttgcttgcgcgttgggcggtgactcatgccaccgtcctgatcgaactcacactataaaacccatgcgctgagagttacccttgacatcgtctctgttcttggcggccgcattggcacatacacatacagtgggcgcgggtacgtctgtgaattaaaacctgatcgatcgatagacatgctgacggtccgcatcgccccgtggcggcggctcgcgctcctcgccctgctgccgcacctgttcctcagcgccgccgccgtcgtcgcgaggcagtgtctctggccgggccaggcgtccgacgacgccgggtgcctcagctggcgcgtcatggtggaggccaacaacgcccgcgggtggcgcacggtgcccccgcagtgcgtcgggtacgtcagcgggtacatgacccggggccagtaccagcgggacgtggccggcgtggcagagcaggcgcgcgcctacgccgacggggtggccgccgacgccgacggcctcgacgcctgggtcttcgacatcgacgatacctgcctctccaacctgctctactacgaggccaagcagttcggtgcgtacgacccgctggcgttccgggcttgggcgagcagggaggcgtgcccggggatacatccggtgctcgggctgttcacgacgctgctggacaagggcttcaaggtcttcctcctctccgggagggacgaggagacgctgggctcgtgcacggcggccaacctggaagcgcaaggcttctccgggtacgagaggctcatcatgaggactccggagtaccgagggcagagctcgtcgatcttcaagtcggcggtcaggaagcagctcgtggacgaaggctacaggatccgcggcaacgtcggggaccagtggagcgacctgcagggcgactgcgccggcgaccgcgtgttcaagatacccaaccccatgtactttgtcccctgaagcggacatagaccgggtgcctgattgatttcctcgtaaaattaagcatgagaatacggactactacttacctagggcaaacgtcaaagtgatctgtaaacggattacggatggccaatgcagaataagcacaggccgtaaagcatatataaaggaagaggaagaagagtattgacaggctcgaacccatcgagatcatatataaaatagctacaaactatctggtggaatccgttaaaaattcttatatatatttg

SEQ ID NO: 34883 - DNA, 3104 bp, Zea Mays
ccgcaggcacccctttgcacagcagctccgaagccacaccacagttatttattactgttttttcgttgcctccaatccaatagagttgaccgaaccacgcgccgcccgctgacatggacgacgtagtaccagcgacagcgaagcagaccgtcgttctgtaccccggcggcggcgccgggcacgtcgcgccgatgacgcagctcgccaaggtcttcgtccgccacggctacgacgtcaccatggtgctcctggagccgcccatcaagtcgaacgcctccggcgccagcttcgtcgagagcttcgccgcctccaacccgtccatcaccttccacctcctcccgccgatccctccccccgacctcgccagctccaccaagcaccctttcctcgtcgtgctggagttgctgggccagtacaacgacaagctcgagagcttcctccgcaccatcccgcgcgagcgcctgcactcccttgtcatcgacatgttctgcaccgacgccatcgacgtggccgcgaaggtgggcgtccccgtctacacgttcttcgcggcgaacgccggagccctggccgtcttaacacagacggtggcgctgcttgacggccggcaaacgggcctcaaggagctcggggacacgcccatcgagttccttggcgtgccgccgatcccggcgtcgcacatcatcagggagatgctcgaggacgcggaggacgaggtgcgcacggcaatggcgaagatctggaagcgcgacacggacacccggggcgtcctcatcaataccttctactcgctggaggcccaggccctgcaggcgttcagtgacccgctgtgcgtccctggcaaagtgttgcctcctgtttaccccatcgggccgttggttggcaagggcgggagcgggacggacggaggagaggcggcggagaggccgcatgagtgcctcgcctggctcgacgcgcagccggagcgcagcgtcgtgttcctctgctgggggagcaggggcttgctgtcagaggagcagcttaaggagatagccgctggcctagagaagtccgggcaacggttcctgtgggtggtgcgcacgccggccagcagcgacgacccgaaacgattctggctgccacgcccggagccggaccttgacgcccttctgccggaggggttcttggagcggaccaaggaccgcggcctcgtcatcaagtcgtgggcgccgcaggtggacgtgctcagcaaccccgctgttggcgcgtttgtcacccactgcgggtggaactcgtcgcttgaggccatcacagcgggtgtgccgatgctgtgctggccacagggcgcagagcagaagatcaacaaggtacttatgaccgaggccatgggcatcgggctggagctggaggggtacaacacaggtttcatcaaggctgaggagatagagacgaaggtgaggcttgtgctggagtccgaggaggggagggagattaggacacgggcggcagaggtgaagaaagaagcacacgcggcgttggaggacgggggatcatcgaaggcagcatttctccaattcttgtcagatgtcaagaatattaattaggtcgggaagtgatcaatctttaaccgcccgatacaacgtaacacaaactattcaataaaatattagtatacatattgcttaggaaaaaaaatcccataaacaagtaataaagaaaacatgtgtgtagcaacaatatctatatctatactacttattaaggtagcaaggataatctgcctccccgccgttctgccttccaacgatctcaactgtccatccacgcctctgttttcgtcccgtcggatgctgccaacgcccgcgcgcatcccctggtcgtcagccccacccatccgtgcgagcgagcaacccattgcagccaccaccgccctacctactcacctcctcggcgcgaacagccgccgaacccttatcgctcgcccctcgcccgtgccagcaacccccgccaccgccgccgccctgcctctcgtccacccctccgccgcgagatgtcgccggcccctcaccatcctctatccacagcgcgcggggcgtagcccccctctagcgccgctcaagggtgaagggcccatccgcaccctgatgttggccacctccaccatgctctgatgcccatccttcgtcatgaccccctccagttccattactgacggacggtcctcttcataggcaagatgaggcgtacttcagatgcagcgtgctcaagtgtaggagattgtcaatatcatcttgttgaatcgatgtgggggaggatgtctacttggtgagccacaagattcaggaatatcattgtagattgtttttgaattaggccacctatcctaatttttcgagtttgcatgggcctgcgatgcattacggaggcatttggaggaaaggttattcgtgcaccttctggaatgacgcatgagaaaatctctccagttcattatgatgaggaattaggaaattccttattcaatggcttgccaaaatgtcgtgcggtactacaagcagaacgccgatgaaacatggttcgacgtctcgctgaatagcctgcttcccggctcagtcctcaattgccagcgccaggtgtcaggatgtctcatccagaaaaagcctaatggctactcaaagatacgaaatggccaaggactgctgacgatgatgacgacatggccaccatcgccgccctctggtaagctatcctccaagagctcaacctccacgcctctgttctaaaggacctcaacaaccatccataagagaaacgccaagaaagaagatacaactgtctatagaaacaataaacaatttttcttctcggactgctcaatctgaagagctcgaaagaacacaaacaaatcactctctctagtcactatggtgttgtgtggaatttggagaggatttgatctctttggtgtgtctagagttgaatgctagagctcttgtagtagttgggaagtggaaaacttggatgcaatgaatggtggggtggttgggatatttatatccccaaccaccaaaagtggccgttgggaggttgtctgttcgatggcgcaccggacagtccggtgcacaccg

SEQ ID NO: 34884 - DNA, 6669 bp, Zea Mays
atggggagaatggcggcggtaggcgcggcgggagagagcgctgcccacacagggggggtgggaggtggctggctcaaggttgtccatgtggctgctattgcagagcgtgaagctggttggttgctattagcttctcttctagcatccatgccaaaagaggagctggaagaccaggtgtttgatgttcttttgctatgggcgggtccttttactggaaatcctgaatcttaccttcgtcatatacaggattgggcatcagaattgcgggttctgtcagttgcagttgaggcgcttactgccttcataagaagttttgtttatccatctatcacaactactgattgtggaatcttgcttaatcctgtacttgcctaccttggcggagctctatccctcatatcttcgttgagatctaaacaagtgcccaatgtaaggtctgcgctggacctactcacaactagaacattgatggcttattggtccctttcgaatccagtggtatataaaactgagcaccagcagatacttcagctatgctcaagtccgttcagtgatccttctggatgggaagaaagctcatgcttgaagtttttgttggataagagagatgcttcactgggcccatggatacctggaagggattcatttgaggatgaattacgtgcttttgatggtggtgctgatgggtttctaccgtgtgtgtgggatgatgaaatcagcaacttccctcagccagagtcaattcggaaaatgctcgtcaaccagatgcttctctgttatggttccatatttgcatgtcaggaaaacactgtcaagataagcctcttgaacaatcttgaccagtgcctgaagtctgggaagaagtacctgtggtttaagtttctcattacaaatgcatgtgttgctctattgtcagggttaaaggaattcctcgctttacgtggtgctcaatcattgccaattgatatattaagtatgattcagtccattttcaaggccattttagtagagcctgaaatttctacagcacagcggcgagcagcgtgcgagggtctcggtttattagcacgagctgggaatgatatctttacagcaaggatggctcgctctcttctcggagagctggtaacaacaacagatctgagctatacaacttctgttgcattttcattgggttgcatccatcgaaggtaagtttcatacctgaagatatttcgttgtattaattctgaatctcaaaataccagttaatagtctccatgggtgtatagtgtccatttgtttcagttttataattctttgttgacatggcctactatttccattgtttactttgagattttttttcttgagtactttgtattgacgtaggtgttctcctgttcctattgggaagtcatttgtgtccccattacttgttcgaacactagccacaacattgttgtatatgcaccttaatgagtccaacgtagctcttttgagaatttatgtttgtccaacgcccaccacataacatttcttggtattttgtattaaaccttctactagacggtgaagaccatgtatatgtccttattttgctccctatattgctccattacttgtcttattgagaaaatgactttcatggttgacctttcagacataaaccaaattggtttaggggcatcgtggacgtagaagaaaatagcatgcaattaaggtaggaagggtcattgttaagccgccatggatgaagcatacattgtggttggcaggctcgagaatgcgtcgtgactggaggctgtgcaccgggttgtactaggtagagggccccaaccatataccaatgtttaaggaaacggttgagcgatcctcaacgatgattgcaacgcgtagaacatcgggggtagaaggtgctaggtgtagcctgctgttgtcggattagacaaattagatgtgaaacagatgtggttgtgctagacgaggttaggtcaagcagtgtgtggatgatagtagatgtacctacttagaggttaggcatgcctgaagttagtggtccggacgcaaggtacacgtgtcgtcaatgcatagcatacgatgatgtagatgctgcagtgagtgccatcttggatagaggcatgcttgtgagagtgtgtcctttggtggataccattggaagtggtgttgtgactcgaggaggcgacacaacaatagcagcgctattgtttggagtggatgcgtgtagtactttgctaacttcacatgagctaggaggaccgtgcataatcagttggttgatcaagtatgcatgatgtgggatgctaatggaagaaatcggtggtggtgtcctcatttatggtggcgatgatgaaccaacgataatcatgggtcgttgtgggattgggatatagagggcaacattgctagaatcatgacacaattatgacatcatgctctagtgctatgtttgtcccgcttgagcctcaagttcgagccaagcatagttgtcatttggcaatgagtccaatgcacccgcacaagaggagtctggactcctgtgcgctcgtgtgacatgctagctgagacaacatccttgtgatatacaactgcaggccatggatgaaataagaagagagtgctggaggaatggcattatctactctggttaccccaactgtgagctcactatctcatttgagtaaaagctctaatttcaatctgcagttgtggtcactgcatgctcttcttttaacaattgaagctgctggcttgtcttatgtctcgcaagttcaggggacacttttccttgctatggagattctcctcttggaagaaaatggatatgttgatcttcgacaaggaattggtcatcttattaatgcaatagttgctgttattggtccagagcttgctcctgatagcacattcttttcacgatgcaagtctgttattgcagagataagttcatcaaatgaaatggctacacttttagaatcggttagattctcccagcagcttgtgctttttgctcctcaagctgttcctgtgcacttgcacgttcaaggtcttatcccaatgctttactcaagacagccaagtcttagatatttagcagtgtcgacactgcaccatctgattgaaagggacccggctgcaatgattgacgagaatattgaagagaatctgttcagtatgcttgatgaggagaccgattcagaaacagcgatgttggttcgtgcaactattattcgcttattgtatacatcatgtccagtatgtccatcacggtggctggcagttttacgaaatattgttcttgctacgtcaattagaagaaacacaggtgaagttctgtcatgttttgggcataatcctcctgatagtacatctgagaatgatgtgtactatggagaagatgaagacaacatgatttccagctcaaagcagcagcaaatccgctgtgctggttctatatccagccagtttcctccaaggaataaacacctcagatatcgtaccagggtttttgctgcagaatgcgttagccatgtaccaattgcagttggagcagaacctgctcattttgacctcttgttggcaaggagcgcaatatctcaaggcacttatttgtcaaatgattggctagtgcttaaactacaggaactggtctcactttcataccagattagtactgggcaatttgaaggaatgcaaccaataggtgtgaagcttttgtgtttgataatggacaagttcggcaaggcagtagatccggaatttcctggccatatcttgctggaacaatttcaggcccaacttgtttctgctgttagaatggctataagcactgcttctggtccacttcttttggaggctggacttgaactcgctacaagggttatgacgagcagcataattggtggggatagactagctcttagtcgcttgttttctctgataacacgcccgttaagtgacatagagggcctactatatccatcttttgctgactgggtagtgtgcaagataaaagttcgccttctaactgcccatgcagcagtcaagtgtaacacctatcaattcttgaggatgagggaaaatgctcctaatgaataccagcaattggcaccttcacttgtaaacagttcaactctattaggaaaatactggattcgagcactcaaggattatgtttctataagttttggtttgcactcaaaaatcaattacaagccattccttgatgggattcagtcattattagtcttgtccaaggtgcagaggtatcttgatgaagtttggttattaattcttaaagcaacagctcttgatgccgcgcctttggattttgatgagaataatcctaaaaatttactcgaacaaacatttatatctgggcattgtatggtcaaattggacagaactgaattccaatttctttgggggttatctatccttgtgctgttccattcctgccaatcaatgaagaataattctttgaagatcaaccttgactttaaacaagacaaaaactttggggaatttattgttcatggacttgatgacaaaagaccgtgtgatcaggtcttacgcgtgctttcgtccctcacaacagaagtctttttcagcaataattttatttcagtggatatttgccagcaactcctccaggcacttacatatgcagattgttcaagcgctcctatcatccacctattcacccagattatcagattctgccctgacaatttttttgaggttgaagcctttgtcttctctgcaatagagttattgtctcagtatctgggtctgatacttcaatgggatgggagttctcagaataattcaagtaacactttgatttctgagttgtctattgcaagcgagacgatggcttatcggatcaaaggagagtatttgtggaagctggtgatgttagtggtatctacttcacaccaatcatttcaacaagtttcaactaatttatgcttctcaaatattatatgcttcctccaaaatatcttccctttcatgaggaaaatttttagagaaagagtcgaatcagatggtgagtgcacaagtcctaaagttgtctttggtgctatggttggcctagtgggatacttctatgtagagtgtgataaaaagatctcattgctcgaaaacaagatttctgattcctacaagctgttgaataagatactacttttttgcttgggagaagccactgctcttgcaaaacttgttcctgagatcatttatcgaagtgaaaatgtaagtaacaatgatgtgctcctttggggcagcttcaggctgtgcgtacaggttattcaaggttcatttcgtagtaccaacatacaggtgcacatgctgggtctgcaagtactgagaagctatgcacagaaggagctaactgaaggttcagaaacaaagttggattcttttatgatgttgcttacggaattgttgggagacttgtttttggtgatggagactacattgaagcacaatcaaagaaataccgacaagatgctacaactcttctgctggaggccttgctgatggttttctctctgtccagtgatactgtttcacaggagcttgctgaagtgaacaccatttccagaaagttgttctctcattttattcagattccgtctgtggctatacagatcaaagacataatgctttctgcaccagctgaaaggagactacagcttcaggacatggtccgagcttcagtcagtcaagggcagataacggtgccagtggctacgagtgcacactcagaacagaatattcaggatagttgcagtaaaaaccctgggtccacatctgaagcttctgattgtgttgcaactcacgggaataatgacaatgaagttgttgatgatgactgggatgacgattgggatgctttccaatctcttcctgcaattgcaaatgatggtgttgattctggagaaatctctcttacaactaggtacaatgaacagatccctcaagaaaatagcagttacggttcttgtaatgcggatattacagctcgtgctatggaagacataacttgtgtggacaaggaacttgaggagccctctgatttgcaattctcaagtactgaacaacagcctaaacatgatttaccagggtcatcccacgaaggttgtgctaaacttgaaagacatccatctgttgattgcaaagagcaattagctgatgatgagacagcagatgaactgcagcagcaggttcatgaagacactgatcatgtaaataaagatagcgaagttctctctgcagaaattcatggggttaaattggatatccttgatgaagatgttgaagatgattccccaatgaattcaaacaatctatcagatatcgcagaggaagagtcctagggttggtacaatgcaacgagggtggaccgcaagcttgtcgagatagtagagaagagctgtccggttcctctgatgctggcataccagattttagtatgtcaggacacgtgatgagcaagagcggaggaaatgagcaaaatgttattttgcctgtatcaatatatattgcacgagataaaaataatataaggttacaaccatgatttttattttgtgccttcctccgcccctccgcttctaaataaatagttacctttgaatgaatttcaagaaaacccaatcaaga

SEQ ID NO: 34885 - DNA, 2670 bp, Zea Mays
aacacaccttgtgaggtctgagtgtctgactaggcactcgatagtcgagactgccggtgccggtgccgccaccgcttccactcgccgccctcccacacggccacacggcaaggcggccagccggccacataccccgcttcgtgtccctcccggttcacggagcccgaagcgctctgcatgtgagcggaggcggcaggcgacgtgtcacggaggcaggcgggcatggccgcatggccacagctggagcgcagccgcggcgacacccaggcaccttcttgcggccttgcctttcctcccgcctccgcctccaattccccaacgggaactgttcccgctcccgcgtctatttatccccggcgatagaggatggtcgagagactggtgcttcttgctggcggtttcttctcgtccggtcgccatggtgcacgagacgagatcacgggtgcacgcagctgcccaggaagaaggcaagctcgcctcaaaaaagcagaaaccagataatgaaaccaaggaaaggggccagaatgtgccctccaagaacaagaagtctgccgacaacgaagggaaagacggggagccggaggcgccaacaaagagcaagaagctcaaagctgaggaatctgagccaaatgggagggaagctgctgcaagagagtttgcagagttttgcaaggccataggagaacgcctctccctcgaggacatgcgcaagatccttcaagccaatgagcaagatgcttctggatcggaggatgcggtcgttccaagatgtgaggatatgatgttctatgggcctctcgagaagtgcccagtatgtgagggtcagcttgaatttaaggagtggaaatacaagtgcactgggaactacagcgagtgggcacgctgtactttcagtactaacgacccttcaaggagaagcggttctatagaagttcctgatgacataaaagatgattttatccgcaagtggctgaagcaacaagaaggaaaggagttccctaaacgtgatcttgatgaagaggctcatatcttctctggcatgatgattgcattgtctggacggatgtcacgctcacatggttacttcaaggagcagatcatgaagcatggagggaaggtcaagaattctgtgcttggtgctacctgtgtcgtggcttctccggctgagagagacaaaggtggctctggaggatttgctgaagcattggagcgtggaactcctgttgttagtgagaattggataatcgatagcattgagaaaaaggaagctcagccttttgctgcctatgatattgttactgatgttgttccggaaggccgaggactcccgctaggccaacttgatccaagtgaggaggccattgagaccttagctgcagaggttaaacttgctggcaagagatctgtccacaaggattccaaactcgataaagacggtggatgtgtctttgagaaggatggcataatctacaactgcgcttttgctgtttgcgatctcggatgccagatgaacgagctatgcatcatgcagctggttatggtccctggaaatcgtttgcacctgttctacaagaaaggcccaattggtcatgaccagatggcggaggaacgggtggaggattttggtagccgtgtcaatgatgctattaaagaatttgttcggctatttgaggaggtcactggaaatgagtttgagccttgggaaaggcagaagaagttcgagaagaagagtatgaagatgtatcccttggacatggatgttggggttgatgtgcgtcacggaggtgcagcacttcgtcagctgggttctgcagcagcacattgcaagcttgatccttctgtttctttcctgctgaaacagttatgtggacaagagatctacaggtatgctctgatggagatggcccaggacctacctgaccttcccatagggatgcttaccgatctccatctgaagagaggggaggaaatgctgcttcagatgaggcgagacgcggagacggtggcagagtccggcccagaagcagacgcgttctggaccgacgccagcagcaaatggttcactctgttccccacaactcggccgtacacgatgaggggcttcgagcagatcgccgacaacgtagcatcaggtttcgagacagtgcgcgatataaacgacgcgtctcgtctcatcggggatgcgttccgctcgacactactggatgacccactctctgaatgctacaagaagctcggttgttgtatcagtgctgtcgccgagggctcggaagactacaagatggttctcaagtacctggagaagacgtacgagcctgtcgaggtggaggatgtggtctatggtgtgtctgtcgagaggatatatgctgttgaatccagcgcattccctttgtacgaggaaatcaggaacctgccaaacaaaatccttctctggtgtgggactagaagctcgaacttgcttaggcacctccacaaagggttcctgcctgccgtctgccatctgcctgtgccagggtacatggtaggtaacccaccagtgacgataatgccatgccatccgggtcgtaaagagatatataattattagggagctacgtttattattcttggttggtttctcgtgttttttttttttttttttttttttttttttttttgcaagaatcaaac

SEQ ID NO: 34886 - DNA, 673 bp, Zea Mays
ggtagacattaaacaagcagcagctaggtgcatgctgaccactcgcgcactgtagccgcgcctgtgcctgtgcctgtgcctgtgcgtgccactaaccggcatagctagctatcttcgcagcagcttagcctcagggggaagaatgtgcacggtcacacgtgtacggcggcggcgcgggagggtatataccttggagagctgcagtgcatgggcgttggcttggtcgccgtcgacggggtggaggagctggtgcgcggaggccttgagagagccgagcgggggcgccggcgccggcaaggaatctgtcccggcggcgttgcacatgatgacgatttgatcgggggatggaaagtgcctgtgcgcgttctccgatcccgagcgtgtgggtgttgtctctctctgtctctcccactgtcgaagaagatatagccacgcagggagagggaagcgctgtcctccggtgattggtgccgggctgccggcgcgagctacaagtacgttttgactaacctgctcgcgagccttttagtaatctctctctctctctctctctctctgttctgggttggtgctggtgtgctcggccttttggtctcctccagaggaggtgaggcggtcagtggagtgcgatcaggctttcaggagtcgtgctggttggtttgtgtttgggtcg

SEQ ID NO: 34887 - DNA, 230 bp, Zea Mays
tagacattaatagtctgctagcaatgggaagacaaccataacggcatgctctaaattatccagtgcgcacaactagttagaaacaaacgtcctttgacaagaagcttctaattaaatcatgactgcgcctaagcagtgttattataagagtgaaggtggatgtgctgctacttcccacttcccttgatgagcaacaagcacctgcattgagtaatgcaagagtgagatga

SEQ ID NO: 34888 - DNA, 4770 bp, Zea Mays
atggagatgatcggttctggctccaggagttgtctgtgtcactcttctttcctgcctggtttctttactggtggggaacatgcagaaaaactgagtcacaaaagaactgaaaggtcacaccctcttccatttcttgtaaaggaagaggagcttagtggcgatgagcttgaggaatttatcaagaatcgatacagtaatcgtgtgaaatatgctgctgatcggagctattctagagaagacgatgacattttccccatggattgtgcactcaaggagcctactatttggagagttaaatgcatggttgggcgtgagcgccaaatggccttctgcttcatgcaaaaatttgttgacctgcgaaaaattggtaccaaagtgccaattatcacagcatttgcacttgatcacataagagggtttgtttttgttgaagcggagaaggccggttatgttacagaggcatgcaaagggttttgtagtgtgtacacaagcagaattacttctgttcctgcaactgaagttcctagcttgttatccagccgtacgaaaccatttgaaatctctcgtggtacatggatacgcatgaagaatggtaactataaaggtgatctggcacagggtggtgcagtttcactaaaagaagctgcagttcctgccccacggttgatcagctcccaagaacttgagttcttcaggcctcacattgaaataaagcgcgatcgtcagactggcgaagtttttgaagtacttgatggtttgatgttcaaggatggatttctgtataaaaaggttgcacttagttctttgatttattgggggatacaaccgacagaaacagagcttttgaaattctcttctagtccaagcaatagagcttctgctgatgacctggattggctctccggcatgtatggttctaagaaaaggaaccttccagcagaacgagatatgaagtcatcatcttctaaaataaaatcctccaaagcaccagaccttaaagggtcaacttctactgaaaattatgacgacaatgatgaattcaaccttcatgatcttgtactctatgggcgaaaagattttggtgtgatcattgctgttgagaaagatggttttaggatactaaagggtggtcccgaaggatctgcggtgacagtgaggaagcaggatattaagaaaggctgtgtagacaaaatgtttacagctgttgatcatcataaaaagacgatatccattaatgacactgttaatgttgtggaagggccatttcagggtaagcaagggctcgttaaacacttgtacttgggaatactgtttatttttaatgaaagtgaaagtgagaactgtgggtttttctgtgctcaaagtgggtcatgcgaaaagatacggaagggtctgggaagctctactactgaaaattcggactttccaactcccatgttttctgaacctgcttatgagcaaaatgagcataggaacactgaagggccttacaggagcaccagagaacaacttttctctattgggcagatgctgcgcattagaaagggtcctttgaagggctacctctgtcgagtagttaggatatttcggaatgatgtgactgttaagctagactctctactgaaaattgttacagtacaagctgatcttctttcagtcccagctaataggggggataacttgtctggtgctccagctagtaaatttggaagtcaagatacacccttcttcgggtcagaagcaggcaaaacttcatgggacagggggttgccatcatttggcagtgactcatggcaacccttttcaagttccacgctaccagtccagaatgcaggtgcagaatcagaagctgatccatggtgtaagaaaacttctgctgaagatgattctgatccatggggtaagaaaacagacggtgattctgatccgtggggtaaggaagcggtatctgctgctgacggtgattgcaatccatggggtaaggaaacagtaccttctgctgctggtgattctgatccatggggtaagaaagtgttttctgctgatggtgattctgatccatggggtaagaaagcaatatcatcagctgttgaagtttggaacactagtgccacacaaaaggaaggttctagtggcaatgcatgggacaaacaagctggagttggtggatctgatgctgctggcagctcctgggacagagcggttgtcaataaggagagtgaaaagagtgacaactggggagaggcttgcagggttatggacatgggaactggagctgacacagacccttggggaagcaaggtcaaagcagtagatatggaaggaccaaatagctgggaaaaggctacaatgcctccagacaataagctggaggatgtcagccaaggatggaaccaacataagggcaactcaactgaagaccaagcaaaagacaatgtttctaaagatgaggacaacaatagggcttggagcagttctttgcctgtcactgaagatggtacctggggcaaatcaaaagacgacaactgtgatggagcaggtggtgcaggaggttgggatgcttctgttgccaactggaacaaatcatccgttctggctgatgcacaggatgagggttggggaaaaggaaattggtcatctgctaagtctgaagaaacaaacaatgaaattggaaattggaacaaagctggagcttcggaccaagctggaccgaaatcttttggtggtgatggttggaacaagggtggtgatcagaatagcagttggaacagtcctggaaattttggaggtgggcgtggctttgggcgaggacgagggagagttaggggtcgggaatctggagatttcaatggcagaaatgatcaaggaaattggaagaattcatggggtggtgacaatgctgaaaaatcttcttggaggtctgataatcaggtagacaatgaagctggagattctggtggatataggggacggggaagaggaggaagggggcaatatggaggacgaggaagagggagagacaatggttggagaaatggtgatggaccaaaatggggtggtggagataattggaacgctacaaatccaccaagtaatcagccttggagtagcagtggaggcaccaagtcatatggtcaaaatcagccttccacttggaataatccagaggataacaaaccatctgtaggtgaacaaggtgatccttgggcaagcaaggtgtcttctactgaaggtaaaggacaacagaatgattcttggtcaagtaagatgacttctcgtggtgctgaggataccagcggtggctgggacagcaaggagaagggctcttcctgcaatggtgggggtgaaggactacaaaatgatccatgggcaaacaagattggttctaacgaaggtaaagaacaagaagctgatccttgggccagcaagatgtcttctgctgtgggtgctgatgacaagaatggtacctgggacacgacaacaaagggcactctatctaacgaaaaggctgacgacccttggaatagtaagcggggtaatgatgatgacagcaagaaaactgacgcctggggtgctggctcgtcaggtgggaatcaggaatcttcttggagtaaacctattttctctctgggggatcaggaacctacttggaacaacccaaggtttggtgacgatgacaatgtaaataatagaggtgggtttggacgcggaaatcaaggcagagggagaggaaggagttttggtggtggtggtggtggatcatcatggaatgaaagcaacaaaaacggtgaatcaggtgggggaaggtctggagaaccatggaacagaaggggttttgatggcggcagaggaagaggccgctttgggcgaggtgaccgcaatcaaggcaacaacttggggtcaggagatggtggcagctggggctctggcaggggaaatggtggtggccgtggtggttacaggaactggaacgataacaacgaaagaaggcccttcggtcaaggtggtggctggtctcagtcttccgactggaatgccaacaaaggaagtggcgaaggaaatcaagctttctcgaagagcaagcccagctgggacgcgcagaacgcctctggtggagatgaccaggcaggaaagaagagtgacacagacaactcctggagccagaaccgatcatctccatctatcctgggtcagccaagcggtgatgctaataacaagtctagcgcttgggacggcgctcccaacggaggagctggcaggggaggttcaggttcttggggaaagagcgacgaggatggctggaactcgtcgtcgggaggatcagccagagagaagccttcgtggggtggtggggcagaagctcctcccaggaaggaggacgacggcgcatggggcaaaggcggcgaggggagccggagcctaggaggaggaggagagggtggtagcagcagttcctgggataaaccggcagatggtgcatggagcggcaacaacaagggtggcagtggcagtggtgggtggtaactggtaagcttgcgacttattggcgctgactgcatgtaaatattgtgcccgcgctgtgtgaactgttctggtgcgtgtctagttcgtatcagttacttggccatgcgtactctaaactaaaataaaacatggcttgtgactgtgactagttaaatgtagcctgttgctgacagtaattaggtgccttaactttcagaaactcatttgttagcatcctcgattcctagacctacgaattaaaaaaaa

SEQ ID NO: 34889 - DNA, 1575 bp, Zea Mays
tctttatgaactttaacatatctcattcataatacccaaaatgtaggttagttcacttagttgtctcaattaccaaaaccatacatgaagcttttatacttgtggatcatgatttccttttgtgcatgctcaacaaaataaagagatcaaacaatcttttagatgaacaaacgtgtatatagctactatacattaatctctcagttacaacgaggaaagtaaatagcagcatcttgaatccacgcgtgtccttgcaaattgcgatgcactggaaaaggaaactactaatgatgatgattcagaattagaaactaaaattaagatgtcaccatgaacttagtacaactattaagaacaaacaagtacaacgtgtccactttcaggaatagcttacgatcatggttttaaccatgctttgaagctgaccccaacaggcttcaggaaatgtaaaaaatcgcttccattgcagacaatagtcagttcttccaacaggctttaggtgcctaggtaggtttgacacaaacagaacccgcttgattggttcgccaatcgccccgctctcacagccaggccagcgcgaggcttggccagatggatactattgtttcttatgtatggacggatgcagacaagtggctttaaaatggtctgttttgcatctattcctgcagcttatgtctctcgcgtgcatgcaacgtgctcatatagagtcaacacacgtggtaatgcagagcgagacgatgcgggtaaccaatcacacggaacatgaactcagtgtagctagtaaactggctactactatgaatgggctagtcttataaacttcaaactttatacaaactgaactagcattccacattttttagagtgagtacagtagagtaacatgtagctaacacgctaaactagcatacattcagcaaatgaaaatgacatatttagacatgccatttctgtgagttgataatcttattccacatttcttgtgctatcatgttccaataccgttgccttgctactggatataagctaacattcatttgaaaaagacatgccagataatcttttgacacctgggtataatggtcatcatggaccacagagcaacaaagatgatcagctaaatggtgatatcaaaggcaatatcaactagatgaaagctaacatttgactcgacgtttatttgaaaattaaaaaaaatcatataatgacatggtatcagctaagattcatttgaaaatgatgatgtatctttcaacaaaatgcacgctgtagtaaattaataaggtacagatatgaaacaagaggtgatgaacttggtagaacagatgtcgatgaacccaaataacagaaaaatctaaccatcatctatcgacgaacactaggcgcgattacccaaataacaagaggtaatgtcagataaccttaccatcagttgctaaagaaaactttcatcgattttaccattttctgaccagaactgatctgttgtctcctcccatcatctggacattaaaagagtagcaatatagtcaccgtatatttatattggaagagaagcatgcatatatatag

SEQ ID NO: 34890 - DNA, 1703 bp, Zea Mays
agtagtcagtgcacacagaaggtggatgcagatagatgcattgcattgtcaccatcgtagcacctccctctctctctccccttttcgttccgaggaaggaagcaccacagggccagcagagatgtctggaaaagggaagaggcgaagcgctagattgttgaagctggaagagcagaagaacgacggcggcgccgtctgcttccttgacccctggcagatcatccggaacagcatttccggtccgagcgcgcgagggaaaaggaaaaggaatgaaggaatccagccgcagggagaagcttcttgcagccgccaggagccactgtatgcaggaaacagcaatagcttaccaagccaaacctcggtaggacagatcatcgagtatatccttgacgagttggagatgagagacaggcatgagctgtttgcaatgccagacgacatccaggtgactgattatgcagagctggtgagcaggcccggtgacttcgcgacactgagacagaagaacagggatggcatgtacacggcactggagcaattcgagaacgatgtttacatggtgttccagaaagcgataacgatgaacagccaggacaccgtgcctttcagagagggcatggcgctgctggatcaagccaagctggtgttcatgtccctgaggagcaaccagatgttctcggagtcggagctcgcggcgtggcgccagaggcacgcggaccagatgcagcagccgatcacgccggagggaagagagggcggcggcaggggaccaccacgtcacacggctgctgcgccgctgttgcagccgtccgccgccacgccgaggaagaggagcgccgccgagacgaagaagcaggaggacgcccgcaccggcgggaacgctacggggaaccagagagggaggccgcgcggcgccagggagaccaaggccacggcgcccacgccgccgggaaagagggcgagaaaagacgcagcagcaacggcgggctttaacggcggccgcggtctggtggctcgaagaaggctcacttacaatgacgaagctgctgccgatcaaggctggcgggagatagcggcgacgccggtcttccaaggccggcacgttacactcagagaccagccgcaggagcagacgttccgaggcagcctgcagcgcttcgtgcggcacgcggggctgaaggcgcgcgtggccgccgagttcaggagcctcgagtgcgtcgcgcgggccaggcactgccccgtcccgcagtgctggaacggcttcgctcccagcgccggtttcctcccgccgtcgccccggcctccgggcgccgccgccgcggagccggggacgtcgtcagatcagcaggcggcggcgccggagtgcaagctggagacggacgaggtgctcaagctcttcgtgctcatgggcacgcccgctgcgttcttgagcagagccaagaaaatgttcggccaagatgagccagagaaaagcgcgcaaccggccaaggctgccgacgacgcccgggcgcgcgctggcgctgcaacgacggccgagactgggcacgggaagaagagcagcgcgagcgagccatcggccgccgcgtgcgggccgttcgcgccgcccaagttggtccccggccggctgggcttcggccagttcgccgcctcttcagcacgtccgttcaagctgaactccaagccttcggcgtcaaatgattccg

SEQ ID NO: 34891 - DNA, 3829 bp, Zea Mays
ccgcccccgcctgtctcccgcaatcgtcgctctctcccgcaatccgcgtccagatcccgcgtccgtgacatcctccgccctggatcgccgcgctaggctctctccgcgtccgccctctccatggagttgtgcccccgtgtgccctcgcgcgagcgacctctcccctggtgcaccatgccccgcccgccctgctctccgtcgcgcccttccagggatcctccatcgccgctcccgccatcatcgcgcccgcgctccatcgatggaaggtgtcgccccgccatcctcgcctcgctccccgcgacacgcggcgccagcttgtgtcgcatcttctatctattcaccagcaaggtacctggcacagaacccagccgaatcctagaacccagccggatcctagaaatttcccattggcatctggtgaccgtatccggtggttgggcgtcagacgcagcggggcggtaccggtgcttggagttggaccacccgtgcaaggcaccgtggtgcgacgggccgctcggcgcgctggagagcaacgggtgggtgtactcggcgcactgctccttcaagctctttgtggccgatgcgtcgtggtggtgccttgacgggaagtggctcttcttctggggcgactctaaccacgtcgacaccatccggaacctcctcaccttcgtcctcggcatcacggacacgtctgctgtgacacgccagtttgatgcagtgttcaccaatcccattggtggggcagggactctaaggatcacaagcatcttcaacggccactggaacatgagcatgaactatctcggcttgcattccctccggaacagaggtttccggcagctcatccggtcctacttcatgtccggtgatcgtgttccagacgtcatggtcctgaactctcgcctgcacgatggctgctactggaccagcgtccgcatctacgcgcaggctgcggatttcgcagcacagttctggtccggagtcatggacaaagtccgggctcgtgggcatgcagtgcccagggtgttctaccggacgcagatgcctcagggtggtatagatgcagggaaaaaccacgcgactcccttcacggaattgagagatgaagctggtgtcacatactcacatccgcagggatgggtcacgttgcagacacttcctaatgaagtccttgtagtgctgcgaaagattttgttagtagacaacacaaggaaggaagcacaaggaagtttaacctgtatagcacaaggaagcaagcagctcagcctccattttatttggaaaagtcttatacttatcagaagtaagtttttgatcctctattttattacagattttgtgattccagatctgttgacctcaaggcagattggaaacaaccttattgttgttttgttgaccaactctagaaagaaaagctaaaactctaccctctgcgcccaccttcaagggtcgctccctatcttccttcactctccatcaaagctttgctcgcatcaaattaaatttcttttcgttacgaatttagcttcattatataatattttgctcagtgaattgatcaagtttggtgcacgagtgtcatgctcctaggttttgtactaattgaagaagtagcaaatgtagttcgtggtggtggtttaagtcatgtctgatgaaattgatgcttatatagaggggttctttgtgctttcgaaagaattctgcaggaaaatcgactgcatttgttgttcttgggtacacaatgaaagatgggaaggcatattttcccccacatgacagtatctatacatattgcagttgaaatggaaataattgaaatacaaggtatgtgcaggtgcagtctattatattggagttaagagagcgctagcttgcagtcacactcgatgaagtcctatagggctagattttaaaagtaagatccagtacaaggttacttcaattgcaattagcgattagccaaaactttcatcttcggtctcactaggcctcactaggcctttcatcttcaaaagaatttataaagatattatttttcagtctatctctacatccctctctccatcttgttatgcaattatgagttcattagatgtcattgatctaaattaatttctatccattatgaacttatttttaatgaaccatgctccttcttcgttgctcacaacagggtccatgtacttggcacatgatatacatatacgagatggacttaaaaattaacaaaggtcttcttttggtggtagataattttggttttcttatgattctctttatgaagtgggtgtggtacctctaaacaaatagatgatctgttgacttatggcagtcaggcattacatttttttgcatgaaatcgacatctgagaagtgataattttgttttgatcgcttctctattgcaagatttagatggctactatcctttgcaattgatcaagaatggtgagctattctaaggaagcttctgaacaatatacctgttgtcctggagtgtcacagatggcaaagatttgcgcttagagaaggaggaagaacggtcggtgctagagtcatctccaaagttcttagctgatcagtttccactttcttctctgtagtctggttgcaactgttgatgatattgtaggtgtatgaaatcttctaagcaaactgttaaatacattgcacccgatcagaagggatgctctataatgcagcctggtaaacctccctcctgggcccagctgtcctctgctttcagtgtgaaactactgatttgggtgttgctgattttcatcatgattttttcagtttgtctcatcatttatcatccgcactcagatctagccttggccgggagacaccgcgacagaggctggacgtgctcttcccgtcctcatgccccatgccgctgcgcgctcttcccttcacctctcactacacggcggctgcggggcaggggtgaaagaggcgaggcttctccagcttctcgaggccggagaccgtttgctcaagggtgtcgttcttgacggcctcctccgacagcgtggacgcgtggttctcaaccatggccttggtcacggcaggaagcagagcctgccaagagctactagaggctgttgaacaagagaggaacatccgatctaatccttcacgtaatactgctgttttccaccatccaatgctgggtgattttgaggttaagaaactccatcaagaaaagcagttaggaatgatggtggacaaaggcctggtagcaactaggacagggttgagtcagtaccacctgtctcactggcctagaatgtttgaggtgatcaggatgctggaaggagacatgctcacagagagatgggaggtgtcgcagaacgtggacatgccagagttcgtctcatcggagctcctacttcaaaagtacatggattttgcagcggacgaatgctcgcttggtgtagaagccatggagctctctggactaaggtgaccatctgatcgatcgaatcggccatcacacaggtcgcataggtgtcttgccatatcaagcctatattattgttgtattacattggacacatagggaagggaaaaaatccggtgaattatagggtgtgatctgtctgcctatacttgtggtggcattcatttgtgcaaatgattttgatatattgatgtagagaatatatatgttgtttatttctatgtaatcgttgcacactataattttatcaaacaacttttgtattgttgcaaggggcgacaaaaatccagtggattgtagtgtgtgatttgtctatctataactgtggtggtattcatttgtgcaaatgatttgttgtatatt

SEQ ID NO: 34892 - DNA, 2412 bp, Zea Mays
atttcaccgaacgatagcagtgcccgctcccagctcccttggacccgggcctagctttgactggccgcgtgctctctcgccattgtctgcatgagcacatcgaattccttccatctctgatctctcccactcccacgtcccacccataaatacttggccaccatctttcctggccttccatttcccaaaaaaaacgcaagcatagatcagtggataccactccatcatcctgcttggccccggccggctggtagatcgtcgttccggagtcgtcgactggaataacgaactggcgcagcaggaggccaataatggccaccatgaagctgggttccaagccggagattttcgtcctccaagacctcacatggagatgcacgaccgagctcgagagtgatgtagttgtcgaagtcggagagatgtccttttacctccacaagcggatgatcagcgagtaccaggctccggcggatggcggcggcatgtgcacgctgcagctggacgacatccccggaggcgccaaggccttcgagctggcggccaagttctgctacgacgtcaagatcgagctcaacgcgctcaacgtggtgtgcctccgctgcgccgccgagtacctgcgcatgacggacgactacgccgagggcaacctcatcacgcaggccgagtgcttcctcgtcgacgtgctcgccaactggaaggactccatcaaggcgctcgagacctgcgagggcgtgctccccactgccgaggacctgcacctcgtctcgcgctgcatcacggcgctggcctccaaggcctgcggctccgacgctgccgcgccagtggtcaggaacgccagcgtcgacaaggacgcgctctggaacggcatccggtcgggcgacacgacgtcctccgccgccgcggcggcggcggcggccgggatggactggtggtacgaggacgtgtccttcctcagcctgcccatgttcaagcgcctcatccaggcgatggaggccaagggcatgcgcgacgagagcatcgccggcgccatcatgttctacgccgggcggttcctcccggggctgaagcgcaacaccagcttcagcaacgcgctggccagctacggcgccgacggcagcggcggcgccggcggtggcatgagcagccgcaacatcaccccgcgcgccgccagcgtgtccgctccgtcggagggcgaccagaggtacttcctggaggagatcgtggcgctgctgccgaccaagaagggcgtggcctccaccaagttcctgctgggaatgctgcgcacggcgatgctcctccacgccagcccactgtgccgggagaatctggagcggcggatcggcgcgcagctggaggacgcgtcgctggacgacctgctcgtgcccaacctcggctaccacgtcgagacgctctatgacatcgactgcgtgcagcggatcctggactacttcatgtcgtccacggacgggatcgggaccgggtacacgtcgccggcgctggcagaggagggtggcggcagcctcgggataccccaaggcgcgacgccgtcgtcgtcgctgtcgccgatcaccatggtggccaagctcatggacggtttcctcgcggaggtggcgccggacaccaacctgaagctgcccaagttccaggcgctcgcggccgtggtgcccgactacgcgcgccccgtcgacgacggcatctaccgcgccatcgatatatacctcaagtcgcacccgtggctgtcagaatcggagagggagcagctgtgccggctgctgaactgccagaagctgtcgctggaggcgtgcacgcacgcggcgcagaacgagcggctgccgcttcgggtggtggtgcaggtgctcttcttcgagcagctccgcctgcgaacgtccatagccgggtggttcttcgtgtcagacaacgcggcagggggcgacggcgcgcgcccacacgccggcggcgccatcgtccccaagggcaccgcggccatcgcaggctgcccgcaagcagacgccgacagtgacgtagagggcgacgcacccgatgggaaggagaccatcaccgacgtgaaagcgcgggtgtcggacctggagaaggagtgcaagagcatgaagcaggagatccggcggctcgggaagccccggcggtcctggagcctcctcacaaggaagtgcggttttggggccaaggtgcaacaagcgcagactgccatgagcggcaaatagattattttcccacttcatttgtttattaggcaggagcctcgattgcattccctaaggagtcttatcatctatttgctacagtaacagttcctaatctagccctagctcctagtgttatgcaataattacgtgcggatggtttgcacgggatgataataaacgtaacttcagcttcagcacagccatcaat

SEQ ID NO: 34893 - DNA, 5771 bp, Zea Mays
gctggatttggtgggtggacgggaatgagtgggtggtagcgccggctcgtgatctggcttgcccggttgacaactgggcactgacgaagtggatactctgctctgctctgctctgctcgacgagttttaacatctgagtatggctgcggcgttggcgtggcggttcaatggcaccaatggtggcgcccatggcagcgcagatctggaaagacacacggacaaagttcaagactcagagccacaaactcctatgtcaatcgtgaaaatgggcaagaaccgagttaatgtggaggacgaggagacactttcaagcgttgctcaatgtattgagcaactacgacagagttcttcatcctcacaggagaaagagagctctttgaagcagttattagatcttgttcaaactcgtgatactgcattcggagctgttgggtcacattcacaggctgttccgatacttgtatctctccttaggtctggaccatctggagttaagatgctggctgccactgttcttgggtctctttgcaaggaagaggagttaagggtgaaagtcttacttggtggttgcatacctccattgcttgctcttctcagatcgaagtcagctgaaagccaaactgcagctgccaaaaccatatatgcagtttcacagggtgggataagggatcatgttggatcaaagattttctctacggaaaatgttgttcctgtactgtgggagcaacttaaaattagtctcaagaatgagagtttggtggatggccttctaactggagcactgaagaatttatcaaagaatacagaggggttttggtcagcaactgtgcaatgtggtggagttgatatacttataaagctggttagttctggacaaacaaatactcttgcaaacacttgctatcttcttgggtctttgatgatggaagactcttctgtttgttctaaagttttatctggagaaacaacaaagcagctcttaaagttacttggtcctggcaatgagacttctattagagctgaggctgctggggctctcaagttcctttctgcacagagtaaagaggccagacgtcagatagctaattctaacggtattccttctcttataaatgctactattgctccatcaaaagagttcatgcaaggtgaatctgctcaagcattgcaagagaatgcaatgtgtgcattagcaaatatatctggtggtctttcctacgtaatctcaagccttggtgagagtctcgagtcatgttcttcacctgcacagattgcagatactcttggtgcattggcctcagccttgatgatatatgacacaaatgcggaatctatcagtgcttctaatcctgttgacattgagaagacacttttgaagcagtttaagcctaaggttccttttcttgtgcaggagcgcataattgaagctttggctagcttgtatggtaacccggttctctgcaagacactagcagattctgatgcaaaacgcttacttgttggtttaataaccatggcagctactgaggtacaagatgacctcacgaaatcactttttgctctctgcaagaaggattgtgatctatggcaagctctgcaaggccgtgaaggtgtccagctattgatttctttacttggtctttcatcagaacagcagcaggagtgtgctgttgctctacttgcgcttctttcaaaggagaatgatgagagcaaatgggctatcactgctgctggtggcatacctccacttgtgcaaattttggaaactggatcttccaaagctaaagaagattcagcaaccatccttggcaatttatgcaatcacagtgaagacataagagcatgtgttcaaagtgctgatgctgttcctgctttactatggcttctgaaaaatggaagtgataatggcaaggagatagcttctaaaacactgaatcatctcatccacaaatcagatactggaactatcagtcagttatctgctcttttaactagtgatcagcctgagtcaaaagtttatgttctggatgctttgaaaagcttgctttctgttgcaccacttaatgatattctacatgagggaagtgcagcgaatgatgcggttgagacaatgattaaaattctaagctcacccaaggaagagactcaggctacatcagcaactgctcttgctggtctatttcattgccgcaaggacctgcgagaaactcatattgcagtgaagacactttggtcagtcatgaagctgcttgatatgcagtctaacaaaatactaacgggggcctcatgttgccttgctgccgtttttctttcgatcaaggaaaataaagaggttgctgcaattggccgggatgccttaaacccacttgtctcacttgcaaattcttcagttatagaagtggcagaacaagcgactagagctttggcaaatcttttccttgatcaggaattgtccctccaggtgccttttgaagaaattctcttccgtgtaacacgtgtactaagagagggaactattgatggaagaactcatgcagccgcagcaatagctcgtcttttacagtgccgaactattaatcagccactttcagatactgttaaccgctctgggtctgtccttgctctagctgggctcttggaagctgcaaatggtgaagctgctgcaacatcagaagttcttgatgcactggtgctgttgtcgcgatcaaaggcgtcaagtgggcacaccaaggctccctgggcaattcttgcagaaaacccccacacaatacttccccttgtttcatgtattgctgatgctgctgcctccttacaagataaagctatagaagttgtgtcaaggctctgttccgacctacatgatgttgtcggtggtctggtttctgaaactccaggttgcatgtcatccatcacacggcgcatcattggctccaacattcttaaagttaaagttggtggttgtgctcttctcgtctgtgctgcaaaagagtattgtcagaagcaaatagaggttctgaatgatgcaagtctgtatattcaactaattcattctttaattggcaacatgattccactatggctacttgctatcttttctcgtcatgacagcaaaacaagagcagaactcctggaaatgggagcagttgaaatgctcatcgagaagatttcacaaaatgcattccaatatgtgggtgaagaagataacacctcatgggtcagatgagccagcatacaggtactttgcggcacaagctttgtcaagtctggtctgcaatggtagcagaggaactcttctggctgttgcgaattctggggcagccattggacttatatctttgcttggatgtgctgatgttgatatagctgatcttttggaattatcagaggaattcatgttggtgcctaaccctgatcaaattgcattagagaggctattcagagttgatgatatcagggttggtgcaacttctagaaaatctattcctcttcttgttgatctacttaaacccattcctgaaagacctggtgctcctttcttggccttgggtcttctgacccagttagccgttgattgccccccaaacatgctgctaatggctgaagctggaatcctagaagcacttaccaaatacttatctcttagtccacaagatgcaacagaagaagctacaactgaattgctgggcattcttttcagtagtccagaaataaggcaccatgaatcagcacttggtgttgttaaccaacttgtggcagtccttcgtctaggaggaaggaattcacgttatagtgccgcgaaggcattagagagtttattttgtgctgaccatgtgaggaacagtgagtcaactaggcaggctatccaaccgcttgtggagattctgagtactggcatggagagggagcagcatgcagctatatcagcccttgttaggcttctttctgacaatccttcaagagcacttgcggttgcggatgttgagatgaatgctgtggatgttatgtgccggattctttcttctgattgttcagtggagttgaaaggaaatgctgcggaactatgctgtgttctatttaccaacacaaggatccgttccacaatggcagcagctcgttgtgtggaacccctggttggtttactggttagtgaagctaaccctgcccagctttctgtggttcgtgcattggataggcttctagatgatgagcaactagcagaattagtggcagcaaatggagctgtcattcctcttgtggggcttttgtatggcaaaaactacatgcttcatgaggcagttgctagagctttggtgaaacttggaaaggacagaccagcttgcaaattggaaatggtcaaggctggtgtaattgagagcattcttgatattctccatgacgctccagattttctttgcattgcattggcagaaatgcttcggattttgacaaacaatgctaccatagcaaaaggtccatcctcagccaaagtagtacaacctcttttctctttgctttccaaggcggacatgggtcctgaagggcagtatagcacattgcaggttcttgtgaatattttggagcatcctgaatgccgtgctgattataacttgacacctcgccaaactattgagccagtgataaccttactgaattcatctccaccagctgtacagcaattagctgcagaactcctatcacatcttcttctagaagaccacctccaaaaggacacagtaacagagcaggcgattactcctcttattcaagttctttcttcaggtttgccaaatttacagcagagagctataaaagctctagctaaccttgcaatagcttggccaaatacgattgccaaggagggtggtgtttttgagttgtctaaagtgttgttgcaatctgacccgcctttgccgcatgttgtgtgggaatctgcagcatctgtattgtctagcattctacagtacagtactgagtttttccttgaggtacctgttgcagtactagtgcaattgctcaggtcaggaactgaaagcactgttgtcggtgctttgaatgcccttcttgtattggagagtgatgactcaacaagtgcagaagcaatggctgaaagtggtgctgtggaagcattgcttgatctcctgaggagtcatcagtgtgaggaaactgctgccagactaattgaggcattgctgaacaatgtaagaataagggaggcaaaggctgctaaaaatgctattgcaccattgtccatgtaccttctggatccacagacacaatctcaacagggaagattgcttgctgctcttgctcttggtgatcttttccaaaacgaaggtcttgctcgttctactgatgctgttgcagcatgccgcgctctagtcaatcttcttgaagatcaaccaactgaagagatgaaagtggtagcaatatgtgccttgcagaatctagtcatgtacagccgagcaaataagagagcagttgcagaatccggtggtgtccaggtcctgctggatcttatcagttcaagcaatcctgacacttctgttcaggcagcaatgtttgtcaaacttctattcaataatcacactatccaggaatatgcgaccagtgaaacagtcagagttataactggtaaacaatatccctttcttgttctgtcatattcatttgcatagcaaattcatatttgtcaatgcctgtcatagttcttaaggcggtaaggcgaggcacggcgagtgacccctgcctggacgcctaggcggacacctagg

SEQ ID NO: 34894 - DNA, 2745 bp, Zea Mays
ccccattaacaaagcacccatcccttcaacaaacctcgagtcgagagagagaagagagcagacaacaagagacaccaacgaacagaggcaaaccggctcacgcctgtctcggtgcggtggccggctaatcatggccaccgtggggcagtccggggccctgagaagggtcaccgtgcactacgccagctcgcccacgcgcggcgcggtggtagaggtgagcctcgacgacctcgacgacgagctgctccagtttgtgctcgccgatcttcttcccggccaggtacgtgccccttcctcgccttcagcacgagcatgcatgcgtacacatgtatggcgtctacccgccatgccagccttgtatttgtgtacatacatacatctttgcttcttccacgaacacgcagcggatcatttccttttgcttccttcttccactatcttagaaagtaggatctccagtctccactgaagagaaagctagcttccacgatcgcaggagggtttacaccagtcgatcttggaaggagcacacggcagcaaccaggagaactatatgagaggcgcaggatccagtgcgccgtcacaggaataccatgcacagagcagcaccgctgctgcggcagcagctgcttcgtccaggaggaatccaggcacggatgacgcccagatcgcctcggacttcgagtacgccacgaagctgcagcaggagatggagggcctcagcgtcgacgacgacggcgacggtatcagctgcgtgccgtctccgtctgactctgacgacgggcacgaccatcaaaacgaagaggacgaggaggaggaggatggtaatggtggtggtgatgatgatgatgatccagacaacatgacttatgagcaaagacaggcacttgtagagtctgtggggtctgaggacagaggcttatccgacgagctcatctcctacctgcagccatggaagtacaaggcatcagggtttttctcccggaaaacaaaccatgacgactgccctatctgcctgtcaactttcaggaaccgagagactatgataacgttgccgtgcatgcatcactaccacgcagcttgcgtcaccaaatggctcagggtcaacaagacatgccctgtatgcaaatatgaactgttcggaccttgctagcatccgacaatgggctgataagacaaggtgatggggcgtcacactcacacccagctggttgcatcatctacttttttttgcaccaagaaaaaagaaaatgaaaaacaatccaaaaagagaagggaaaaaagttaggaagtgtagatcttgatcacacaagaaaaagaagaaaaaaaactgaaatttatgtcttttttatctttcctttggcttgtggaaatgtacgtaagtcacggtcttatatttgtttagaagcttgtttttttttcttctcttgccatgactatgtgtatctgttgtcgtgtgatgcattatgcaaaccagaatctcctagtggaatcgctagaaaccgtgcaaaacaccagacggtgccagataacaggagattataactgacacccactatagcatgatggaaaacgatgtacatgacaaagaggctgtttgtgaccttgcgatgatcacatcatttgattcagcaacatgccatacacacgctaactatcagccaaatccaatccaacccactatctcaactcacacacatctggagcgacgccagtgtatgatatgatcatcatcggaaaactgtcaatacataaagctctacagaaagagaagggtggcggcggcaaaagcacttgccagcaccaatcaggcttaggcttatatctcattgcttggctttaccacagtagcgtactaccacccgtgtcctgcaccgaacagcccgctctccaccagttcgttagcgatcatgtcgtcgaggtcctccagttgatggaaggagtcatcgaccttcgagctcacggcattgccagcagcagctggactgctgctcaccgacttgaagctgctgtttctggccgaagccatgctggctgtgctattgttgatgacattgctagggccagtaccagcagcaccctttaccgtgccgttatggttagagctactgttattgacatgctgcccctgctccccagtagcagcaatgacgttgggggtagcaactcctggcgcgagacccccgccgctcgcattcggcggtggtgcatccagaggcggttgctgcgctttcgagcggttgttactgttcttaacttcctgcagaagctggttgaggacatgctgctggtactgcgggttgacaccaaagccatggaaactgttttgctgctgctgctgaaacgacgacgacggtgggtggtgctggaattgaacttggttaggtcccaggaaggacctggccgcttccagctgcatgccgttgtgcattgctgtaggacctttgaagacactcgacgcctcctgctgcagcgaaatcgtactggcacctgagcttctgagcatgttctggtaggtgtttagaggtgcggcaatcggtagattgttgttgccaatggctccggcaccaggagtctggttgttcgcagaagtgcttgtctcttgtttgacccccatcaatttggtgttgctctggttgttggcaaggttagcggcagccatggcctgtctcgaatcatgcatattctcaaactttgccgtggttttagaataactgttcaggctctctgcatatgaacagagaa

SEQ ID NO: 34895 - DNA, 1206 bp, Zea Mays
atccactccaaagtccaaacccccaccgagccacgcgacgagccgcgccgccatgtggccactctcctacctgccgccggcaccggcgcagcagttgcgagcgcaccccggtcccggctccggccgcgggcccaggccgcagccgtgcgggctgccgttccccgacgccctccgcacggctgcggctgcggccgccgtctccctttctctcatctatggcaacggcgtgggcgcggccttcgcggcatcagcggcgcaacccacggaggtgtgccggaacgggggcgcggagatggtagaggaggtgagggccgaggcggtgactaacgagcagctcgtggaggaggcgtgggaggtggtcaacgagagcttcctccccgacgccgccagccgtccgtggtcgccagagatgtggatgcaaaggaagcaggatgttctccaaggcacaattaaatctcgtgctagagcccatgatatcattcgcaagatgctagcgagcctcggtgacccttacactcggtttctatctccctccgaattctcaaagatgtcaaaatatgacatgacgggaattggattaaatctgcgggagattcctgatgaaaatggttcttttaagttgatggtattagggctgttgttagatgggcctgcttactctgctggtgttagacagggtgatgagcttttatcagtcaacggcattgatgtaaagggtaaatctgcatttgatgcttcatccatgctgcaaggtccaaaggagacgttcgttacgattaaggttaagcatggcgactgtggtcctgttgagtcaatgaaggtgcagaggcaactggttactcgaactccagttttctatcgtttggagaaaagagaaaacaatgattcatctgttgggtatattcacattacagagttcaatgcagtggccaaaaaagatttggttagtggtgtgttgctgcgctaaaacgtctacagaaatcaggcgcctcctattttgttctggatttgagggacaatcttggtggactagtgcaagctggaatcgagacagcaaagctctttctgaataaaggagacacggtcatttatactgctggccgggatcgcctagtccaaaaggcaattgttgctgaaagtggacctatgattgctactcccctcatgttgctggtgaataataggacagcacgcgccagtgaaata

SEQ ID NO: 34896 - DNA, 1394 bp, Zea Mays
cggcaggaatatgcctctctctaaaggctctgaatggaatttattgtgtcagttagctgatgcgaaggatgttatggaagcagttcggactatggggggtgtacgttttcctgtattgactccaaaccttaagggatttgaggcagctattgcagcaggggcaaaagaaatcgcaatatttgcatcagcttctgaaggattttccaagtcaaacataaactgcaccattaaagagagcattgcccgttataatgacgttgctcttgctgcgaaagagaaagaaattcctgtccgagggtacgtttcttgtgtggttggatgcccagtagatggaccagtgccaccttcaaacgtagcttatgtagcgaaagaactttatgacatgggctgctatgaggtttcacttggtgataccattggagtcggtactccaggcaccgtggttccgatgcttgaggcagctatctccgtcgttcccgtggagaagctcgctgtccacttccacgacacctacggccagtccctctcgaacattctcatctctcttcagatgggagtaagcgtggtggactcctccgtcgccggcctcggtggctgcccgtacgcgaagggtgcgtcggggaatgtggcgacggaggacgtagtgtacatgctcaacgggctgggcgtcaagacgggcgtcgacctgggcaaggtgatggccgccggcgagttcatctgcaggcacctgggacgccagtctgggtccaaggcagcgaccgctctgagcaaagttaccgcgaacgcctccaaactctgacaatttaccatgatcccctactgcagataattgcagtaaaattagcgcatggtaataaatagactgaggctattcaaataaatacggcctcggagctagtagtgagtagatttttatttatgtccatctagctagcaaaataagcgcgacactgccaacactgccggtctagcaagcaaaatgagcaaatatgtgaccacctctacgggaaagattcccccaacactctcagcaaacggaagtggtgcatcagttcgttccagcttccagtcatcacatgttcactcagcaaacagaaatggagcatcagttcgttccagcttccagtcattacatgtttacaacatccagatctcacctacgctatggacacaatgggaaatgtctagtgctgtaatgcattccacgaaagttgatgggttagctatgatctcaaacttacagcagattcaaagcatttttgggagggctcccaaactggccctggctctgctttctctaggtgcaaaaaaaaaacagcttcaacatagagcatttaggagctggaaccactttttttttataagctagagtaaaaaaaaagctcctagcggct

SEQ ID NO: 34897 - DNA, 1210 bp, Zea Mays
gtgcttggccagttggccacatgccttgccttgcctttgcctacctgttgatcgagccgagcgagcagggagagacacggcaccgagtgaggccgccgcatcctcctcctctccgatcctccgcctgctgcctgcctcaacggatcgacgcgacaggagggagggaggaaggagacggtcgatcagagtctgagacggaggccgatccaccaccgcagcgacgagcgggaggagatgaagatcatcattgacacggatcccggcatcgggaggaaagccgcacgttgctgacttcgttcatggacctgatggcctcgggaacgtagatcttcctgatcccactatcaagaaagtggaggaaagtgctaccgacttcttggttgataaggtctcgcgatttcctggagaggtctctgtgctcgccttgggtcctctgacaaacatagcattggccatcaagaaggatccctcattcgtgaaaaacgttaagaagatcgttgtgctgggtggagcgttctttgcggctggaaatgccactccttccgctgaagcaaatatccacagtgatccggaggcagccgacatggttttcacttctggggcggacatctacgtcgttggcctcaacatcacaacgcaagtcagcttcacagataaggatctcctggagctaagaaactcgcaagggaagtacgcacagttcctatgtgatgtatgcaagttctacttggactggcacaccgagtcttatggtgctcctgtgattttcctccacgatccggtcagctttgccgcgctagttcgtccggagctgttcacgttcaagaagggcgtggtgagggtggagacgcagggcatctgcgtcgggcatacttccatggacatgttgctgaagaagtggaactcagagaacccgtggactggctactcaccgatttcggtcgcatggacggtcgatgtgcccaaggtggtcgcgtttgtgaaggagctcgtcaccaagccgtgaaccaagttaactaacgtgttgtggtctcgcgcaccagatgtgcagcaaatttgagatgtcgatatatttactcacattcgaagcactgcaaacactattatctcaatagttggttcctgtggaggattgcaaatcaatttgagatgttttaaattgcagcatgtgccttcggccattgaatggtatgatgttttttttttcttc

SEQ ID NO: 34898 - DNA, 2057 bp, Zea Mays
cttacagtcattctctaataataacgacgaattacaagaaaaaaaagaaaaaaaaaataaaacaatagccggaagccgaagtacagcgctgtcgcgaacgctccggtcctatactcctcctgacatcgattcccgcactacctagatctcgaactcccaccatcgccgccgccgcccatggcgaaggagttccccgtgccaccggtggtcttcacgccgtccaccccaacacaccgccgccaccctcccccgggcatgggggtctcccctccgcccgcgttcgcgccgccacgtccctccacctcatccgccgccaacccgctccctttcatgtcgttcgatgtctcagctgccgcggcctcctcctcctctgcgccgcccctcttcgcggggcctatcggtgtcggcggttccggcgcatcctttgaggacgagccgccgctcctcgaggagctcggtatcaacacgcgccagatctggcggaagacgatctccatcctccacccattccgctccaccgacccctccctccacgccgacgccgacctatcgggcccgttcctcttcctcctctcctttggactcttccagctcctcgcggggaagttccacttcgggatcgtgctcggttgggtcaccgtggcgtccctcttcctctacttcgtcttttccatgctctcgggcggccgccgcggggacctcgatctttacagatgcgttagcctagtgggctactgcatgctgcccatggtcatcttctctgctgtgtccctctttctgccgcgcggtggcgggttcatatttggagtagggatggcgttcgtgatatggtccaccagggtctgcaccaggctactaggagagcttgcttccagcggagacgagcacaggggcctcatcgcttatgcgtgctggctcgtctacatgctcttctcattgctcgtcatcttctgataccgtttatggcatggaagtgctatgatgcgaaacaccctgcgttggttttgatttggtggcaacagctgctcacctcagcatgtgagtgattggatctgatgacagaggatcacatggttgcctgctgctgctgcaaaagttgaaatgacctcttggagtgtttagcttgctgctgatgcttaatctggctcgggggatggatggatgttgccatcaattgtcctcatgtggtggctggctgccacctcaaccttggtactgtgtgcgggaatgtaaaatcctatcctgtcatttgtataaggcaacaaaaggtcgaataaggttgctcgccatttgcagtggtgcttgacgatactccctaaaccaatggtggcgctcaatcttatggcacttagtccagctgagattcagtctgtgtttctctttatgcactccagggtcaatggtcaatggcctcaagcttaagtcaccacagtgctatgtactgccatgcctctacactttgttgggtactcctgtcattgaacccagatcatggaggtctggagctggattagccttccaagagtattgactatgttcgcaatttgtttagcggatgatgtggacagtggactgccaccagtcactggagtgttttgctatgttgttgcagaactacatagtatctggccactttggggaattgttctgtagtgatctattagttccagtgggcatggttggtgttcggtgtagatcttagtaaaaagaaaaggaaatcgaggtccagaaacagcaaatgtgcagtaattaggtttttgccgaagtattggtggaaatcgtactctctaggcttggtcgtggtcggtgcaaatcttgtttgttatggtacttaccacgacttatatttttttaggatcaccgtggcatttcttttcttcttactgtttatttgtcagtggttcattttggcaaagagtttttctatctttcgatatcgtggtagttagttaccgaatcatcataaatcaaaagaacgttagttttctttcatttgttacaagttgacccccgcattgagtttatcttctgggatagcaaaatatgatgtttataat

SEQ ID NO: 34899 - DNA, 1553 bp, Zea Mays
tcgctcgccaacgaaccgcagccccggctggtagcgcgtgcgtgcgtgcgtattttgcgcgaaacgaagaggcgacagcggcattgattggagccgtgcgagttttaaacgcccggccgctacacccgcacacaccaccaccaccactactaccacagggtcaggatccgatgccccattactactttggcattagcagtcggtgagaagcggggagagcagcgcgagagagggcacgtacggtggttcgttcaacaccctactagcaagctcagccctagtccggagccacggcgcggctagggagccgtgcccggcggccgtcgtcgccgcgcgcgtgcgccgccgcaccggtaagcatccgtttactttgtacagggatttccaatgctgcatagactccaagtatatgatctagctagcttctcagttacagtaatctgatgaaccccagaggcacacagatcgtgtcgacagctaggttcacgattgggaggaaattcacaggggcggacactaccacgccgccttgtgctcctacaccctttgctttcaacggcctgtttggatacagattgacctggcttattagccaaattatctctaatctctctgttttttttaataattgtgtcaacatccttttacactggcatacaagaggcatatggccggcattctcctgtactgccgtccgtagcaacaaaagttccaataatcacacctccacatctccgactccgatccacatgatgaacagtgatgcgcatcgtgacgtgagcgagcagggatcgtggacctccacagggacgtgcagacctgcgggtaccacgacgtcgaggtgatgtggggcatgctgggcctggacgccgggccgcccagcgcgccggagcgccggaaccgctcgccgccgttctggacctggacgccgtccttctggcacttcgggtcgtcgcgccgcacgcccacgcccacgcccacgcccgccgcgcggtagatgatgatgactaggcagtgtctgtgtgggcctctggggcttatactactgtcagtttaatttggctaggaaatgcatggtgctggtgtgacagtgtgtgtgctatgcatgtgtgtgcacggtgcacctttactcctactacgcgttgtagagagagagagagagaagaaaacgcacataaaaaaatcagctctaattccccatgtttattttgctttgcgttctgtggttctgtccttgttcatgcatgtgatggctggtcgcgagggacagacatggcgacatgtttgtcagcggtgtgcaaatggcggagcgttcttttcattactggaccctgacctcactacaaagtttgatgtgagccacagctctgtaccaacaggaacctctggtcttttcggcaacaaagtaacgtgacgccgatgcgtgaggaagagcctctcgagtagctccaaaaaaaatagcacgtactaaaatgtaagatttttttggagtggctagtcatgtccgtgtattaccatggtttatatatatcccatcaatactgtacctcaat

SEQ ID NO: 34900 - DNA, 1094 bp, Zea Mays
aaaaatcaaaaatagaaaaagtctcttgcccccgcggccgtgccgagccggcatcccctcccccagcaacgatcgcgacgacccaaaccggcaagggtgaccagcggctggccgccgccgcggcagacgagtcccatgggagacaacaagtctccgctgagcctgagcccgatgggcgggcgcgaccgggaccgggagctcctcatcccggtctccggcggcggctcggcgcccggcgtcgatgacgaggacgctgacagggcctcctccgcctccgcggcgctctcctcctccggccgcgaggctttccataaggtcgtccgcagttgggcttcaaagaagttcatgactggatgtgtaattctcttccccatagcaataacgttctacatcacctggtggttcattcattttgttgatggattcttctctccaatatatgcacaactaggaatcaacatatttgccttggcgagtggattattaagcgcatgccccttgttcgtcatatctacaatgcatcgaagcaaattagtgctgcaatatcaccagatcagaacaaacaggcattcaaggaagcggtcatcataaggcatcctcgtgttggagaatatgcgtttggtttcatcacatcgtcagtatctctccagagttattccggtcaagaagatctttactgtgtctatgtcccaacgaaccatctttacattggcgatatcttcatggtgaattcaaaggatgtcataaggccaaacctttccgtgcgtgaaggcatcgaaatcgttgtgtctggtggtatgtcaatgccccagattctgtcaaccctcgacccggagatgatccttggtgacagaaccggaccaagcagaagctgaagctgccacgagccctttgtgtaacttttgtagtggtttgctagtaacattttcatacaggctaccaagagtacggcgaactgaacttggagcacaagtatctctgtattaagggttgagctgtgccttttttttgttttgaaaaagctgctgtgagttatgtgttatacaatagctgttgtgagttgtgaaaggaaaaaaaatcatttggtggaacaa

SEQ ID NO: 34901 - DNA, 1769 bp, Zea Mays
cctcaagtccttcttcactgtgttcctgtgaagacccgtcgagcatgtctctttgctctttgctataaagctggggcagggaagtattcccttgatgtccctgtgattcttaaccaaagcatgtttgtgtgacgcatgcccatgctcttgtgaccaaaatctcccacctcaccatgcccaaggattttcaaaggttttctcagtcatgtgacgtttgttccgtgctcatctaagaacacctagaagaagtggtgtttgaaggagtctactccagtggctgctgatcaagtggaggagccatctaactgtgtattgggtagagggttctagagcctcttctctgcaacaaaggcaagccccggtgcatttgccccttccttgtatttttaaaaaagacttttatacacttaagtctagtgaaatgtgcattaagtttataggaattgcttggaaactatttgatgcatcgcttaccttgatatccatgcctttatagatacttctgatggagtatcaaaatatgatttacaaaaaaaatgcttagccctgcttagatcttgtggatagaggttgccctttgcaataatgcctagctcaggggttatcccgaggaaggatgacttctacctgcaagaatattttcattgggagcatggtgtgatcttactgcaaagttcactataatgctcttttcatcctaaggaacacaaaacaatcctaagggtggaagtacttaactcgagacttgggctaggaacaggtgatgctccacccaggttaattaaggattggatgcgtatgtaggcctatatgatcaaggactattttaactggccacatgccgtggatatgggacagggtaagcttgaacctaactattccatacgtgaaaagataaccgcgcactgggcgtgggagatggtgggagtagcgtgtaccctcctggctagaggctggacggaggagtattgtgctcccaggtagcgcggaccggttcacgttgtggaggatctatgggaacggttgacatatgcaagggttaagtgctacatatgtcgtgtggttagagatcctcaactgagtaaatcgatttggatcgccgttatatccccggatagtgaagacttgatctctgacctacaacctaagtcaggatgtgaacattatgaataaaaatgatgttgtattgatgagatggtgaaattagactagatgcaaacagagtctattaatatttaatctggcgttaaaatgttgaaagtaaggactcactttagtaggctatttctgcaaaagtacctaagttgattcttgctaaagccttttccttgattcctatttaaccagcatatccttgagagtcatttttccttagtcgggtaagacttgcgaaagtacacttcgtactcagggttttcgaacccatgttgttgtaggtgatgaggagtactctaggtgttcctgtggctggagggcgtttccagttctggaagaggattagttaggcttgtgtataagttttggagggttcctaccttcctgctattgtaataagttatgcactttgagtatatcaggacttgtaataaatgtaactcttcctatgtaataaacttcagttttagaaatgaaaagaatgttttataaagtcttccgctcttatcttcgaagtgtgtgtatcgaatgtgattactgtaatatgcatgtatggtgggagatccttgggatgatgagttcaagttgttgaactcgtgatagccttgttaagt

SEQ ID NO: 34902 - DNA, 2949 bp, Zea Mays
cccaccccaccacccgtgtctcgtatcgccattctacccaaccgcaacgaaaatgagcccaggcgataaaggctgagtccgtccgtcgaaaagcgagcgcagagtgggagagagaagggggtcgattcggagagatcgagaaagaggagggaggcggagggcgacgtggcggtgggtgctgaagcggagcctgcagcgcccgctcgagtactcgccggatcgcccgacctgccggtacagcgctgcagacagcctgatccggccgatccggcgggaatggcggcgcgaggagggatctagcggaggtggtggggtcgcgcggcaatggcggaggcagagccgcggcgccggtgggcggtgtgggcgctactgctgctgctccaccccgccgcgctcgtgctcgccaacaccgaaggtgatgccttgcatagcttacgtaccaacttaaatgatcctaataatgttctacaaagttgggatcccactctggtcaacccctgcacttggtttcatgttacctgcaataatgacaacagtgtcatcagagttgatcttggaaatgctgcactatcaggaactttggttccgcaacttggacagctctaaaacttgcagtacctggagctctacagtaataatatcagcggaattatacctagtggatttggaaaccttacaaacttggtcagtttggatttgtacctgaacaacttcactggtccaataccagattcattggggaagctattgaagctgcggttcttgcgtcttaacaacaacagcctttctggttcaattccaaaatcattaactgctatcactgcactccaagttctggatctgtcaaataacaatttgtctggagaagttccatcaactggttccttttctttattcacccctatcaggaagtagctcttctagtactggagcaattgctggtggagtggctgctggcacagccttgctatttgctgttcctgcaattagttttgcctattggcagcgcaggaaaccacaagaacatttctttgaagtacctgccgaggaagatccagaggtgcatcttggccagcttaaaagattttcactacgagaattacaagttgcaacagatggcttctgcaataagaacattcttggaagaggtggatttggcaaagtctacaaaggacggctggcagatggatctttggttgctgttaagagactaaaggaggagcgcacgcctggtggggaattacagtttcaaacagaagttgagatgattagtatggctgtacacagaaatctattgcgtcttcgtggattctgtatgacaccaacagaaaggttgcttgtgtatccatacatggctaatggaagtgttgcatcacgtttaagagaccgggcaccagctgaacctccgctagattggcaaacaaggagaaggattgctttgggttctgctaggggcctgtcttatttacatgaccattgtgacccaaagattattcatcgtgatgtcaaagctgcaaatattttgttagatgaagacttcgaggctgtggtgggggattttggtttggccaaactaatggattacaaggatacccatgtaactactgctgttcgtggaacaattgggcacattgcacctgaatacctttcaacaggaaaatcctctgagaaaactgatgtatttggctatggaattacacttttagagcttattacaggacagcgggccttcgatctagcttgccttgctaatgatgatgatgtcatgcttcttgattgggctgacagctgaacaagtagtgacatgctcctgtccctgaaagtcaagggattgctcaaggagaagaaactggagagtctggtcgaccaagatctagaacacaactacgtcgacgttgaggtggaatctctggtacaggtcgcactcctctgcactcagagcaaccccatggaacgccctaagatgtcagaggttgtgaggatgctcgaaggcgatggtctcgccgagagatgggaggagtggcagaaagcggaagtagtacggcaagaggtcgagctaggccctcatcgaacttcggaatggatcctcgacttgaccgacaacctccacgctgaacagctgtcagggccgaggtgaaggcagctttggactcactgattcttgtatcttgcaagggcaatagcgatgtgtatcaatcatcctagtcaagaatcccccatttgttcataccaatcgttgggtgaagcgaggagatgtggtcagccatgatgtgcattggatgtatgttgctgaggtgacatggctgagttcatatatgcgagggcagcagagctcgacaagctagtgtcgtgcgctgtcggtgcatgcactagtggtcctggatttgcgaaggtagggggagctaaggtgctgtggctgtcatctgggtctgcgataagttaattgtactgacagttgacatctaactattttgtgtatctaatgtaaggttggaaggaactgacgcgaaccgttctgactcccctcctacaaaaggatcggatgatataggtgtgcctatggacctgttctgggtggcaaggttaatcagaagtttccgtgctgagtgttgtaattatgtctctagactgtactctgtagtggcgaacttaagagttagtttgatggacaggaaaatgaaggggattcctctcctatggatcttctctatttttctgtccaaactaaatcagccctaatgagggtgggacgttagggtggggatgtatagacgtcatgtaatggaggaggtgcatatttcttagggtacatctacacatcctaaactgaatatagcttcgcccccctatttatatcgatgatctcaattttcgtgcatgtcggttaaccagtcagtactccagatggtaccgtgcatctcgccccaacttggcgtaacttcattctag

SEQ ID NO: 34903 - DNA, 2999 bp, Zea Mays
ccgctgcgctcctcccctccaccctcctatccccccacctcactccgcttgtgcggccgcgtggtggtgcctcccgcggcgctgcggctgctctccgatcccgagcgagcacatatcctcgccaccttatcacgaggccctcgcaccgcgccgacgcgatcagcgcgtcgagccaccggagtctccccttgcgggattgcatctcaagaatatggggagaaagaagaaccccattgtctttctggatgtatccgtaggtgacgagccagatgaaagaatgatctttgagttgtttgctgatgttgcaccccttacaactgagaacttcagagctttatgcacaggtgagctgggaattggacagaagactaagaagcccttatgttacaagggaacattgttccaccgcgtgatcaaggggtttatggcacaaggaggtgacattgcaaaagaaaatgggtctggtggtgaaaacatatatagtggaaaatttacagatgaaacttgtgttctacttcatgatgatcgtggcctcttgacaacagcagatactggattcaaacctagtggctcccagttctgcattactttcaagcctaattctcatcttgacaggaagcacacagtttttggcaagcttgttgttggaagtgatgttctgaagaggatcgagcaagtagatgtgcaatcccctgattcaactcctgttattccagttactatagtaaattgtggagagctcattgaacgcaaagatattggctctatgtcaatagaaattgataaaaaaagggctgccaaatcaaagttgacaagggatataacttctgacgaggaaagtaatgaaggacaacacaagagacgtcgtaacaaatcttcaaaaaggagaaggaagaagaggagatattcttattcggaatcagatagctcttctgagtcagagactgaatcatctgattatgagagcgattctgatacttactctagtgactcatctgatgtcagcagctcaagtgatgacaggcgaaggcgcagaaagagacactcgaagaaaaataaacgcaagcattcaagaagaaagcgtgaccataggcgcgaaagaaggcgtaggaagcgtggtaggaaatcaaaacagaagtcaaaaaggatagtaaagggtgatagtgaagctgaaagtacgggcgatagcagttctgaagatgctagaagcaagagacaccgccgtgggcggaagttcaaggcatcatctcaagtttctgaggaaaatcttgctggagtggctgctttgaaggatgccacctcacctcaacaaaagagtggaatacagaggagtccagcacaagatgtctcctccctgcaaaatggggaagtccatacaaatggtgttaatgactcaaaaattgaaagaaatgccgctgtcatgcctgttttaactggcaatcgaagcaaatctaggagccagagcatgagtgttaatcactcaatgagcaagagtatgagtatcagtccaagaagaagcccaatgaaaaggtcaagtaccagcccgaagaggtcacttagcaggagccctgttgacaataatcacagtagaagccctatccgtactcccaaaagaagcgtgagcaggagtccagccaggcggcagatcatgagcaggagccctgctaggagcccacccagaaattcaagcagaagccttcacataagcaggagtcctgttaaagcccacagaagaagcattagcaggagctcagctaggtccatgcaacagagaagtccaagcaggagtctggagagaactcatgtacgaaaaagtatcagtccaagcccacctttggagaagggaagaagcattacccgtacctctgtggtatctccattgcgaagtgttagtcggagcccagcaaggatttcaaggagcccacataggccttctaggagaagccctatgagaagtccacgatggaacatacgcagaagcctcagcaggagccctgcaagaatacctagaagaagtgtgagcagaatcccagtccacatcgcagggtagtaacaccaccaaacaatggaagaagcccatccaggagtggttctcctgatgggtcaccaaaacgcataagacgtggacggggttttactcagaggtactcatacgcaagacaatatcgctcaccttctgctgatcgctcacatcgttatggtggaagaaatgaccgtgacagatacatgggttaccggggttcccgccatcgatcacctcctagacggtatagaagcccacccagaggaagagtgtcatcgccaaggcgtggtaggtacaggaggaggagccgaagcgcctcacgcagccctgtctacagggaaagaggaaggggaggtggatacagcaaaagccctatacggagcagttcaccccctgccaggaaaccaaggtcacatggtgaccgtgcacggtcagtttcaagaagccacctttctgggtcagtatcaaggtctcctccagtgcatcatccctctccacctgattccccatcagtgaagcatgcaagtgatgagaaatctcagtccgcgtccccagctctgtcactgtctggtagccctaatcgtggaggcaagaaaggtttggtttcctacggggatggctcacctgattcagctgggaagtaggtttccaccggggcattgaaatgtatcttacaccgttagccattggctgttgatcaggtccatcaatactttttgttatatttctactgtaagaagcggtttggtccttgagctgcccagctgttacatatgttgtttgggatgatcggctatgtcctttggttatcacaagagtcgtaatttgagcttaggttttgctgttgctaaacatgtagcacagattcagtgtgggattttgatgttatataagcttcaacgcaaagaatcattacaatgttttgacctcggatgcctaagtacgattcacaatttatttcttttgcatattcaat

SEQ ID NO: 34904 - DNA, 2338 bp, Zea Mays
ctctcatttttctttttgttctcttcttcttctatcctcctcgtcttcctcgtgacttctccaaggtgaaaccctagctgctgcttccgccactcacgccgctcgccgccgacgccgactatcgccggaaacaggtcaacaggagagcccgttcaagtccgggacccctcaattgtccttttctctctctccccgcccaacttcccctgctctgccgccgcctccccagtccggcgtgcatcagcagcgacatcagagtcggcgatgggaggcgtcaccgacgttctcgtccccttatgttgatgaagtggcgtgccgtggagattcctttttgaccgatttcttgccggcattttatttcatgtctcagcagtcgcagtccatttctttactagaagaaactgacaggcagatacgagaaaaatcatgctcagagcaagtaaggcgtttgaaagaagcccggaatagctatcacgaggatttggtagattgtgtacggcattgtgtttggtaccgggccacccttttctcccagtggaagcaaaggggaatgtacgcaacttgcatgtgggtcgtggagcttcttttggtccttagtaactcaaatagcatgttccactatgttcctgagttctatgtggaatcactggtggattgtttccatgcactgcgaaggagcgatcctccttttgtttcccctgcattatttctcatgcaagggttggcctcgtttgtcactttggttgtcaagcacttcgatgatacaaggatagtgaaccctgacttgaaagatcttcttcttcaatcaatatcagttctcgtacagtataaagaattcatgcttgttttcgagaacaatcgggaggctataaataaaatgcctagatcactgttatcagcttttgacaacagatcatggattcctgttacaaacatactttcccggttctgcaaaggctcaggatttgcttcctataagaatggtgaatccgcatcatctgcaacttttcaggttctactgagggagacatgtattcatgaacaagagctgttcttttcctttcttaatcgacttttcaatacactcagctggacaatgaccgagttctctatgtccatccgggagatgcaagataaaaaccaggttgctgatttgcagcagaggaagtgcagtgtaatttttgatatctcatgtagccttgcgagaatcttggaattctgtacccgagagattccttgtgcttttctcatgggaccagatatgaatttgcggaggttgactgaattggttgtctttattctcaaccacatcatatcagtagctgatgcagagttctttgacatgacactaagacggccagggcagcatcaagagaaaacaaatcgtactatgatcttggctcctcttgtgggcattatcctcagtcttatggaatgtagcagcacatcagaacgaagggagctaaatgatgtgattgcagtgttcgccagcatggattgccctgccacaatccattttgggctgcagtacctactgagctacaactggagcaatgttcttcgaggggattcatcccttgcaaagctagcgcagcttaaagagttctcccattacttccgacgcattacagcgtccgtggatggtgaagaagaagaccatagcctaaacgcgggcgatgaagacgacgaccacacttgttgcatttgctacaactgtgattccgatgcaacattccagccatgccatcaccggtcctgctttggctgcataagcaggcatctcctgaacaaccagaggtgtttcttctgcaatgcagtggtaacatcggttactagatagccgattcgcgagcgatgcgctgctctactcattgcctctttcggtatcgtgatccgaaggaagatggtgccactgatttgtcttatctattttgcttgacctgagggctggggcgctggcgtcccagagatctttccattgcttttccaggaagaacgcgttacctttgtgcacgagggtcagaagcggttcttcgttttccttgctgtatatgtaaaggccagggggagattccacgactgtaaatatgatgagatatgaaacagaaaagggggtggcagatcaacatcgaccttctgtaattagccagaataaaagaactagatgctttatattgagcagagctctcgtctttttgatcctccccacggtgtagtatcaagaatgaataaatcttctgtttcttgtctggttgtagcatgccagcatctgtaagttgtaacaattcagtgaatttatttaccttcagcaaaaagggtaaaaaggttgcctcttcaa

SEQ ID NO: 34905 - DNA, 1615 bp, Zea Mays
tgcaaattctcttcaacacgcgcacatgtgacatgccccatggtcgccgccgctccaggcatcctcccgtggcctcacctccctctcccttcctcctcccacccgtctgacgcctctgacgccgccgcagcagcaacagacgccaacacctccgcgtatgacatccagatcttcgagcccacctccatcgaggagcgtcgtcgcctcctgatccagcggcgtcgcctccgactcgccgcctcccatgcctcgcggctcaccgttgcctcgcgcgtctcctccaaactcatcagcgccaccgcctcctgctccagcggcgtcgcatccgatctgccgcctcccctcctcatggctcgtcgttgcctcccgcctcttccccaacctcgcccttgccgcccttggaggatcccaaatccgacgacgagctcagtaggcccacgcagacgcggatgtgctatgaacttcagattctgtatcgatggcaatgggttccagaacagtacacaaggcaatttcaagacggttattcaattgctcaaatagttcagtaagtgagaacaaagaaacttcctaaatgtattaatatggtatgatgaatagtgtctcacacattgtgttgttgagctctggtctccatttccgtgctgctagaatgtgatttgaagtattcaccttttgacatggataaacatcttctctctgttgcatttgcaggcgaaagaaggctcatgtgctgcttcgaaaatcagttctaagaaggcaaccagggacaacaaacctgataagggaagaaacatgttctggataaatattggcctttgtttcaagactccaaggtaagccattgaatcccgccaccatccagggatcaatcctcaccacgaggaccaggggtgatgccaacaaggtgtacgtgaacctttcctggggtgttgataatttagctctcgcaaacctgttcactgagcaaggaccatctatgacagtgagaacaagtcaagagggtttgatttttgtcatgtatggttccacagaagagcctgagaatgcattatcgaatctcaatggagctatgagttctgaaacccttttttcttccccttgctgctcgcggcatagcatttggaaattgaagtacaatttgtctttcacgatatactgaattgatttatcattgtcctgcaggacttggatgatagatccgtgttacgataccagcatcaaagccgcctagaagcaatactgaactttcacttgagatgtgagtagttgtagtagtagcccaaactctggaatatagtatcatcattcctagatatgtagttgtaaattctctgcccagaggtttgagctatcactcagattatgggttcaatgtcatgtatagagtcaagaaaaaacatcttctgtgcgtcttcgagtctttcaaaggcaaaacaaattacacgcgcgctgacgcgcaccaatttactagtatatattcaggtacaaagtttgttccgatttctgtgaattgttcatgcagaactgggttttggtggtcatcacgaaagttgtagcaagttttctgcagatttccataatacacatgtttgcctcatttggggccagtgaa

SEQ ID NO: 34906 - DNA, 1225 bp, Zea Mays
gagctttctctcgctcctgagtgcagtctctctctctgcgccctgcgctctgcgccgccgccatggaggacgacgatgactgccctcctctcgccgttgagctccctccgcgggtgccgtcccctccagagcaatctccctcagacgcctcgccagttggcatcaccgtcatcaccggctacctcggggctggcaagtcgacgctagtcaactacattctgaatgagcaacatgggaagagaattgccgtgatactaaatgagtttggagaggaaattggggtcgagagggcgatgatcaatgaggggcaaggtggtgcacttatcgaggaatgggtggagctggccaatggatgtgtctgttgctctgtaaaacacagtctggttcaagcacttgagcagcttgtgcagagaaaggatagaatggatcatatattacttgagacaacagggttggccgatcctgctccacttgtttctgttctttggctagacgatcaattggagtcgtcaattgtgctggattctattattacggatgttgtgatattgaacaaaattgacctagtggaagacagtcttgaggatctggaaaaacatattcgtgatgtgaatgctctggttacagtggtgcggtccgtccgttgccaggttgacttgaatgaagtatttaaccggcaagcatatggtgccaaggtggagtcttggcttgaagatcttctttgggaaaagaaatctattatggacatatatcgctgtaaagggattttatatatccatgattcagaccaagttcatacattacaggcagtgagggaggtctatgaagttgtgccggctcgaaaatggtctgagacagagtctcgcatgaacaagatagttgtcataggccgcaatctggatatcaatgtacttcaagattcttttagtggttgcaagagctgataatgagtatctgtttgccttgcacaatgttagttggccatttttctgtgaggtacctctgtgcaagtgaatactgaattggaggagaatcttaggtagggaatatagataacaggcgctccatatataaacttcgttattaggtgctgtatggactatggttcacatatttgtaacttgaacggtaaccgataatgttaaaacatgtttgtttaagtccaaccgtaatcagataccacactactagaaactgatatcatcctaaatcattattgttgcaa

SEQ ID NO: 34907 - DNA, 597 bp, Zea Mays
aggaagcccacttgcagtgcgggcgcggatgtgcatttcccttttcaacccacttgcagtgtcgactgggctaccgcggtattaccgccgccgccgccgccgccctacgccggttaccgaggtcttcgtcagccccttcgccggcggcgagcaccctttaggttggtgatagaggcaggtaggagcggctccgatgcggaccgcctaagatgagcccattacgttctcgcgtcggcttacactggctcccacgccgtgggtggatgtttcgccaggccaagacgagcatccatgcttgtcgcgactggtgctgatgcctggttgcaggcctttggcggaccgacgttgcttcctcgggtcaaggttttggcctctcacgaagaggatgccaggaaagagaatgacatggtggaggagattctaatccccaagcaaacaattggtggcaattggtttgttccgtttcgtgctccatgagacatgcagctcaccttcgtcgtcgctccctccgtcaaagctttgctccactacctatggcaaagagttggataaagtgactggtcaaaagagacgtggtgttattaactatgacacaag

SEQ ID NO: 34908 - DNA, 2516 bp, Zea Mays
cgggagccaccaccggttcgtgtcgggaccggaaaccacgatcagccttgcacagttcccggcttccagccgccgccgccgcggggagcaccggccgttggttcttcgtctccgccccgcttgcgagaagagcgacgcgtttccccttcgaaccctcgtgtatcgtgggtcatggtgacgcctcgtggtagcggcgggagatggtgaagatagtgacgtacaacgtgaatgggctgcggccgcgggtggcgcagcacggctcgctccgctgcctcctcgacgccctcgatgccgacatcatctgcttccaggagaccaaattgtcaaggcaggacctatctgcggatgtaattatggctgatggatatgaggcttttgtttcatgcaaccgctcttcaaaaggccgtggagcatactctggtgttgcaacattttgccgagtaacatcatcattttccagccaggaggttgctttgccagtagcagctgaagaaggctttactggacttcaggactatgcaaaaaatagtcaaactgttggggatttcagtattgcaatgcctgttgaggaggagggtcttggtgaactcacaagagaggacctcttaagggtggacaatgaggggcggtgcatcatcactgatcatggacattttgttcttttcaacatatacggcccagctgttgacggagatgataaagagcgtgttcgttttaagctactattttacaagatactgcagaaaagatgggaacgtctattggctcttggaaagagagtttttgttgttggtgatttgaatattgctcctgcttctatagacaggtgtgacgcggcacctggcttcgagaagcaaatgttccgggaatggctgagatccatgctgagagaacatggaggtcccttttttgatgcttttagatcaaaacaccctgaaaggacaggagcatatacttgttttaatcaaaaaattggtgcagaagagtataattatggttctagaatagaccacattctcatttccggttcctgtctccatcgctgtgattctgtggaggaccatagcattttttgttgccatgtagaagaatgtgagataatgaatcatttcaaaagagggaattctgaaaatttatcaaagtggaaagggggaagaagcagtaagctagaaggatctgatcatattccagtttatattttactgaaagaaatacctgaacttccggtccataatatcccaccatcagctgcaagatatcttccagagatccgtggaaggcaacaaagtatagtatcgttccttgataaagggaaaatttatgagctgcaaaatgctgcaaatttgattcaatctgaagatacagtacttgatagttactgtagtgatggcttggaaaatacaattctagctaagaaaggactggcaactggtataactgagtttgcaaaaggtggtaaccttcctagtttgatgtgcaaggggacagatctgaatcaatggataaatgaaggtttaatgggcatctctcatgtcagccagaaaaaatcactgtctagtaccaagtttgtgccacaaaagaaaattaaacgcaacttatcatcccaaccaacaatcaagtcattttttcaaagaccagggtcaaagacagtaaatgctagtaccagtaccttagttactccagcagaaacattagaccttacaaatcaagcatgtgtttcaaatggtgatacactgcctgaaaacatgcagtgcacaacttcagctgcaaaagttcaggataacacagatgcatcgtcatgttcactttcaacagacaagtctaatgctgcagcattggagtggcagaggatacagaaaaagatgaagatgacactaccacgttgcaaagggcatagtgaaccatgcattccgaggtctgtgaagaagggccctaatataggccgtttgttctatgtctgtgctcgtgctcagggacctgcatcaaatccagaagccaattgtggccactttcagtgggcacctggaaagtctaaagagaagagctctaaagagaaacgtctgtgacttcatttttctcccaggtgaaaggattccttcagcactcagtgtattcctttgtgttgtgctaactgccaattttaactaggaatccaggacattttgcttccaatgagtctggtacatcaccttgtcccagcatactgatgacgtggcgatgtatttgtggagaggtaagctgatcaagggcctgtttgggaggtctggctctgactggctccttgctctagtaaccggaggggccacaaaacgtgtcttcaccagctccccattgttttgaaaaggacagaaaacaacttcatgaacattgcagccacagtgccatggataagctacagtagcgcatcagctggaacagccaagagctgtcccaaacgtggcctgaacaagcacttctctcagttgaacgcggagcacatctgcacaggttgtgttttgaacacgtggaagtcaaat

SEQ ID NO: 34909 - DNA, 615 bp, Zea Mays
tggcttatatgttgtgtatctaccgactggtgtttcctttgagcaatgcggcagtactttggtgaggaggatgctcgtcagaagctggctccctgtcctaaacgtctgccgggacattgttcaaccaatgcactcccagaaatcaaccaactgccaagagctggagggggcgtttcttcagatcatctccacattgccttttctagaagcacaggagctgctgcagcaatgcctggggttctcgactcgcaatgtcgatgactgcccgcatctggtcacggcattcaagacgtggttccggcgcgctggccgggctcctctaggcggggaaaactgaaacatgagcggatgtctgtatgcgcccaatcggtgcttgtgtcgctttgtattctcacatcacatagtctgctatcggcctacctacatcctctggatttggtatagtgcttgcctctctctctctctcgaatttgtctgtatatactgtcggtcgtttttgcacttaattgcacctactacttttagctattgtctataatcaataaccaaggtaaatgtatgcagcgtatgatccgtgtttttaactctaacaatgaggtctgcgtgcctattttc

SEQ ID NO: 34910 - DNA, 1776 bp, Zea Mays
cgacgagcagtgccgcgctcccgaggaagtggagtgggaccacaagagcaaggagacccggaagatgcacgcctgcggccacgacgcccacaccgcgatgctgctcggcgccgccaggatcctccatgagcgccgccacgacctgcagggcacagtagtcctccttttccagccgggagaggaggtcggcattggcgccaagaagatggtggaggcgggcgccgtggagaacgtcgaggccatattcgggttccacgtcaccgtaatgctccctaccggcgtggtgggctctagggccggcccgttgctggccgggtgcgggttcttcgaggcggtgatcaccggggccggtggccacgccgccaccccccacaacatcgtcgaccccgtggtggcagcctccagcgtcgtcctcagcttgcagagcctcgtctcgcgggaggcggacccgctggactcgcaggtggtaacagtgacgaggttccagggcggcggcgcgttcaacgtgatcccggactccgtggcgatcggcggcacgtttcggtgcttctccagcgatggcttcatgcggctgaagcgtcgcatcgaggaggtgatcgtttcgcaatccgcggtgcaccgatgcgccgcgtccgtggacttcggcgccggtgggagccccctgctgcccccgaccgtgaacgccgcctcgctgcacgcgcacttcgaggccgtcccagcctcgcacttctactttgttgggatacggaacgaggggatcggggccgtgcacgccgcacactccccgcacttcctcgtcgacgacgacgcgcttccgtacggcgccgcaatgcacgccaacctcgccatcgggtacctgcggaaccgcgcggcagccaacgacgggcccgtcgtcgccccccacgacgagctttaggttcactgcagctttttcacgagcgacctacgattgtgcggcggcttgcagtcacacacgtcgggatcccatcgttggactgatcttgccgtccaatgcgcataacgattgcgtggctgagtggctctgatcacgaaacaagtgaaactgcacgcatttaattctaaggggcataacaaaatcaaataattataattagagtccgtttggcacaactttagctcctgattctagacgaggattcggaggagccgtgccaaacggatgtttctgtgaactgatgctcacatagaacaggaatgatcgagagtcgtctttatatagaaacgtgggagctgaaaaatcttgcttcaccctccttaaaacagctcctcaaccaaatatgaatctcacgttaacttttaattgaaattacccgcaattgccattcaacaaaaacacccgctatccctccactatcgtcctgactcctgagcccaaccgacccaaaacttgtgccgcccctacctccatcttctcccacgctgcccttagggcattcctcgccatccatacgtgtgtctcccccgcccatacatgcgtctcccccggtctcatcatcgtggtgttttttttttccaccagatgatcgccgcccccaactagaactgcgtggagaaggtgcgtatcctctgatgctgcttgctacccaaggaaacttgaataaacaattgtgttagaacttggctatgcaacatggaatagaatttgcatcgaatagtatttgttgtatggaatagtattttattttcttcctttgtcctttgatttgcaggatggaatagtatttgttctagattttatttttttatagcaccata

SEQ ID NO: 34911 - DNA, 735 bp, Zea Mays
agaacagaacacgagaagttgactatcgcgaggtggccaagaaggaaaagtagcggcggcatggggtcgcccaaggcggccaagagcatggtgaagcaacgcatctggcgtcaccggctcgtcgcgccgttcgctgccgttctcatcacggccgtcgtcgtattctccggcctgttcgcgcaggacccaagtgccacctcggagttcactgccgtgaacgcgggtaacaccctgccagtgcgcgataagtcggaatccacagagcccaatcaagctttccaaggcaccgtgcctgcagcaggcgagagagggacagcaacggcagtgccggtccaacgagaaagaagcagtggaggatctgaacctgaagagaagcaatcgcccccacaggaccaggaaggagaagaaacctctgctaagtcaggagctagcttctgtgctcggacggtggtacacaaactggaggaagaatatgtcctttgtgctctgctggagcctcggctctcaacaaactcctctctaggttgctctcctcgggctttctatctcaaggagatgttttcgtgggtcgaggttgtatttttgttttgactttgtacctttgtacggggttcagagaggcctctcaataactccctgtactattttttttcttctttttaatgaaatgccacacgagtttattttgcattgttcgagaaaaaaaatagataaatatgttttataaaaaaaaga

SEQ ID NO: 34912 - DNA, 688 bp, Zea Mays
ccttctcgttgcattcctgttcttttcgcttgtgcgaatggcagagctacgcttactagggtgctgccctgtgtgccccacccaggacacagtatgctgctcaccatggcgctgcgctgtgactcagcaaagtggcaagatgcaaggcttgccgagctgcctagccattataatgcttggtccttgaattgaagtcaattgatttccgatttaataaggcacagtttgtttgagcttctgctgtcgtcttcacatattttaatttttaatgcatgtggggattactgaaattgttgtgcagacatgtgttttgagattgtgtgctatttgtgcctgattttattgcacaggcagggtggtctatctcaaagatttttgaaagttgtttcttattatggtctcacgactctgccatataaactggatgctctggaaccttacatgagaaagagaacagttgaacttcactagggtctcgaatcatcactttttctgggaatcgatgcaaccagaaggtggtggcttacctgagggaggtgtgctatagcagattgaaaaggattttggcttgtttactaattttagggaagagtttattcgttcagccttacaactattgggtgaagagaaataagagaaagctttcagtagttcatacacgaaacattatctacccacttgcttttgg

SEQ ID NO: 34913 - DNA, 738 bp, Zea Mays
gccacggctgctgctgcgccgccgcgggcttcggaccaggcttcattccccgtgactcatggagacggcagtgatccgccgagcttcccgtgttgcagggcaggcgtgaggcgtccatgttctcatcagcaaggccggcaggaaggttcgcttcgcacttcagagcagggttctaatctgaacccgtgcaagataccatgcacacgaacatcgcagtggcatcacgaggaaccaagacactcagaaacaaatgttctctctaatattccatgatccagtgttcatctgtagtctgcaatgaacactaacgccgctgctgaagcgctactctgctacgtgctacctaagataagatgggataatcatgctaagccagccatatatccttgctagctacacttcatttcgaggagcagatgctacttgcagccgctcagcatagaagaaacaaccttgctagtaacaatgtaacatcaatacaatgtagacattaatggtttggcaagaacagtagatgtcctgctcagagcagtgaagatgttgattctgttggtagtgtgttcttgttgtgttggtattgtatgcattgaagtaattggaccctgaaatgtgtgtggttgtaagaaaacctctatgtgtagtacaataacaatcttaactatgtccttcttgtttgtgataagtttgagtcgattaaatggtgagaaaaatgtgtccataatcgaagaagtcataaaa

SEQ ID NO: 34914 - DNA, 2054 bp, Zea Mays
gctctctgactgagcctgagctccccttatccagagaggctagaacaaacctgaatttcatccccaccgtcgcctcgctcgacctccacctctctttcctcccggcagcaatggaggcggcacccaggtgaggcgagcaagcagccagccctggctccccgatggcgtgcctggcgccgcagttcaagtgggcgccgtcggccgccgcccacatgccttcctcgtcctcgtcctcgtcctactccaggtgctccgcgctccgcgtccactgcgccgtcacctccgccgctgtcgtcgaggaccgcaccaacggcagcgcggcgcagctgaggctcgcttacgcggctccggcgattcaggatcttttgaagcttgaggcgatccaagctgagcttatagagtacaatggcggtcagccaaccttctcgcagtgggcaacagcagctggagttgatgagaaaactttgcgcaagcgcttgaattatggtatttattgcaagaacagaatggtaacatctaatgtgagacttgtaatctctattgccagagagtttgaaggccctggaatggacttttatgatcttattcaggaaggaatgcagggccttataaggggagctgaaaaatttgattcatcaaaaggttttaggttctctacgtattctcactggtggatcaaacaagcaatgcgtaaatctgtctcagagcaatcccaaatatttcgcttgcctgctcacatggttgaagcaagctaccgtgtaaaggagtgtacaaaacgacttcgccgtaagcttagaagacgacccaccaatgaagaaattgcagtggacactggtattccaattaaacgagttgaggcagcagtaaacctcccaaaatatagtgtgtcccttgatagcaaaattggttccaccgacatgacatatcaggaggtcacagctgatcccagtgctgagacagctgaagagatgctcaacagaatgtccatgaagaaggacgtacacatggcactagatactctcaccactcgcgagaagcaagttgttgttctgaggtttgggctcgaggatggtcggataagaaccctgcaggagatcggtaacatcatgggtgtgagcagggagagaatccggcagatcgagtctggcgcgttccggaaactaaggagcaagaagaaggtgaaggctttgaaggattatctggtgccagtaggcaattggtgaaccgtttgtttgcagaatttgttttccttttggttcctctttttttttttgaggattctgtacttgtaccattttacgtgggtcctcatgtaaaacacgctatcagaatacttgcatcacaagaggaaagagtagtttagttccgtgggaaatgaagtaaaattcacaatttcttagctgctggttatctcttagaaatgaaatatgtttggacaaaactgtgtaatgcatgaaaactttagaggcgcttcgccatcttaagatgggatctaccctaagcctaaaagaactcatctagttttgtaccacctactaaaacaattctaaaaaaatatataatttatttttcttggctaagttatgtgtttagctactaaccaacaaaagaacaaacttagttcatacataaagaaataaaaaaaagataaatttttgttagggagtaaattgaactagctcaaataggtggaaatgtaaaataaacttaaaaaaatactccatccgttctaatttacaatttgtttgactttttatgctaagttggaccgactcgtcttatttaaaaaatttcataattattgtttagcatataatatactttaagtatgactttgtttttttgttttttattaaaaaaatgaataaaatgagctgatccaacttgatataaaaaatcaaacaaattataatttaggatgaaggaagtactaaaggggtacatggatatcattcataggtaaggcaagagaagtaatttagacgttttagaaatgaaggctgccggtcgttgggctccgtattggggcccaacacgagcgtctaggctagggc

SEQ ID NO: 34915 - DNA, 593 bp, Zea Mays
cccgaactgtgctcctattcaagagcttaagagttgtccagttatgcgatggaacggggcatgaccgcatgtaccattgaattagactcgtttttagaaatgaacagataattcaaaagattactatcaaattgcagagtaggtactaagaagatcgaaatccaatagagctagacgggtagagcggctgcagatgcgatcagagcctgtcgggatgtatgagaagtcatcactttatgacatcaggggattgacagactttcatacatgcatcatcacctcgcatcgaagatcaactaacaagaacaaatatccgacaagagaacggctacgaaaaccaactcacaaaagagactatgccaacgataaaaccgggtcagttggaagaacacgaggaatgaatctaagagaagaaaagaaataacaagtggctcagaacttcttagagggtttgtgcaaccaacaccggcgtccgagggatgcctccggcacacggatttctttcctcatcgccatcaaactgctcaaaacgatatagtaatcgacaaacagaaacaaagaaaaaatggagaaaacatgaaggcgaaagaacc

SEQ ID NO: 34916 - DNA, 742 bp, Zea Mays
cttgaggagccttaagaggaaggccatggccacggggcgcttcttcgactgtgctgggagtaggaacaccaagaaagtggcctcatttgatgtttgacgatcaagacctgggcttctttgccaatttcctgggcatcttcatctttgtcttggttattgcgtaccacttcgtgatggcagacccgaagtacgaaggaaactgatgtcctctagtgcaaagatcctattatctgcaggccgaaatagggctatactgttagctaatgctagtgagatcgcttgacactttgagtgcatatcatggaagctggacatgcagttcctggcattttggttttgcccatgttttaatctgctgaattagtaaatcctggagaattcaaaagcgttttcaagtactgcagttggtggttgtttctggtcctagtgtatgcatgccagaatcttatgaataatattctttgttttgttgcctatttagctgtttagttggttgttagcctgtcaagaaactggggaacggctccgttactagactacattgagtcgtctctcacattggagtctgggagcaccaccaggcagaggcagccatgttcttatgttgttttgtgctgtctgctcaagctttcgttcatctcacctgaggcctcccttcgttgaagagagagcttggatgagagctctgtttttccttctttttttattatttactattcaaaaagtcgagaccagaaaaaag

SEQ ID NO: 34917 - DNA, 2231 bp, Zea Mays
ccatgcccatcttcaggtgactaaacggcaccggactccgttcaccggctgcaatctcttctcccgttcgccccgcgctctccttctctctctctctcgtggcgcaactgggtggccgccgccctacgccaggtgcctttgccggtcttcgtcgggccggttgccggcgacgagcacccaccagagctattggttgaacatgtgtacaccaatgtcgccatggatggggcggctgcgctctcaccacgcgacccctcaaagttttcccaagaggaggcccccttcccagaccaagaacccggaggagaaagaggagctccaaacatggaagaagcatactgcccgcaagaagaccgcgagaggtcgccacgctggagctgctgcacagcagcccagggcgttcttacgtgggtcttcgcggctcgctggaagagactatgagcatccgattatgatagacgatgatgtaaacgaggaatgtaaatccagggctgatcaatcagcaattacacctctccgcagatccccacgattccatctggaagataaaagtttgagcaagtcactgttgccaccaaatcgctgtgagacctctcctaacagaaagactaaaaatgctcatagaaaagacaaaaatcaagagagcctgaaagggaataggggaagtgctggatttcctcctaggaaagatatttcagatgtatctaacaaaaagagtgacaagcaagagttaaagcccatccattgtaaagtgcaaacaggaaagaggaagagaggaacagaaaggaggttgttatcgaagaagcaaagttgccaggaccctggaccattgcctgcgtatcgccaagaaattgcatcttgcaatgaatccagaaaatccacccacagaaggattgaaaatgacccttctaccgaggtgaagcttaaagttggtgatgtgagattggcaaacattgatgaaaacatcaacaagcccagtgggactcagagagaaggaatagaaattttttgtggtcctgatgattggacaaaagagcaggacatggcattgcgcaaagcttacttcagtgcccgaccatccccacatttctggaagagggtttcaaaaatgggagatctgctgaagattgcttcaacagaatttatactgacctctcaacaccgactccaattgccccacgtcccagagcaagtaaaacaacattttctcctataggaaatttcacattgtctgatccaaaacctccaaatatcttggaacctacagttggaatgcgaaagtccgctaaacagaagagtctagtagcacagaagacagtgaggcatttgttgcagaaacattgccgcattgaccaagctcaagaggctgaccacttctcagtttttgaaagctcaccaagtgccttacaattgaacttatcttttgacaattctcctgggactcctgacagttatatgaattcagattctctaggcaagcacagtggaaggtcttcagcacgaaagaaaccattttcaaggttaagaactaaaccatctgaacccagcccaggagttctaaagcctataaagaatgttatcctacatgagaggtacattgataaattggcacgtagagaaggcgcaaaaaggcctcgcagaagggctccagctggctctaaagctgctgattctgggaagtctctttctgagcagcaagctggtagtctgaaggctgctaaaaatgctctcatctcagaagcaaccgacttcataagcagttttaagacgcttcaagccaattcgcttgcgcatgctgtggagaatagtgaagacgagattgaatgtgatgccagtgattgtagccatgatgataaagaataagaatgtccttatagtcttgattcccagcggcccttagcaatcatctcctttttgtcaactaacgttagtcatcacttatcagttgtcagctgatgttagtcagcacttatcagctgcaataaggctaggcagttgtcagggcagtgtattctgcctaatatgatgtatctagttttgttcctcttagtgcatcagagatgttagttagttgtgaaatgttgccttcgtcatgccttatgaagattgaaatcactggagattacaatggtcgaacctgattctcttgtgtaattaagtttgcataaatcagaaaggttcattaaacatagtttgttccattttttcttgaacacacatcagaaacacgt

SEQ ID NO: 34918 - DNA, 887 bp, Zea Mays
cttcagtgacgcttcgtcaaccacgccgacgaccttcccttcatgcggaggtcgcctactcgcatcgaggccgcctgctccttctaatttgctaaattcttctggtgtgtgtgccgccgtgggcaggggggcatccctctcgcggtcaattgggtgggctccagttgcacgtgctcaaaatacatgtgggagaggatatcgtatcaaagattgtgcaggtcccgaaaataactaggaaggctgtctgtgttctctcagtgtttggggccgttcaggattgctatctgctccactctgctgtcatcttaaatcacaagggtcctttagaaatcattcgtgtgtttggatccattttgacatctgatagtcctggatttgggtgcttatctgcgactcttgcttgtggtgattgttctcttgtcggtggcattgcagttggacctctcatagctacaacaccggtgcagcaggaagaaagaggcataagtgaataacgatgcacgagacgaacacgaggcgaagaggccacaaaagagacgatgtcagcggaagaggcgaagaggccacgagacccacgagacgccgcagcggcagtagtctgcagcaaggagcgcttaagtacgggattgcagcgaggtgcgacagagaaagagagaaaaccttgggtttcctggtcagcgaggtgcattttattttagaagtactataaatttaaattagggttggaaatggatgtttggtgatccgaattattcgtattcgtactcactaaaactgctaatatggatatccgtatccgtattcgatttcaatatgtttgtcaaatggatgtattcgaattcgatttatagtacttttctccatccgattccatattcgtattcgaa

SEQ ID NO: 34919 - DNA, 2916 bp, Zea Mays
atggatgatagatagagctgcggaggagcagggtgagggggaggtgctgccgcccacggtgatcatctctatggccgtgtagaggagcactgcagccggaagagattattcagacacactcacacacacacacacacacacacacacacacacagagagagagagagagagagagagagagagagagagagagagagagagagagagagagagagagagagagagagagagagagagagagagagagaagggaagcatgaagccaagaaccgcgacactggccgccggcctcctccagctcgtcgcgcttgcggcggtggcggaagccgacaccgacgccggcgacgttgccgccctggggaacctctacagctcctggaacagcccggcgcgcctcgccggctggtccgccagcggcggcgacccctgcggcgccgcgtggacgggcgtctcctgctcgggctccgccgtcacctcaatcaagctttctggtatggagctgaacggcactcttggctatcagttgtcaagcctgcaggctctgaaaacgatggacttgagcaacaactacttgcacgattcaattccttaccagctgccatcaaaccttacctatctgaacctggcgaaaaacaacttctctggtaatcttccgtactctatatccaacctggtctcgcttgagtacctcaacctcagccacaactcgttgtttcaggaaatcggagaactgtttggaagcctcagttcactctcagaactagacatatctttcaacaacctcacggggaatcttcctttctcaatgggctccctgtcaaaactttctagcctttatatgcaaaacaatcagctgtcgggcacagttgatgtcatcagcaacataagccttgcgacactagatattgcaagcaacaatttcagcggcatgataccccaagagttcagctcgatcccaaacctaatgtatgcgcaaagttgcaggaaactcatttgtcaatatgcctgcctccccgccacaagctctgacgccacctccgaatccacgtggccggccagacgatcgtcggggaccaaccagcgctccaactgtcccggagactcccattgacccggacgacaagaagatgcaaacgggacctcttgtagggatagctgttggctcaatagctgctgcctcgtgcgttcttttcgcgctggtgttgtgcctccacaacgcacggaaaaaacccgatgatgggagcagtgaagcgaaaggtattgcgggttcgcatctagtagtgactacgtctagcagggaagtcatggacagtagccatgacaacgctgctgtggcaacttcagacctccaactgatccagcctgctggaaagatgactccggacgacagagcgcatggtccaaacggttgtaccgccaaaaggccaaagcagcaggttactgtgacgacagtgagttcctacacagttgctgctctccaagtcgctacgaacagcttctgccaagactctctcctaggcgagggctcgcttgggcgtgtttacaaggctgtttttcctaacgggaaggtacttgctgtgaagaagatagacagcgcttcgctgtctctgtacgaagaagacaactttctcgcggttgtgtcgaacgtgtcccggctcaggcatccaaacatcgtgccccttgcaggctactgcgtggagcacgggcagaggctccttgcgtacgagtacgtcgggaacggaacgctgcatgacatgctgcacttctctgacgacgacgggatgacgatgccgggcaagactactaggctcgcatggaacacccgcgcgaggatagcgctaggcaccgcgcgcgctctagagtacctgcatgaggtgtgcctgcccccggtggtgcacagggccttcaagtcatcaaacatcctgctcgacgacgagtacagcccgcgtctgtccgactgtgggctcgctgctctgtcgccgaaccctgagactgagagggaggctttcgctggagtggttggctccttcggatacagcgcccctgagttcgccatgtcagggacgtacactgccaagagtgacgtgtacagtttcggggtagtgatgctggagctgttgaccggccgcaagccgctagacagctccagggagaggtcggaacagtctcttgtgagatgggcgaccccgcagctccacgacatcgatctgctcgccaagatggtcgatcctgcactggatgggctgtaccctgccaagtccctctcccgtttcgccgacataatcgccatctgcgtccagtcggagccggagttccggccgccgatgtccgaagtcgtgcagcagctggtgcgcctgatgcagcgggcgagcatcgtgaggcgacaatcggacgaccagctgggctactcgtacagggttcccgagcgcgacggcggcggcacggtaggcggcgacgtcgtcgtcgcctgagctagctagctagctagaggccgcgacgagaccaaagctggcgtacactcctactcctacacaaagcgctgcacagtttatatatattcataaacaaaagagcgagcaaaagaaaagaaaagcagttggatatggatggatccttcacgttttgttaaaaagtcacccgtaaacgacatatatgtatagggtttgcagcgtactgggacgtttcttcgtgagctgcgagtgtcatgtatagtgtgcgctcttgccagtggtagatatataggataggagaaaaaaaaacgtgtcttcttttgttggtgtgttcagttcttcgaccatacacgccagccgcagacggtgacctctgcagccttgctttgcggcgagaggcaaggcagttttctccggtttgcgatgcggcaattcagcgggcgccttgtggcttatcgcatggaac

SEQ ID NO: 34920 - DNA, 3032 bp, Zea Mays
cggatataaaatgcgcgtgtattatctagtccagtccaaccgacccggcatcgtctcgcgagccgcgactcgtctcgtcatttccatcgaacgcccagatcccacattcccacctagctctgcgcgatccatcccggccgccacgccaaggaggccctcgcctgacctcggatcaaagcctcctccatccgccttcatcccggccggtggttcgggccgtcacgggaggggtccatcactggttactcggtggagagctcggggctcggctcccatctcacgattctcaccccacacgcgcaccgggtcacctcgattcggcagcctcgcggtgagttgagttcttcgcttgtcgggccagtccgcctctcgcttggcgcggttatggattcgcgggtggcgtggcgtcgtccgcgatcgctctagctcgcattgagcgattcgcgagttgcgactccttgttttgtttgctctctgtttttttttatgtcgatggtgatatgtggcggcgggattctgagctcggttgcttctaaccttccgcggagtggtttagctaatcggttttgaagctgttgatatggatgtgccgtgtgcgtgacgaatcgaatgggccgcagcaggattcctacgcagctcggcagcagggggaattggatcctgcgaccatgcgaatttggaaccctggagcagtggagtgctaggaggtctcggtgtcgtcatttttttctaggggcgtaggagtcgacttggttggaatctagttagtcataatttctctttctgatttcattggtctgtccatgcgtctgttttcgtcaaacaagaagtttgttattgccaagcatcccgctatggaggaagctgcctgccgtattgtgttacgcgaatccggtgagctgggctctgcgcgttcctcttgacgccctttgcgcgaacgacgagctttcttccagctcggttgcccctgaacaaccaacgccaaaagcagctccagaattttcctgatgtcgtctctatatttttgccttctaagtcatgcttaatggcagagtccttgttgcgtgggtcactgcctcactgggttctgaggcaaggaaaagaaggcttcagtagtcaggtctgggtcaagccatgatggagagatcgctgctggaggtgctggccacggcggcgcaaggagggaccgaggggacgtcagtgctgagcatgctcaagtacgccgtgctgcccatcgccaaggtgttcactgtctgcttcatggggttccttatggcctccaagtacgtcaacattctccagcccaacggccgcaagcttctcaatgggcttgtgttttcccttctgcttccatgccttatattttcccaattgggtagagcaatcactatcgagaagatgatacaatggtggtatattccagtaaatattgttgttggcgcagtatcgggctctttgattggatttgttgtggcatctatcatcagacctccatatccatacttcaagttcactgttatccatataggaataggaaatattggaaatatacctctggtcctcattgcagcgttatgtcgtgatccttctaacccatttggcgactctgataaatgcaatcaagatgggaatgcatatatctcatttggccaatgggttggtgcaattattgtttacacatatgtattcaaaatgcttgctccaccaccaggacagacctttgatggttctgaagaggatggaatcccaatcaaggcatctggagagaatacagtgccccaagtaggaaaatatcctatgaacactaacagtagtactgtaccagagaatgaacctttgttatctgctggggaagttcaaaaggagcgtgccacttctgtaggaacaaagataatgggctatgttaaatgtgtggttaagtttctgaaagacaagcagcttctccagccaccaattattgcatctgcttttgcaattgcaatcggtgttatcccattcttgaagaattttgtacttacggatgatgctcctctgttctttttcacagacagctgcctcattcttggagaagctatgatcccatgcattttacttgctgttgggggcaatcttgtcgatggccctggtgaaggaagtaagaggcttggcgtgcgtaccactgttgctataatttttgcacggttggtcttggtccctcttgctggggttggcattaccatgttagttgataaacttggtttcattcccgaaggtgatagaatgttcaagtttgtcctgctactgcagcattctatgcccacatcagtgttgtcaggtgctgttgcaaatctgagaggttgtggaaaagaatcagctgcaattttgttctgggttcacatttttgctgtgttctccatggcgggatggattatattctatctgagtttgctcttctaaatgccttactgcgcaggaatatctttgagatcaaatatggtccaaaatgttgaggaagaaaccagtatcatgaactgtacagatatatcgttgcagaggtacaagtgtatctgtacagatatatggatacggtccctcctataatcccatattaccgtggtctcctgctgctacaagccgtgagcgatgggaacactttccctttccctccacgtatcaacaggttcacacccaaccctagattgggatgctggccttcttagttctccataatattatttcatttgtacttcctgtatattgtaaaccttgagatggctgtgttcaaatagtttcttattgggcgagggctgaagtagtagtatagatgtattatactacctatttgagtgttcggttatgccgcaaatgatgctttattatgcagaacttgtgcccgctgctggcccgtcggtcgtactaactaaaattgccaatcgcggagacttgcatgttgcaagctcaggccggcgcccagcggtttgcagcaaatttttttttttgactcggctatctccaatagaatactcaactcaatatttatatttaaactctac

SEQ ID NO: 34921 - DNA, 1838 bp, Zea Mays
atgcagcctcccggcccgcctctggcgacgccgcagccgctgccgccggcggtggcggcggagctcgcgcagcttgagtcgaggctgggccaggtcgccggagagcccgcgcgccacgagctcgcggagctaggcgaagtcgccgcggttcgcgtgctacgtaggatcgcgaggtctcaagagcaggtccggacgctcactggctacatcgtctcggctgcggtgcaggagacgttcgcgctcaatgcgcaggccgtccccaccgccgagagccgcgcctgcaactcctccgctccttccctaagtgatggatctgtacaagggccgcagtgcgccagtgaacttcgaatggaagaagtaactgcgggcctctcaaactatcgcatggcaatatgcgagggtcaaggtcaggaggatcatgcagtgatgatggcaattgacaacccacctgactgcatccccccctggggttgggaccaagattgcattgaagttgataaccttgtgccaggaattgcttctcaggcaaaccagatgcctatgcagtatggcgaccgcgaccgtatccaagaactagtttctattgtaccacatggtgttcgtatgctggctgaaagtcttgaaaatggcagagcatctgagttgcagaactatgtacaaaatggcattcccgaacagtggatggttccagcagatcaaagaatggaatccacctcgagccgcctgcaacatgttttaaaatgtcttcagggagttggaccctttggacaccatctcggtccggaatgtgcaataatgataccaaagcctgagccaaatgttgttgtcgaaaatttgttcagggagatagcaagccctcatatcacagacaacaaattgaggaatacagcgagccctcagatgtgtgcgttggaggatttagagttcagcaagagatttttgatactctcttatctttgtcggaataacctggaagatgaagttgtactgactgtggactatattaaatcgttgaagtttctgtccatggttcattttgagtcccaaatttggaggaaatttggtcagaagaattttcaggcatccaatagagctgcaacagatagggcaaagaatttcgattcagacccaactacaacaaaattataccattgcaatatcgagataagaggggagtccatattctttgttttgaagtttacaaggatccaggaaaagagacgaaaaagaaagacagtgaacagggggatatcaagaaatgcacttcgcctgtaagatgctattttatttgcactaagtctgggtggaggggggatgaggcttatattccaattgacaagtgccgcaaactgttcatgcatatccatactgctcccaccattgcaaattatatgaaaaggtttcatttgatactttccaaaactctaacactggatgttgatttatcgacaattgacgttatactgattgatgatgaaccttgtcgggacgagcatgggaacattgttatgctagatgggaagcgtttgatccatactgatgggactggcttcatatctgaaaatttggctaagaaatgccctagcagaataatcaaaggaaagaagtcaaaagtttatatgcatcaaggtgaaacaacggtccgtcttttttataatggatatgctgtaaagggaactctgctagttgacaaaaggatctatctatctatcaacagagatccttacataatagagatcgatctatctgttaacggagatcctagccatataggcatgctatacagggattctaacaccccctcagtttgagcgtcccatgagacggtgagattggta

SEQ ID NO: 34922 - DNA, 1536 bp, Zea Mays
ccgcctccgcctcccccgccccgcccgcctgcgccctcgcccgccgctgcattttcggtggcctcgccgcgtgcggccgcgagaagtgggaggctgctgcggtcctcgcccgcgtctgcccgtcgtctccacgtgggggcgtgcccggtaccggcgcgacgagaagccttacgcctgttcaagacgtcaggtgttggtatttgggttgcaattgagtgattgggaaacctgattggacagaagcattgttggtcaaccaatgggaagcaatgaccctagcacaccctccaaggcttcaaaggcatcaaaacaagtacttgaaacagatcaacctccagctaccacatccagtggaacagtttcagtttaccctgaatggcccagctttcaggcataccaagcaattccaccacatgggttcttcccccctaccgttgctgcaaatccacaggcccattcatacatgtggggagctcagcccatggtaccaccttatgggactccaccaccaccttatgtgatgtatccacctggagcagtatatgcccatccctctacacctcctactatgcatccgtttagtcattaccctatgccaacaaatggacatgctgaaactcctggaaccgcgccaagtgctccagaaatgaatgggaaaagtgagcctggcagaacatctgctccatctgccaatgggattacctcgcacagtgagagtggaagtgagagtgagagtgaaggaagtgatgccaattatgaaaatgattcacattcaaaggacaatgatggaaaggaagatggcaattctcagaatagcatatcttattcagcatcacaaggagtgttaaaccaaaccatggcgatgcttccaatacaaccgggcgcaatggttggaggagtttctagctccacagctaacttgaatattggagtgcactactgggaagctccaggttctgcagctgtctctgcaacgcatggcaaagcaccagctggttcagctcggggagaccaatgggatgaaagggaactcaagaagcaaaaacggaagcagtctaatagagaatcggcacgcagatcccggctgcgcaagcaggctgagtgtgaggagcttgggcaacgtgctgaaactctgaggtcggaaaactcgtctctcagggccgagcttgaacggatcagaaaggagtacgaacagctactttcgcagaacgcttcactcaaggaaaagctggggggcagcagtgacccgattcctgatatgaatgaacagaacgacggcaacggcagcgacaagaagcaatctgattccgatgcccagcctgggagcgagtcttgacccgtttagctcaggatccttgggaatgcacattgctatttattttctcgaacatggttgaacagaacataggagaaaaagaattgtttatgtaactcttaccccttgactgcctaatgtctctgacggcatgtatataatgtatgccctcactgctgaactagtactagtaattgaggaattgcagatattgacagctt

SEQ ID NO: 34923 - DNA, 1079 bp, Zea Mays
aaacaccaaacccactcgcaacaacggataacgctctcttccttcggctcctcccctctcgctcctatcctctcccctccaatggcgaccgccatttcctctctagtaactcctccgaccctccaccgccgctgcctgggccctgcctgcgtctccgtctccgtgtgcacccctatccgcatctccttccggcccgccgccgcgcctcaggtgtcgcgccggggctcggcgctgcgggtgtccgcctcctcggcggtgctcgaggcgccagaggcggtggcggcgcggaagctctacgtggggaatatccccaggaccgttacaaacgacgagctccgcgacatgttcgctgcgcacggcaccgtcgagcgggccgaggttatgtacgacaagtatacgaatcgcagccggcggtttgggtttgtcacgatgagcacagcggaagaggccaatgctgcagttgaggctctcaatgggactgaggttggtgatagaaaaattaaagtgaacgtcacagagagcttcttaccgaacattgaccgatcagcaccagaaccagaggctctgtttgtagatagtcagtacaaggtttatgttggtaatcttgcgaagactgtaacaaccgaagttcttaaaaacttcttctccgaaaaggggaatatcctcagtgcaacagtctcccacattccggggacctccaagtcaaaggggtatggctttgtcacattctcttctgaggaagaagttgaagctgctgttgctactttcaataacgcggggcaccggaggagggggaatatcttggcgaatacatgtagtaggagggatgttttgaggctagattttgataacaaagtgatcaagaccttcaatgtgatttcgatatgtcatacaatttttgtaccataacagtatatttttcttaacggcacttctaaatgataacataaaggcagtatggtttcagttatatagtatgtttgtttatttgaaacgaattctacaccatgtacattccaacattaatgttgtcagttcaatccctgactttgtcaaattagcttggggagcgatgtctg

SEQ ID NO: 34924 - DNA, 2020 bp, Zea Mays
cccggcccgtgcgcggcagtcaatgcccccaagaattgactgcgccgcgcgtgctcgctatccgctatttccattccacccatggcagccacgcttcgccttcgcttctcttctcttctcttctcttcgatgcgagcgatatgagagagagaaacagagctccccgaggtgtgtataaatgccaggtcggcgcgttaattctttctagttctactccccgctccccattcacgcactctcactctacctccctccctccctcgccggcgccgcgcgtgctcccgcgggatgctgcgtgcggcgcggtacctgctggggtcgccgggcgcgagcgggttcgggtccaggtcgacggcggaggaggtgaccccggacctgggcgcgacgacggccatcatcacgggcgccacgtccgggatcggcgccgagacggcgcgcgtgctggcgaagcgcggcgcgcgcgtggtgatcccggcgcggagcgccaaggcggcggaggacgtgcgcgcgcgcatcgtggccgagtgccccgccgccgccgtcctcgtgctcccgctcgacctcagctcgctcgcgtccgtgcgcgccttcgccgacagaaacaacgccggcaagttctcgcacgggcagctggcgctctcggaggacggcgtggagatgaccttcgccaccaactacctgggccacttcctgctgacgaagctgctggcggggcggatggcggagacggcggcggccacgggcgtgcagggccgcatcgtgaacgtgtcgtccagcgtgcacggctggttcgccggcgactgggccgagtacctgcacctcgtcacccgccgcaagataccctacgacgcgacgcaggcgtacgcggtgtccaagctcgccaacgtgctgcacacccgggagctcgccgcgcgcctgcaggaaatgggcgccaacgtgacggccaactgcgtccacccgggcatcgtcaggacgcgccttaaccgcgaccgcgacggcgtcctaaccgatctggtgttcctgctgctgtccaagctgctgaaaacgatccctcaggctgcggcgaccacgtgctacgtggcggcccacccgagagtggccggcgtgtccggccgctacttcgccgactgcaacgaggcgctgccgtcgccggccgccaccgaccgccacgaggccgcgcgcctctggcgggtctccgaggccatcatcgacggctgcaccaacagccaaccccagcgggactgcaccactgctcctctaccacgattactgccggcccagacgcagtcacagtcgccgacaggagcttcttcgtcgcctcgtcgtcgagcctgctgagctgatccggccgtccacctccagttccagtatatccgtcccttttgttctcgtccatgtgagatgcgtgtacaatacctagacattgtatgtatatccgatcgattatccccggccgtcctagcagcattataaatacagcatatactccttgtcccatatataacaggcactagcatgcagtagccaacgtagtgcagtagtagttctgtgtttgtgtgtgtctcaagtctggactctctctgaacattgaagctgtactgtaccattattacatggcctgtgctgcgtactttggtgtcgaccggtggcggaaggaacagtacgctagctacgacgtgcgcttgccttttgtcctcctgcaccaccacagcagtatgtcaccagcatggcatgcccatcatatgcactggtgtcggtgagatacgcgtgctctgcggctctgctccgtccaccgtctccgtcgccgggcgaggctctagtttattatccgctggtgtcaccaaacatgcacggcgcactggcagcatgcaatgcaagtaccagcacgcacgagttgagtggacgaattgtcttgttccgttggatgcatcgaccaggaggacacagcacaggccccgactaaaaggaagagcgggtaccatgactgagtgggcgatccttcccttccatcccattctga

SEQ ID NO: 34925 - DNA, 3603 bp, Zea Mays
gtccagttccagtgctttagatccgcggccctgttcgcaccttgctcgcctcgcctcgcctcgccttccgctgcttcccgcctctaaccaccacggcatccagatcccgcgactccacctccactcgcggcggcgtgccctcgccgagatctcatcatggacacggtcgagaagatcgtcgaggacttcgcctcggacatcgccgtgagccccttctcctccgggacgagcctccgggagatgatacgcgcgatacgcgcgtgcaagacggcggcggaggagcgcgcggtggtgcggcgggaatgtgcggcgatacgcacggccatcagcgagaatgagccggagctccggcacaggaacatggccaagctcatgttcatccacatgctgggctaccccacccatttcgcgcagatggagtgcctcaagctcatcgcggccgcgggattcccggagaagcgggtgggctacctcggcctcatgctgctccttgacgagcggcaggaggtgctcatgctcgtcaccaactccctcaaacaagatctcaaccacacgaaccagttcatcgtgggccttgcattgtgtgctcttgggaacatctgctctgctgaaatggcgcgggatctttcacctgaagtggagaggttgatgcgcagtagggaagtcaatacaaagaaaaaggctgctttgtgctctataaggattgtcaggaaagtgccagatttggcagagaacttcatgggcctggctgcatcattgttgaaggagaaacaccatggggtcctcatatctgcaattcagctctgcacagaactatgcaaagcaagcaaagattctctagagtacctgaggaagaactgcatcgaaggtttggctcgcatactgagagatgtgtccaataggtcatatgctccggagtatgatgtttctggcattgttgatccattcttgcatattcgagtccttaaacttttgcggatcttgggtcaaggagatgcagattgcagtgaatatatgaatgatattcttgctcaggttgcaacaaaaactgagtccaacaagaatgctggaaacgccattctgtatgaatgtgttcagactataatgggtattgaagctactagtggtttacgtgtgctggcaatcaatattttgggtagattcttgtctaaccgtgacaacaatataagatatgttgctcttaacatgcttatgagggccattacagttgatgcactagcagtgcagagacacagaacaacaatattagagtgtgtaaaggatgccgatgcctccattcgcaaaagggctcttgaacttgtttatttgttagtcaatgatacaaatgtaaagcctttgactaaagagctcatcgattacttaaacatagcggatccagattttataggagatctcacagtaaatatatgctctatagttgaaaagttttctcaagagaagttatggtaccttgaccagatgttcaatgttttatctctggctggaaatcatgtgaaggatgacatatgtcatgcccttattgttgtactaagtaatacatcagagcttcaaggatattcagtgaggtcattgtataaggccttacaagaatatggtaaacagtaagagtagctgtttggtgcattggtgaatatggtgaaatgctggtgaacaatgttggcatgctggatggggaggagccaattaaggtaacagaatcagatgctgtggatgctgtagaggtcgctcttaaccgctactcagcagatatgacaactggagcaatgtgtctggttgctcttctgaaactctcctcacgatttcctttgacatcagagaggataaaacaaatagttgcccagaataaagggaatgttgtccttgaactacagcaaagatcaattgaattcacttccattatacaaagacatcagtctatcagatcgtccttgcttgaacgcatgcctgtattagatgaagctagttatctggtgaagcgggctactgctacacaatcaactatttcagcagataaaattgctccaacagtcactcctggaagccttaagcttccgaatggtgtagcaaaacccacctcagctcctttagctgatttgcttgatttcagttctgatggtgccccagcttccaccgttgcttctactacaacacctaatgattttttgcaagatcttctgggtattggtggagttagttcatcaacgacaggtgtaacttcaaccgcaagcacagatattcttatggatcttctgtccattggatcatctccatcacagaatggcacccccgtaacagacttccgtcatcctggacaagagtctaaacctgttcctggtgtacctgaagctgttgacctcctcggtagtttgtcaccagccgagtctaaacccacaccagttgtacctaaggacatggatctgctcgacggtttgtcatcaaatacatctatttctggacatgagaatacaacccacccatcaataacagcttttcagagtgcaaccttgaagatcacgtttgatttcaaaatgaagcttggaaacccacgagagactacaattcatgccacttttaccaatttgacatctagtacttttacagattttatttttcaggctgctgttccaaagttcatccaattgagactggatccggctagtggcaacactgttccagctaatggaagtggttcagtcacacaagggctcaacatcaccaataaccaacagggacagaaaccgcttgcaatgcggatccggatgtcttataaagtgaatggcgaggacagattggaacaaggccaagtcagcaattttccttctggactataggccgtttctgtatactatgacgtgtcggggacaggcatatagaacgaagccttgttttaccctctacctcattttttaattattctggggatttgtcggggtgcttagagaaaatgttttttccggcggttagttttcctgtactaagtatattgtatattattccagcagcgatgtgatcttcaaattcatcgtgatgtattcgacaccacgctaaaggatggtctgagcaaactttcttcagctcctcaatcattgtaaaactagcttctgtttttcttgtacactagagagtagagactggtagcatattctgtagcatattctgccagtaccgttgcacttctgatttgcggccgtgcaaattatgggatgccgaacgcgcggatttctatcgtaatgcgcaaactttcaactgccttttaatttttaaaccgctggtctgtacatcgagcaggtcggtcaggtgcaggcgctggtgctcgtcaagcttggacagcgctgctgagtgctgagtaacctcttacaacaattgcaccatatgaacttataacaagtacagtacattgaaccacgacaattactctagttgaccataattgagatcgaataagcagggtcaggcattatggtttctgtctacaagtttatctttgtaccttgcatcacaaccttccagtggaaaactgcaatgcaaaggacttctgcagcgcataatttgctttgcttatcttatcctgctctcatcagg

SEQ ID NO: 34926 - DNA, 1559 bp, Zea Mays
ctactccccacagcagctgaaaaccaaagaaaccgttggcggacgcccaccaaccaaaaaaaaaaaaaacccacgcctttcctccccgccggggctctccactctcgctccaacgccgacggagaagccgcagctctgctccctcgctctctcttccgggagcgcgtggctctattccattcgcgcccgctcggctgacaacggaggataaaattttgatcctttcatttgttggacattggatcaactggtgctgttatacatagaaaggagttcattgtaatttctcatctatatttagtggtgccataatcatttttccactggtgttcggcaataatgtcggagagcgagttagcagtaataaaaccagaggtacaatcccctgcagcccccctctccggcgttaaagacttatatctggcttcagtgctttgatggttccattcagcaagtggaggaggaggttgcaatgttctgccccatgatatgtcgtgaaattgtgaaaaatggcacagggtcgtccaaaaatcatgctattgcgctccctgaaagagttaatccagccagtttgagtttgattcttgactactgccggtttcatcaggttactgggcgctcaaacaaggagcggaagtcctttgatgaaaaatttgttaggatagaaacagaaagactctgcgaattgacttctgcagctgacagtctacagctaaagccacttgttgatcttactagtcgagctcttgctcgaattattgaaggaaagacacctgaggaaatccgtgacattttccacttaccagatgacttaacagaggaagagaagttggagcccctaaaaaatgtaaatgatgatcctaggattcgcctattgaaccggttgtacgcgaagaagcggaaagagctccaggagcgccagaagctgaaggtaactatgatggactgtacatgttgtgtttggcaacattcattttccgacttcattcagtcatgctcactgtatttcaggatgtacaagtacaaaaggaggaaaaagatgagagatctttggatgagttactttgttttattaatggggatggaggttcaggaggtggggaaagtagtaccaagagtaagaaaaagaataaaagaaggaaggatcatgctaagaaccccgcaaaagctgactctgagtctgtaaatgtggttaggtttcctgactgtttcccctgctgtgtattccatataggatatgtatttcttacatgatctatctggggagtttaggagggagctgcttgtgtggttccgtgcaaagtggatagcagtaatgtttctagacttccatgccaaagtccagatatgcaagatgatgtcgagtacccctttgaagatgctgacctcgatgatggacttgatcctgcaatgaaagaagagcttgatagagaagttgaggactttgcgaggaggttgaattcagtttggagcgagtcacatattggtggtaatggttctgtgcagagatttcctgggggagttttggggagggggatttatctgagaaaatgcaggcc

SEQ ID NO: 34927 - DNA, 2886 bp, Zea Mays
ccagcagaccagcaccattgacgagatgagctcatcatctcaaggttgatttgatgaggcggcattgcttccctgtgtactggaatggggaaaaccggcgtgtcttgagaggccactggtttgctcgcaaaggtggcgtcgactggattcccgtgcgcgaggatgtctctgaacaacttgagttagcgtataattgtcaggtctggcatcgtcggaaatttcaaccttcaggcctatttgcagcaagggttgaccttcaaggaagtacaccggatttgcatgctctttttactggagaggatgatacttgggaagcttggcttgtctttgatacaggtcctaagtttggtagcaacacaatcaaattaagacgcggatatttctgttctgaatctgcaagtacaaagccttcacaggatgaattgcgtcagaaaaaagaagaggaaatggatgattactgctctcaggttccagttggtcatctggtattcatggttcatggcattggacagaggctggagaaagctaatcttgttgatgatgttgttgatttccgtcgtgtaactgctaacctagctgaaagatacttaacttcgtatcaaagaagtacccagagggttctatttataccctgtcagtggaggaagggcttgaagctcagtggtgaaagtactgttgagaaactcactttggatggagttaagggccttcgagtcgcattaggtgccacagttcatgatgttttatattatatgagtcctatctactgtcagcatattattgactcggtctcgaaccagttgaacaaactgtacatgaaatttctaaagagaaatcctggttacagtggaaaggtttcattgtatggccactcgttaggaagtgttttgtcgtatgatatactttgtcatcaagaatccctttgggccccatttccaacagagtatctgaacatggaaacatctgatcgaaatcaaggagcaaaatcagccaatgaagctgatctgcatgattcaggcgcaaaggatcatgatacttctagtctagggtattcttgtgctgataatgaaaacagtgtcattgatgaagatagcaccagaactgacgtgtcatgtatggacagcatcctcccatcatgtgtgcttgaggattcaccaaataaccatgacactgtcgtgcctcgtggtgcggttgttgctgatcaaaatggagaagaaaagaaggttgagaattatcagtcggtgtatgctgaggaaggaacaacttcaggtgtaatcacaaaaaaggctgaaggatcaagcatttcaagatctgctaaggaagtccatgaagaggtcctcgacaaagaaaaattgatggtccttgccaaagacaaattgatcctttcactagaagaagaggtgaaatgtcttaaagctaaactagatcagcttgaacaacataatcatctagtgactgaaaacaccagtggtgttgagtatcatgaagggcaaaattataatcatgccttgaactctggcaaacttttcgtggcacaagaaagtacaaaccagtcctactcaccgcaaatcaaatacacgaaactaaactttaaggttgatacattctttgctgttggatctcccttgggtgtcttcctttccctgcgtaatgtccgtattggtattggcaaaggacaagactattggcaagataagaacgtaattgaagagatgccatgctgccggcagatgttcaatatttttcatccttttgaccctgtagcatacaggtgggcttttatacagaattgaaccacttgtatgtgaagattatctaaagaagcgtcctgtaattgttccctaccatagaggcggaaagaggatacatgttggagtgcaggagttcagagaagatatttctgcacgttctcaagcaattgcccgtcaattgaagtcactgaaggtcaaagcagtagctgctatactagcattgagcagaaatgacacagaagaggatggtgagagtgctaatgagaaagaaaaatcatatggttccattatgatggaaaggttgaccagttcaccgaatggtcgaattgatcatgtgcttcaggagaaaacatttcagcatccatatctatctgctttgggagctcataccaactattggcgagatcatgatactgctctcttcattctcaaacatttgtatcgtgatatacccgaggatcctccaagcgatgtcattgaaaggatgcctattaaactattttatgagagagatccagttgaggaagaaacgcctgtgacgttttcagatcatgcagcaattaaggaattctgcagaaaggtgaaagcttactcaagaaaaatggaggatgatgccaactgccaagcctcgtgatggatttttagtctctcgttacggcctcacacgttcctgggcaagcagaagcaagatgcagacatgggaaggaagaacgaatcgtgatcccaagaaaagaatccacgagatgcagttccacgcttcacgccagaatcagagcacttggagaatgttgtacggagtagagtcggttgccttgctcgttcctacatttataatgcagtgttgtacatagaacgtccgactgtagttttgtgcatcttgaacgtaatgttatgctgcctgctttaaatgctacagaatatatttttgcttttgcatccctagtgtgcgtcaattgcaaagtggttagctcctacttatttagcatgtcttttcattatgtctatcatgggcaaaagtactacataaaaaaggactcgcttagggcccggttgattttttttttttgaaagtttaggtattacaaagacctagttttatagctaaagcgatgcaaaaccaccgtgatttcaaaag

SEQ ID NO: 34928 - DNA, 1152 bp, Zea Mays
cgagtgcagtaaagctagccatgctgtagtgggatatctcccccattctgctgcgccaccattgctgcaaggggagggtagcagaacatcacatggagatcaaggaggtagcagcagcggaggcgatgacgatgggcatgccgacggtgccctctcggttcaggaggatctgcgtcttctgcggaagcagccaggggaggaagaagagctaccaggatgctgccgtcgagctcggcgaggagctggtctcaaggaacatcgatctggtctatggcgggggaagtgtcgggctgatgggcctggtctctcgagcagtctacaatggagggaggcacgtcataggggtgattcccaagaccctcatgccaagagagattacaggtgagacggttggggaggtgaaggccgtggcggatatgcatcagaggaaggctgagatggccagacaatctgatgccttcatagcacttcctggagggtatggaacccttgaagagctgctggaagtgatcgcgtgggcgcagcttggcatccacgacaagccggttggcctgctaaacgtggacgggtactacaactcgctcctatccttcatcgacaaagctgtggaggaggagttcatcagcccgactgctcgccacatcatcgtcttggcaccgacaccaaacgaactgctcgacaagctagaggagtactccccccggcacgaggaggtcgtgccgaagaccaagtgggagacggagcagctgagctgctgcaagagctgcgagatcccgccggggctcaaagaagggacgccgatcgtccaagcacagcgaggaaccatgcatgctctgaactaatggtgttagttagctattacgtactagccagtgaccacttagggtttctcaggaggcctgcacaagtggtggtgatgtaggaagattcagaacttcagcgattcagattgggtttaattcctgtaattcgagtagaatgcgcctagtgttggctatatgtcagctgtattagttctacagggatgggatctatttgtggacaaggactaatataccagcagtcattagatgcaagcgtgcaagcagctctcttggtccattggatctaaatccaaccgtatgtgtaattatggtttgttaggagtttttt

SEQ ID NO: 34929 - DNA, 1763 bp, Zea Mays
ctttcatctccaagccgaaaaaacacccacagaaccctaccctcccgagtcccgaccccgtcctgctcgctccgccgtccttcgcccgccacccgccacccgccggactgccaaagcccggaggcctgaggcccgagttacgcgaggagcagccgaaccagcggcccggcgcctcatccctcagcggccccgcccctggggccgtgtagtcagcaagcggccacgcgagtgcgcggtcggcgcggagtgagcaggagcaacccgtggctggcggtcagtcggtggctagctggagcctggagttgcgacttgcgagcggcgttagaactcgctccacctataatttttgtgtggctccgtcactgattccacccgttctgtggccggcgacagaggcacagagaagcgccaatccgccggcttgatctgaagcatggacaggtttgaggcttggccatgcctttaaatatagatattgatctgttcaagctggatattgatgagctgatagctgattattccaaggagaactgtacgtcactctttgaattcaaacgagtatggatgggcaagaaattttcttatatctatgaaggcaggcctaagacaaactcgggtttattcatgcagtccctctttctgcattgtattggttatttgacttctcaaagttcactgcaccaaagattggctgggctatactgcctttactgtctgtatgagtgccagccatacaagccgcagttcaagatttacttgtctcttgaggagtgcaggcaactgaaagatatcgttgttatggcgaagcaaaatggactgcagctcgtgcctgcacttgtcaaaaggatgctggataaagacatgtttttgtttggctacatgaatttgatcgacgacaacggggacaagcaggtcgaggaattgaccgcattgcagaacaagcgagtaaaatttgcatgtgacaagttatttgcaaatacccaagcagaaagatatttgcacatggacttgggtgctgagttcgagcttgatagcatcaagaaattgtcaaaggagtatgcagaagcaaaggaactggcccttgcagaggcaagccaaactgtcgaagttgacgatgctaagcacctccttcagagtgagaggctgttgggcgacaagatagatgaagtcgtcaaagaatgggatgtccagaaggaggggttctacgagaggacaggattatcctcatcccctggcgaccagctcatggccatcgacaacgatgaatcaggagctcaatgtcacgaggatggatcccgtggcgatcagctcatggcggtcgacaatgatgaatcgggagtacaggatcacgaggacctcgacgacgacgacggctttgccgagttagaactgctgctagaatgaagaacatatacaagtctgtaaactcttactaccgccgtataaccgtgtaatcagaacaccgagagatgtaatcctcgctcgtctttactagcctctcctttttaggtgccagaccttctgttcatctacactggctgcagtaactgtacattgaaataatccagtgcgccagcctatgcaggggagaaaagaaagaggtgagcttgagtaaaaatgtacatgaacagtgacaagaaaaaaaaacgctggctgcagtaattgtgcatttaaacgatacagtgtgccagactatgcagggtgaaaattggtggacctgagtaaaaaatgtaagtgaacagtgacgaaaaaacgcaaaaaat

SEQ ID NO: 34930 - DNA, 182 bp, Zea Mays
aggcaactcataagtgagtgtgaattagtgcacagacgaacagaagtagagcctgaaaggcgatagggaatgaggagactaacccataggtgaaggttatcatgcttggttcgggatgcaggtagcgaacaatgagaaagttaacaagacacatccaaaggtgagatggaaagcatctaaga

SEQ ID NO: 34931 - DNA, 3146 bp, Zea Mays
ctagctgggacttctttggcgcgttaaaacctgccttcttggcagcccagctcgcagtcgcagtcgcaggtcactcactagctagcttgggccctcgtcatctcgttccgcccaggtgaaagtttggcgcgcatgcacgttagcaggcaggaagtagcagcttcgtcttaacacccacccacctactactaccctgctgcaaaccgcaaccgcgcccgcgcgggagagcttaccctcgcgcaccaccaagcccgcacctgcatttctttgcggccgcgcgcgcgcgggccaatggggagttcctgcgtgaacctctcccgcgccgtcctccccggcttcggcgccgccgagggatcccgccgccgccgtggcctccttctcccgctgctgtcgtcgtcgtcgaggcgcctgcacggcggcggcgccgtggcgtgctgctcgtcgtcgtcctccgctactgctgccggctcatcgaggccgccgccaccgctgccgtccttcgtcgacccggcgcacggggatccgcctggagctgccggcggcgggatcggtgtcgccgagtttctcggcgccaagaacttcctcatcaccggcgggaccggtttcctggcaaaagttcttatcgagaagattttgaggacaaaccctgacgtcggcaaggtgtacgtgctcatcaaggccaaggacagcgaagcagcgttggcgagattgcgaaacgaggacatccacggggaaggctacgacggcttcatcgcaaggaagctggtccccgtcgtcggcgacgtcagggaagccaacgtcggcatcgcgcccgacctcgccgacgagatcgccgaccaggtggacgtcatcatcaactcagcggccaacaccacgttcgacgagcggtacgacgtcgccatggacatcaacaccgtggggccgttccggatcatgagcttcgcgcagcgcttccgacgcctcaagctcttcttgcaagtgtctacagcctacgtgaatggacagaggcaaggcctggtgctggagaagccgtttcgcatgggagacaccatagccaaggagctgccggggtggtcttcttctccagggcacaagatacccgtgctggacatcgaggcagagatcaagctggccttctactccacaagacaccgccccgatgattctccctcgtttgctcaagaaatgaaagatttgggcctagagaggtagctagctagctaggcaaaactccatgggtggcaagacacctatgtgttcaccaaggccatgggggagatggtcatcaactccatgcgaggagagataccggtggtcaccatcaggcccagcgtcatcgagagcacctggagggacccattcccgggctggatggaagggaacaggatgatggatcctgtggtcctctattacgggaaaggccagctgacggggttcctcgcagatccagatggtgttcttgatgtggtcccggcggacatggtggtgaacgcgacgctggcgtcgatggcgaagcacggcggcggcgcggcggggcccgggatgcacgtgtaccacgtgtcgtcgtcgacggtgaaccctctggtgttcggcgacctgagccggttcctgttccagcacttcacgcggtgcccctacagcgacgcggcggggcagcccatcctggtgccgcccatgcgcctcttcgacaccatggagcagttcgccagctacgtggagacggacgcgctgctgcgcagcgcccggtcgacctcgtcctcgtcgtcgctggcgcagcgggcgcgcgacctgtgcgccaggtccgtggagcagaccgtccacctgggcagcatctaccggccctacaccttctacggcggccgcttcgacaacgccaacacggaggcgctgctcgcggccatgtcgccggcggagagggcgcggttccacttcgacgtgcggggcgtggactgggcggactacatcaccaacgtccacatccctggactccggaagcacgtcatgaagggcaggggcgtcgccgccaaccagctgctcgccagcacctccgtgtgaccgcccggcatgcgcgacggcgggcgtgtacactatctgccaggcccagaccgttgctgctgctacatgccattgccatgccgccgtcacaccacacggccggtgaccgacgaccaatcttgccgtacgttccatcctcatactactgctacgtacgtagcagcaacctaaggttgcgcttgcattgcactaaagatagatataccatgctgttcatctctcctccatgttgagctgttgattcttgcgcttgtacttcaaaacaaaatgaactctgtgatggtcgtcagtaacaaatctgacgaaacatcgtggctgtctgatagtgtcattcccgacactgtaagccgttcttttaccaaaatttactttactgatggaaggagttcaacagttccttgcaattgatgaatggtgatacagattagcacacgcctatttgtagtacaagcttacgctacacaggtgcaaatggtactccggtctttttggccagttccacgactctgtaaaaactgcataaaacagagggcggccagagttgtaggtggatggccgcccttctctgtcgcctgaaaagggtgaaactctgggcatagtgcttcggcattcccctgttatttctgtctggcccttgatccagcagacgttgacatcgattatcacgacacaggctgggaaacggtaacatcgacagctcaaaggaaataatccggtgttcttcgcgtcacatctggctcacctctcctaggggctggatgaatgtgtggctgttgcagtcgtcaacttccaaaatggatgccatattgccgcatcgatagcagtaatttggagcactgaatatggtgacaaccttttgctcctgtaaatacatgcatcgtgcatgatcagaaagattgcttcactcaaagctcagctccataagcgtctaaaagtcaaatcggcttacatgagcccagttatatccctccataactaattgatgagcccgagctacgagtttgagattgtttgtgtgattaaactgctctgatatgtcctggagaaacaaaggaacaaatgaataacttcaaactaaaaaggtatacaag

SEQ ID NO: 34932 - DNA, 1804 bp, Zea Mays
acgcaaaccacagcgaccgaacaaacaacatgtatgatttcacaagccgcccgctgaaaccaaagccttttgccctgtcgtcaggggcgaggtttcatcaacctcagtacctcaccctcctctcccggagagcctctcgcctccgctccgctcctctgccctgccctgcccttccccgccacaccaaccaaggcgccaaaaataaacgccgcgccactgcgtggcgagggagcctgtcacattgcttgccgctgcgccctgccgcctcgtcttcgcggaggcctcgtcgcgcgacgatatggagctcgccgaggcgccggcgcccgtgcccgacgaggacgggctggacgaacgcggcgtggcgctgcacctcccgaggctgctggccggcgtcgtctccggcgccctcactggcatcttcgctctcggtacttgcacagttgcacttacttgcgcaagctcctttcgcctcccttttgccctgttgttagctgtcctgagatcgagctcgatcgacgttggctctgtgtggtgcgtgcgtgcatgtgccgcgtacgtccgcgtgtaaagctggagctctgaccggggcagtcaccggcgcggtggcgggcagggcttccgacagcggcggcgtcctgcggggagctggactgggggcggtcgccggagctgtcctctccattgaggtccttgaggcttctcgcgcttactggtgctcgtcggaccggctgggctcgcacggcggagcatcgtccatggctgatttcattgagcagcttcttcgtgcccggtttgtgcaagagcaatttactgcttcaggatatgcatcatatcgctggcagcatatcatattttggtcaggatgacctatacgacatctttggggacatttcatctgaagggctctcgcaagagtcactgaagaaactaccacatcatgtggtcagtgaccaccagacgcgggacttactcggcgaaatcctgtgttgtcctatctgtctacaggtacggtctgagcaagcgcgatcctaccactacagagtaactgtcaaagaaaccttctgccacaatgcatgtatacagtatgcactttgtttacgttcaaataagagagagaaaactatatgctaaaaagtaagtaatcagcaattttctaggctacaactggtttcttcaaaaatggtttccgagcgagatagtagatgagaccatgaatgcaagtccaggcgcacgcaatggttggacaacgagacaatgaatgcatggacattgtggccggtgagacagcgaggaggctgcccggctgctctcacgccttccaccagccttgcgtggacagatggctcgtcggccatggctcgtgccccgtctgcaggcaacgcgtgtaaaagatatataggcgacctgtgtctgtgtacgtagatagacgtggagtgaagagaaacgaccgtgcgcatctggcaatctcacttcgtttcttgcaccccggttccaacatgtaatggcaatggaataagattgctgtcggagcagttcctgtttctgtagaatttgtttgtccgcttggcgctccgatccgcgtgatttctgaacaggctccgggcgctgttccgcccgtgtcggcgatattcttgctgtcctcgttcttgcggatgcagaccctgggtttggcatcaggtgttggtgagcagtatgtttcagtcctcaatggccatgtactccggtgcctgcctcatctgcttctgcttggaagttctgagaatgatggcattagtgctcattccggatagagctagctcggttg

SEQ ID NO: 34933 - DNA, 563 bp, Zea Mays
ctcggatggagatccatgatgcgtgacgtcgttcgaggtggatttggagaacaagaaggtggtggtggttggggacgtcacgccgtacgaggtgctggagagcgtctccaaggtgaagctcgcgcggctatgggtggccccggaccccaagcagcaagccgcacaaagcttgcaggcgtagaggatctctcatcacatcagcgctccatatttcgtcctgctacagcgtgcggcaggcaggcaaagaacagacaggatttgtaccgtagggacgaaacattcgttccactgaggaaccgtgtccacgcgtgcaaatcattgaggacgcgagggacatgttgctctgtgtgtgtttttttatgtaaagggcaggcagatggggaggggaaacatgtgcttgcgtaaaacatactacttgcttgttgtttcgctctcacaccgcattcaaaaacagcgaatcctctacgacaggcgaacagcattgcacctgagctagccccttggtccctgctaccgatccactcatgccgagtgatccttgtcatcgagtaggttgccaccgg

SEQ ID NO: 34934 - DNA, 1799 bp, Zea Mays
ggaaaagccggcgcgctcagagcaggcaaacaaaaccccactgccggcccgcgtccggggttccgggcgaaccacttcactgcagcccgcccggagccgcgccgcgagaggagggagggaatcagtgaatggcggatggcagcggggaatcggagtcgacggcgctggagttcacgccgacgtggatcgtggcggcggtctgctccctcatcgtggtcatctccctcgcagccgagaggtgcctgcattacctcggcaagacgttcaaggggaagaaccagaaggcgctcttcgaggctctcctcaaggtcaaagaagagctgatgcttctggggttcatctcgctgctgctgacggtgttccaaggagtgatgcagaggacgtgcattcctccggggtggaccatctacatgctcccatgccgtagcgccaaggagcaggccgagctgagccccacggaggcgcacggccatgctgccggaatcttaggcctcacccgccggcgtttgcttgccgagggcgggcctaggacccagcgttgccagaagaagattcgtcaatggaaacactgggaggatgagattcagaagggtgctacagacaatggtaggcctaggaaggtgacctatgtgcatcaatctgaatttatcagggaacattccaagggcattggcagagataccacaatgttgagctggctgcattcttttctcaagcagttttatgggtcggttactaaatcagactacactacaatgcgacttggcttcatcacgacacattgtaggtcaaacccaaaatttgatttccacaggtacatgatgcgagctttggaggctgactttaagaaggtggttggcataagctggtacttgtggatatttgttgtggtattcatgttgctgaacatcaatggttggcacacatacttttggatctctttcattccccttctgcttctgttggccgttggcaccaagctagagcatgtcataactcagttggctcaagaggtcgccgagaagcactccgcagtagagggcgacttggtggtcaatccgtcggatgaccatttctggtttggccggccaaagatcgtcctgtacctgatccacttcatcctcttccagaacgcgtttgagatcgcattcttcttctggattctgactacctacggtttcaactcctgcatcatggaccacgtccccttcattgtgccgaggctcgttgtcggggccatcatccagctcctctgtagctacagcaccctgcctctgtacgcgattgtcacgcagatggggactttcttcaagaaggagatcttcgatgagcacgtgcagcagagccttctgggctgggcgcagaaggccaagaagaggaaagcgctcaggaacaatggcaatggcagcaatggcgccgcggccgggtcgtcacatccatctgcgactgcgaggctcgaactgatgagacgagctgtcgctcttgaagaaggcagtgccggtggcaacgggagtgaggctagtgcggccgagctacacgacacgggcccgaagctctgaacgctgtagaaaacgcccggcagagcgtcagaagatgcagtgtttctgtacgcgagccatatgtcactatgtcgtgtggctgtttagccaggtggtgtagtgtgatactgcgtatcatgatttgtatgcttttctggattgagcttgaagcgtgttatggagtggggagctttgtgtagtgttgtgctcatggaattggaggcgatgtttttaggccggatcagagacgatccaggcgcg

SEQ ID NO: 34935 - DNA, 1568 bp, Zea Mays
gtactgttcctttgccagcttgcctgctgccaccagtggcacctgcaagcgaacctccacgcgagctgcccggccccggctgcccctgcgccctgcgcccctgcccctgtccctgccggccccttccaaaataaagcgggagggagatgcgctgagccggatggcggcccactcgctctcgctctacctccccgtcgtcacgcgctcgcttgtgcccctagcgtttcgccacctcctgctcccgcaccgcctccggctccggctccggctccgcctcgtctccgccgtctccccatcccgggcgcggcccctcggcctcggcgcccgcccgccccgcccccacgccgcacccctcggctacggagggagaaggccgagtggtggactggaccacagagccatgtcaagttccacaaattcaacagtggccacggagttgtcggtgtctgagaatagcagggaaattgagccgctaccttttgtgaatgacaaacatggaggcgtcatcattgagatgaagactccaatggatcctggagtgttttcagcttacttgaaagcagcgctggcaaaatggagggagcagggaataagaggtgtctggatcaaattacccatcaccctttccaaccttattccaacagttgtagaggtttctggtaccatcatgcagaggaaacttacttgatgcttgcgtactggcttccaaatacaacacatacactaccagtaaacgcaacccaccgtgttggtgttggagcttttataatgaatgacaaaagagaggtcttggttgtacaagaaaagagtggtgtacttcgaggcctaggtgtgtggaaatttccaactggcgtagttgaaccgggggaagatattaacgttggagccataagagaagtaaaagaagagaccgggattgatgcagaatttgttgaagtgctggccttcaggcagagccacaaagctttttttgataaatcagatctatttttcgtgtgcctgctacgaccgctgtcatatgacattacgaagcaagactcggaaatagaagcatgccagtggatgccagtagaggaatttgcagcacaaccatttgtccagaaacatgagcttgtgaagtacatcctcgaagtaggcctggctaaagttgacaagaaatatgcagggttttcgccaatctccataaaatcggcgtttacagacaaattgtccttattttacatgaaccggagggacctggacaaagcctcaggatagagtaatatgtaattaaacacagggaattcaagatagttgaaatttcagttctggtatgtaaaagcaggccaagtcatattcatacttgattattttgttaacaaattggaagtttcgggcatccgacacttgtgatttttcgaccatatgtcgtctgctacacatctgtgtttcaaaggagtgttgcaatccaaaagtagagatgaaactgttgcaatctaattgtaggtctacagacaataaaatactgttttcctttattatatactccccttttgtcgtgaaatatatctaaatgatttattaataaa

SEQ ID NO: 34936 - DNA, 1909 bp, Zea Mays
ccgagagcgaccggcactaccgcactagcgctgagttgtgctgaacagccgcgcgtgcaagcgaataaacaacgccgcgacgagaagagagaagagggcgggcatcggccagtgggggctctgaggccgagggaggcgaggaaagcggcgggtgccgggccgcccgcgccggtgccgagccgcccgcgccggtgccgaggccctcaccagtcaccaccccctcccctcttccgtctgtcccccgcttgccgccaccgccgctgcccgctcgcgatccttcccctttttaacgctcccgcggccccgcgtcgtgctcccttttgtcgccgctgccttcgtgcccgtactcgcgggttctcctcgctcctcaatctccgcgcctgggcgcggcgttcgccgccggatctgggcgcgggacggtgccccggacggtcgatggcgcgggcggcgctccggttgggcgaccgcgcgctcgcgctcctcgtcctcgtgtcagttccgacgatggacacaaacactgcgagggtgttgtcaggggctgggcggattcctccacggggcgcgtgaaggacggggacaaactgagcctcaaggatttgctcttcttcctccacattcctaggactggaggccgcacctactttcactgcttcctaaaaaagctgtatacaaatgcgcaggaatgcccgcgttcttatgacaaactacggttcgacccaagccatcctgattgcaagctggttgttagtcatgatgactatagcttaacttccaagctgccaagggagagaacatctgttgtaacaatactaaggaacccagttgaccgtgtatttagcacatatgagttttcagttgaagttgcagctagattccttgttcacccaaacttaacttctgcaaagttaatgactacccgtgtgttaaaaaagtctcgtgctgtcagtactttggacatctggccttggaagtacttggttccttggatgagagaagatctgttttccaggagagatgccaggggtatcgacaaagttcatagtagtaagaaggttaatgcatatgatgtggaggatatggttatgccgttacatcagtacatcaatgatccagttgcccatgagatcattcataatggggctacctttcagattactgggttaacgaacaattcatactttgatggagcacatgaggttcgacattgtgccagaaagcatccagatcttggtcgtattgtgcttgaagttgctaagaataggctggaccagatgctgtatgtaggacttacagaggatcatgaagagtcagcgaggttgtttgctcatatggtaggagcacaggtgcttttacaatctgggacattgagtttggatctcaaggaagatctgcacagtgagactgactcacacccatccatggtggagcccggggatgaagaagcaagcgaacatctgaataacacacatggttggcaaaataatgaagccctgaactctaccagcgacgaacaaggaaaaggaaatatgactgtgggtaaactgatggaagcttatgaaacttgcatcgctaaactgcggaagtcccaatctagccgtcgtaaaatatcactaaagaaagtggaggaagcaaacttctcaaaagaggcacggaagctggtccccgaggcaattttgaaacaaattatctcgctgaacagccttgacatggaactttatgaccatgctaagaaaatctttacccaggaacatctgatgctgaaagctcagcaatccatggcggggcagcacagacagttggcggaacaagagggaggaggaaggaaacacgataggatatgagacgaaccgttctcgtactgcggtggaactgtggaaatgaagaactgtactcattgccagtagcaagc

SEQ ID NO: 34937 - DNA, 574 bp, Zea Mays
ccaaatccgttgctctttcccccttgcccccttcccagtctccactctgagcactctcctccgctctgctcctttgctccccacggcaaaccgtaaaccctagcctgaggggcacccctgtcgcagccatgggcgccagccggaagctgcagggcgagatcgaccgcgtcctgaagaaggtctacgacactgagaatgccaaccagaaggagaagttcgaggcggacctcaagaaggagatcaagaagctgcagcggtacagggaccagatcaagacgtggattcagtccagcgagatcaaggacaagaagattatgatagtaggcttctcatttacatatctctttgtgattgtcaaagattatggccagattgaggttagtgcctcttatgagcaggctctgatggatgctcgaaagcagattgaacgagagatggaacgatttaaagtatgtgagaaggaaacaaaaactaaggccttctcaaaagaagggttaggtcagcaaccaaaaacagatcccaaagaaaaggccaaagctgaaacaagagactggcttaataatgtgagaaggag

SEQ ID NO: 34938 - DNA, 3162 bp, Zea Mays
atggcggccgccggcacgtcgttctccatccgggagtacgcggtgcgtgcgcgggcgcgggccgagggcggcgggggcgggagctggcctttcggcggggacgcgggggcgctaccgcccatggaggtgcggcggttccggtggtggcgggacgaggcggcagcggtggaggaggaggaggccgaggtggagaggaggttggcggccaagcgccgcaagcgctccgtcgccgagctcttcgccgcggtcccgcgggtgccccgaggcggccaggggcgtggcaaggggaaggctgccaagaggaaggcggagaaagacaagggaaagctagtgctcgctgccagtgttaagaccaacaagaagaaaaaggtcccgactgggatcgatgccagaccaaaggagaaaaacagtggggtaaaggtgaactcagttagcatttctaagtcatttcagcatcctataaaaaatagggaacccaagagttcttgcaagaaaaagggaaaacaagaggtctcagtcttactggataagaaaagtaagaagggaaacagaaagtcagttttggaaatacacaaaaaggatatggcaaacagtgttcaaactcaaagcatttgtaaggatcagtcaaaagcaggttctagcacagcaccgaatacaacagatatgaggaccgcacatctacctgcagataatacaaagcaaccacaatctgtacagacattccagcaagccactcaggaaggtcgtgaccaccgtgatagagatgatcaacagttggtttatcaacaagctgaagctatatcccggactgttgagattaccaattctttgtctgaaaatgtagtactagctggtgtttgccgtacaatcccacttaccaaaccaaaagatatcactatactgggaaactcagtggatctgaatcactgcatagaaacttgtcatggcagtaactgtttgaactccacgagtttggcaagcttatctagtaagatgccatgtcaaaaattccaaggtgtgaactctcatctgaatggcaacaatgtttcaagtcttgatgttcagtatcttggagaacaaaaccatatgatatcacaagcatcatttaatcctgttagtttggcacccaagggagtatcaggtgatatgagcccattgtcagagccttccagttgttgtttatatgataggagcagtatcacgttccacgagaaggctgatgctaattaccacttgggaaaagttagttctgagattcttagatctggtaacgtggtgagaagcataagctcttcaacaggatcaaataaaccagcacaagccatcgattgtgtatctgctgcattcaggaacatgcacagccgccgtgacgattatgtcggccttcctatcaattcacgaggtgaattcgtcaaggttcatcctggtggcacccctaattctgttgacatttttacgaggcagtgtttgggggagaattcctcatgcccctcagattatccaaccatcttcagttctattacccgcatggatcatgtacccaactatcatgctcgacaattctatacaatagaccagtctgcttttcatgcagatcctcgttttcctccagcgggcccaatggcatatgggatggatgtgaggcagtggccaagttctgaaagagcaaaagttcattactacacaattccaaacaaaaagtatccatgcgccaaacagcaagagctttcaatggatcacaattcacagcagaagctacttgggctgcgaagccgctgtcccagccagaactctgggcagggtatgcagcacaacgccgaaacgacactgcgcctcatgggaaaaacggtcacacttgggaccagcagcagcatgcactgtagaggcctgaacaacggaaccccagcttgttccagtaaacaaagccaagctgaagaccggggaacgcgtacgaaagttttcccacagctgtttcacggaggactggctctggctgatcccgctgctgcgtgtaggatatcagatggagagaggcaaccgtctggacacccgtcacgtttctctttggctccagcagctgttcgggcttttctgcctggtaccagcagtttcagaacaggtggccacaaccagcaacctgaactagcaacagccagtaagaatccttatctttcaatacactgcagacatgcaccggagtcatctttcaatgcaaggaacagtttcagaaacttcacggaaaaggggccagcggcaccgtaccagtcgtccagttacctgacgcagcagctcagcagcaacatggcgcagagaaccgccgccgccgcctcctcttctgcgtcaggctacggcgttcagagaccccctggtctaagtctaacaacagcccagacgaaattcacgtcgctccggccgttgccgccttcggtcgtcccttcccatgcctacggcgcgccgcctcacggacccgtcaccgtctttcacccgtcagctcctcccgtgccgtatccagcgagcaattctggcggtcctggcagcagcgacgcggtgttggagatcgagagcgtgaggtggagcgtggtgggatcgaagcctgagggctcggagcgtctgaggagctgcaaaagggcagcagagatggacgccgacgtgtccgtggcgttgctgaagaagcctctcaccgtcgccgccgccgccgcagcacggcaggggctagatatgttgctaccggtcgcagagacggggtcggagttccgtggatccaccaggccggagccggaggcgcagccgcggcctagtggtacgagtacgacgcctatttgtgtcgacgacgagccttgagctgatgatcttcgacttggagacgcaggcaggatcgcgtcccacacggtcatcgaaagatgtcagcgcgatggtaaggtactactactactaccagtggagctgaaacctggagcgaagcgtgtatggcagtcagcagccaagtgccagcagcagcgtgtgccagccagggaaatcccctggcctgtgcgcgcgttcggttacaccgctagcccctcgaggaggcgcgggaggtcagcatgcatgttctaggtgtggtctttggccctctttgttcacctgtatacattgaaacactcatcagtggtttttggctggaag

SEQ ID NO: 34939 - DNA, 1101 bp, Zea Mays
aaaagttgcacaagtgatggttgagaagagtagacggaacgggacccaacccaccctaacccatcattcattcattctccactagaagcacgggttactgcacccatgacctgtaggtggtggtgcaagatacttcagataaagatatatatgtgcgtgtgtgtgaaagacagagaacctggctacgcctcaatctagccgggaagaacagctccacggaagaaacaaaggcggcagagtgctagaccggccatccgcgtgccagactgccagtgccctctcctctgcagccaccaactcctgcttcccagaagctagatctggacgaacatggcagcagtcccggtctacagcatcacaagagcggagatcgacgagttctggagcaggaaggaagtggaagcagaggagcggcgactcgctgccgagaaggaagctgcaagaatcacggccaagacactcaagatggaagattacgtgctctacgagcaaatggtcagggagattctcatggaggggaacggaggagacggatcagccatagcggcagctgccaccggtggcactaccgaggcacagatcgttggcatcaaacactggagagatgtaccgccatattctgctcatcaactccacgccagccaaacgtcgatgctcttgccatcttttaggtgtccccgccaaggataagctggggcgtgggggaatcaggaaatgtggatgtgattcatgtgtctgataatattttgggttcaataagctgcgacttatttcccatatggaatttaatttaattgtatatctatcttccagtattgcttgagagatcaagtaacaagtatggataatcatgttgcttcacgtataaaagcaagatactgataagaaatttaattgtcattacatcattgcttgccactacgacgtacgttctgtcatgtgaaaccttgacttcttcaaaaatacgagttgcaatattgcttgtattcaggtttcaaagtatattcgtgttggaaatccataaaaagcggctagcgctaaccaaatgttcatcaagcttgtgagcctgagtagggatcaataacgaaacaaaaaaaaata

SEQ ID NO: 34940 - DNA, 1424 bp, Zea Mays
ttccttatctatacaaaccaaactcgcgctccagaccacagctcaccctcacctgcgacctgcgcgcattcacagccgccggcgccacacgtgcccgcgcgccgggcgccacctctctcccatccaccagccttcctctcccgggccaggcggcgcccctcaatggccgccaccttcaccgtcgccgcccgcctcccgctgcggggccccgcgcgcgctccgtcccggccggccgtcgctgctgtaacccggcttcgaagccggcaggagcggcgcggcctagcagcgacaggcgggaggggacctgcccgggttcgggccgagactttctccggtggtggaggcgtggggcggagggaccccatggcgccgccttacaatgtcctcatcaccggctctacgaaagctcaaaaggtagaatctgtggtcggtgacttgaaggaggagtacggagagcaacatgtggaactgtctgtgatgttagaaatggaaaggatgtaaaggcacttgtggagtttgcacgtgacaaacttaagcatattgatatatggatcaacaatgctggatcaaatgcatatacatacaaaccactagtggagacctctgatgaggctctcatgtaagttttgtcctatttgagaaaccctggcaaatacacttctattcttttgtgctgttaatatcagtgattacttggacctattctctgatttactagggaaatcatcaccactaacacccttggattgatgatatgttgtcgtgaggcaataaatatgatgaggaaccaacctcgaggtggtcacatattcaaccttgatggtgctggttctgatggaaggccaactccaaggctgaattgcagatgaatgaagtgaataatgtgatggtgcacaatctatcgcctggcatggtcacaacagatcttcttatgtctggtgcaactacaaaacaagcaaaaattttcatcaatatattagctgaacctcctgatgtggttgcagactaccttgttccaaacgtcagagaaatccctaccaagcaatccatgaagccaacctacattcgtttcctcacaggcttgaaggcctactcaagaattttttctagacttgcttttggtgctaggagaaacaagtatgttactgaagattagttatgctgccagcttccaactgaagagattaggaacaattcttttcattaagcgtcacttacttttctcataagatgggatgtattacagatgtcatctcatgagaacagtgatatactcttctgtacagtagtagcaatttttttagtaaatgcataggaaaactgtgcatcaatatatcaagaagaatatagaaataaggtctaaaatagaccacaacatgataaccacctcacctcacgaatatacaaaagagtccatctaaaaa

SEQ ID NO: 34941 - DNA, 311 bp, Zea Mays
taacaatgtctttacaacgaacaactcatagattgcataagcatgcaaaataaaaggcattagcagcattcataacaatgtctttgcacacatacaagaaaggatagaaacttgtagattgcataagcattcaaaataaaaggcattatcaacgttcataacaatgtctttgcacatatacaagaaatgataggagcctgatgatacatgccaccaaatgactgaaggacgacaactaaactgccaatgccagtaaactagccatccttgtagttcacatcctacttccacggttccagcatgactcacaa

SEQ ID NO: 34942 - DNA, 1674 bp, Zea Mays
agcctccagctagcttcgtctatataagcaaccagccatcagccttccttctctcctagctagctactagtacctgtcctgctgtccttcacatacatctatccatcggtttctcagctgctgctgcatacacacctcggccgccgccatcgtcgtcgcctagctagctctgctcctgggtcgtgcgcctccatcgccgagctagcgagcaacggcgtgccgatcgatcgatcgacagagcggggcagatcgatgagctgcaacggctgccgcgtcctgcgcaagggctgcagcgacgcctgcgtgctccgccccagcatcgactggatccacggcgcgcagccgcaggccaacgccaccgtcttcgtcgccaagttcttcggccgcgccggcctcgtcgcctccctcgccgcagtcccgctgcaccaccgcccagccctcttccggtccctgctgtacgaggcctgcgggcggaccatcaacccggtgagcggcgccatcgggctcatgtggacgggcaactgggacctgtgccaggccgccgcggacgccgtgctccgcggcgagtcgctgcgcgcgctctccgccgtccccgccgcgttcacggaccgcgacatggacgggctctacggcagcgtcggcggcctggtcgccgccgccgccgccgccgcgtcgcccgagaactcctcctcctccgcgccgtccacaacgaagcgcaggaacgcgaacggcggctccagcaacaacgccgtccctgcggccgcggcctctcaccaccgcccgccgccgccggctgctgccgctgctgggctgctgctgcagtcgtcgtgccaccagctcgacctctgcctgacgccagcgctgtcgccgccgggcgccgggccgcggggctgcgccgccggcgcgtccgacgagtactcggccacgaccacgtgcgaggaccagaccggtgatcacggacacggagagcccaggcctcccccgccgctgctaaacctcttcaactgaactgactgactgacgggtgactgtgcagagagcgagggttcttcaggggcagggtgtacgtgtggtaattaagtaaagaagaaacccgtcaattagcgctgttaataggatggatttttttttatattttcggaggcgatcccatgattcgaattcgaacaccaagttataatttctgtgttttagctaaatgcaattttcagaagatgaaaaaaaaacgataaagaaatccacaataatatgaaacgataaatgatctggacgcaacatttgtctctagtctagtctagttaagacacacgtacgctaaaaaaaacataaggagaccaggtcaaccaatcacctcatggcgattgatatcgttctgatattgctgggctgtttgttcgttcttctcgcctaccgatggtgatgcaaaaccagacatggtgaccgtgcaggattcgctatacaggatatatatatttgtccgatactgttgggctatttgttttttttgtcgtgtacatttgatgatggagaaaacatacttggtggactatttgttatttatggtatttgtcttatattgcattgttggactatttgtttttttctctctcttgtctaccgatggtgatgaaataaaaaacataatgacattgcggtcataatccgctatatatg

SEQ ID NO: 34943 - DNA, 4662 bp, Zea Mays
agcgagtagagtattcggctattcgcacacagacagcgtggtgccgagagagagaaagtggtggtggaatacatagcaagccaaaaaaaaaacatttcttccctttttccttgcctcgcttcccctcccccgtctcctgttctcttctcccttctccgtctgcttcagcccccagaaatcgaagccaccaccaccatagagctccgagcccctcgccctcctccccgcctgttcgctgcgtggatctacaggcaggatgctcactcccgcgcgcgcgggcgccgctcggtgagcggctgtgaagaaaaggtgcctgatgagaattgagatagtgggcggccaaggaagcgaagtttctcgcactccacctgttgaatttaccaacttggtatgctggagtgtaaggataagagcagacccaattgcttcacagctcttgggttcttagtgccgactgtagcagcagcagatctggggcgagcagcgaaggcgttcatcagatgttatccagtgagcagccttcaggcccctcatgttccttcaagtctactggcccgggtgtgagcactgatccggcaacctccgtggccgaggggccgccgagccaggatcccagagatctggtccaaccttatcccaagttctccataagagattatgtgtttgcttcaagaagcaaaggcatcaagagaagctggcctttccatccacattcattgcagctttgcctagagcgcggtgtgaaggatccattgcctccatttgagtctcccgatttgatccggtcacagccattaaatatttccactgactttgagcaatctgctgcttgcttagaactcaatagtgttggtctggtgaagaatagagatgctagttccttaaacgagtatacaggcaatatcaacttccagtcatgccaaccagtagatgagtcacttggacctttgccatacacatcgccagaggatgggaaatctggtatcaaccaagtgggaagtacaaatgaatcagatcatcctgatgaggttataccaatagatctacaagataatagctgtacaaaagcaagtcagcaaattgaggttgatgtgcccttgcggcggttgagaaatcttgacttatcatgcgagccatctgaaaagaagtgcaaatttgtagtcaagttaggtgccacgacggatattcggcgagcagaggatatagcatctaactctagctcagtttcagatccgatggcttcaaagacttgtcctgtttgcaaagtatttgcttcgacttcaaacaccacattgaatgcccacatagatcagtgcctttctgcagagtctaatactgagcttgttgaaacggtccttgtgaaacctaaagtgaagccaaggaagaagcgattgatggtggacatatacaagactgctcttccatgcacacttgaggatcttgatcagaggaatggcactaattgggcagttgagttgtctatgtctccagtgagcagagaggtttgcactgagaaccgaagcccagaaatggtatcatttgacagaagagatgatgaaagagaaggagatgtctatgttgattctaacggcataaaaattagaattttgtccaagtgtaatgatgtacctttggtgttgagggatgaccttggttcgaggaaagttgcgaagcatggaactggaaaaggtatactgatgagcaaaaagatgctgaagtcaaagcttttgaagaataagaagctcaagatgcatggaaagaagtacaacaagacaagccctttgaactcccaggttcaagcatatccacatgatgatattaacgaggaaacctccgaggaggagtggcatgcgcggaatccttttgaaagcaccagcaattgttgttccaggactatgcagcagtgggtgtgctccaaacgctcagatatcgccaagagtttaagcagaaaccatagtggtaaagcatttgataaagtgatacctggagcacagaaatcggataggaacaacatgcttggctttaatgattctcaagttccagaaagtcctgctggggcgttttcttcggagtcaccagaatacatggccacaacttcagaagccattggtgttgagcagagcaatggtccttcaaaagtgcttagatcgattcctacatggtcttcaaaaactcaccgtcttcagagcagtgtcatgccaaaaacacctagatcagctgctgctcttgcaaagagaaaaattaaggagattgggaggagagaagctaccaaattagataattacaatatagtgaggaatcccacttcagtgaaaagatctgaaactaggactctttccttcactgcagggccaagcaatggatcaaacaggttagcatctacctcaaagaagatccggaagcatcgatctctgttgaggaccggcaagcgtgcattttcaccttttagtactagagtagttcatggttttggtgaagagcgtgaacttgataccagacatgtaaataagaaattccggattactagtaatgaggttcccaagaagtttttgaagcatactgaagaggatactgcagataatgacttctctcttgcaagtgacatgacagtatcaggacaacagaatgatcaatatgatgttgcacaggaaacagagggtacacaaatggattgtgaaggtgaagatgctgaaactgatgtgccatatgattctgtatccagaagtgatcctgctgactgttgcaaccaaataagtgatgtttctctgagtcctgaaaataacagaacaacagatgatgatgttttagttgaaggctatagtgtagctgtggaggatccaaactccagtgagaaattagcacatgggcatgaatccaactgtgctaccaataatgaaatggatgaatggcagatggatccgacttcaacaaaggaatctagtccctgcttagttagtaacagggacatgggtcctggaggtcctcaggataactcatcaataacatcaaatggagaaaactttaatcaagagcatggtctgccactcggacaggactcactagattctcctgtatcaactgcctcaactatgtcccctccagctgctttgaaggattcaaggattaacgatgaagaacctggcccatctactggtagaactgttgaagagcaaatcactgggtgcttgaatcaagaagccaagtcaatacctatggccagagaaggtgaacttcccaaagagaagccttttcgatgttcttgccaggagaacatttccagagagtctcatcaaagtgttgttgccagaccaacgctgaattttactggaaagcaggttccgcaattgcacattggttcgagggcatcatcatctttcagcatgtaccaaagaaccagcgcaaagcccaacccctgcttagattcacatgaacatctttcagcggctaaggttgcagcggaatctgctgtcagcctcccttcttactcaacagattgcataagcccctcattacaaactcagcttccttcgccatcaaatcctatcttgaggctgatgggtaaggatttgatggtgatgaacaacgaagagagtgtgcatcctcaagcaccaagttcagactacatcttgagagggaattacgaggcacctgttggttttatgcctccaagctaccaacatctcggtaattctggatttatcagcatgccaccaaccgcagccagtcaccagattcctctaccaagtgttcaagctagcggccttgttgctcctccgttgcacagcgtttccatgatgcaacctgaacatcattcccagcagaagtcctacagaaatattatgcctgccatgcatcatccaacctacatgatgaaagaagtgattgtgatcaaggactctcctgagcgtagtagaactgagccacaagctagcatgcttttcccccctgctccacctcccgcactctcgataccaaacaatacgccaccacgtccattttactgccttccaccgcaaatcccaatcttgccaagggagagggctgctggatccatgcctgtgtacgcaaactttggcgcattggctggtgtcagtccatcaagtcaagaaagccaaacgggagtaaccaatccttacatgccgaatccgttcttcgtccagtcccgaactggttacatgaaccacccgccagtgtactactcacagaatctggggtgatgatttctcagtagctcaaatgaccagaactccatttaacttgccggtcgtcgctgtcgaagtttgtgggggatgagagtttcgtgatgggtcaaaaacatgctgagatcaatgaacctgcatgagatgtgtctgactttcatgaggattttcacataggttgctttagatttttccccctttctttctcccttaaagctacagcatgtttgccgtcaaaagtatcttaattactctctgcaaagctgcagtagtaaattacagtgtgcaattcccaatagctctgcaaaggaatatatctcagtatttatcgaaaaagctggcatttgatattcccagttgcatgtttatagtctgatgtctgttctttttacacactgttctgccggtgtttgctgcctcagcagtgttaactcgtgatagttaaggggtgtttggttccttt

SEQ ID NO: 34944 - DNA, 6124 bp, Zea Mays
ataggaataaccgaacaagcccttaggggcgcgcggaaattaccggagttactaaggccttgggagttcggtcccgggagctcctccccatcgaaaataagcggaagcgcgtcccgcagcttctccgtgctagctgtaacggacgcgcgctgcctgtctgtgcatgggcgccgccctccccgctggatctgcagccacccccactccccgtcgcgccgattccatgagaggttgacaactgggcactgacgaagtggatactctgctctgctctgctctgctcgacgagttttaacatctgagtatggctgcggcgttggcgtggcggttcaatggcaccaatggtggcgcccatggcagcgcagatctggaaagacacacggacaaagttcaagactcagagccacaaactcctatgtcaatcgtgaaaatgggcaagaaccgagttaatgtggaggacgaggagacactttcaagcgttgctcaatgtattgagcaactacgacagagttcttcatcctcacaggagaaagagagctctttgaagcagttattagatcttgttcaaactcgtgatactgcattcggagctgttgggtcacattcacaggctgttccgatacttgtatctctccttaggtctggaccatctggagttaagatgctggctgccactgttcttgggtctctttgcaaggaagaggagttaagggtgaaagtcttacttggtggttgcatacctccattgcttgctcttctcagatcgaagtcagctgaaagccaaactgcagctgccaaaaccatatatgcagtttcacagggtgggataagggatcatgttggatcaaagattttctctacggaaaatgttgttcctgtactgtgggagcaacttaaaattagtctcaagaatgagagtttggtggatggccttctaactggagcactgaagaatttatcaaagaatacagaggggttttggtcagcaactgtgcaatgtggtggagttgatatacttataaagctggttagttctggacaaacaaatactcttgcaaacacttgctatcttcttgggtctttgatgatggaagactcttctgtttgttctaaagttttatctggagaaacaacaaagcagctcttaaagttacttggtcctggcaatgagacttctattagagctgaggctgctggggctctcaagttcctttctgcacagagtaaagaggccagacgtcagatagctaattctaacggtattccttctcttataaatgctactattgctccatcaaaagagttcatgcaaggtgaatctgctcaagcattgcaagagaatgcaatgtgtgcattagcaaatatatctggtggtctttcctacgtaatctcaagccttggtgagagtctcgagtcatgttcttcacctgcacagattgcagatactcttggtgcattggcctcagccttgatgatatatgacacaaatgcggaatctatcagtgcttctaatcctgttgacattgagaagacacttttgaagcagtttaagcctaaggttccttttcttgtgcaggagcgcataattgaagctttggctagcttgtatggtaacccggttctctgcaagacactagcagattctgatgcaaaacgcttacttgttggtttaataaccatggcagctactgaggtacaagatgacctcacgaaatcactttttgctctctgcaagaaggattgtgatctatggcaagctctgcaaggccgtgaaggtgtccagctattgatttctttacttggtctttcatcagaacagcagcaggagtgtgctgttgctctacttgcgcttctttcaaaggagaatgatgagagcaaatgggctatcactgctgctggtggcatacctccacttgtgcaaattttggaaactggatcttccaaagctaaagaagattcagcaaccatccttggcaatttatgcaatcacagtgaagacataagagcatgtgttcaaagtgctgatgctgttcctgctttactatggcttctgaaaaatggaagtgataatggcaaggagatagcttctaaaacactgaatcatctcatccacaaatcagatactggaactatcagtcagttatctgctcttttaactagtgatcagcctgagtcaaaagtttatgttctggatgctttgaaaagcttgctttctgttgcaccacttaatgatattctacatgagggaagtgcagcgaatgatgcggttgagacaatgattaaaattctaagctcacccaaggaagagactcaggctacatcagcaactgctcttgctggtctatttcattgccgcaaggacctgcgagaaactcatattgcagtgaagacactttggtcagtcatgaagctgcttgatatgcagtctaacaaaatactaacgggggcctcatgttgccttgctgccgtttttctttcgatcaaggaaaataaagaggttgctgcaattggccgggatgccttaaacccacttgtctcacttgcaaattcttcagttatagaagtggcagaacaagcgactagagctttggcaaatcttttccttgatcaggaattgtccctccaggtgccttttgaagaaattctcttccgtgtaacacgtgtactaagagagggaactattgatggaagaactcatgcagccgcagcaatagctcgtcttttacagtgccgaactattaatcagccactttcagatactgttaaccgctctgggtctgtccttgctctagctgggctcttggaagctgcaaatggtgaagctgctgcaacatcagaagttcttgatgcactggtgctgttgtcgcgatcaaaggcgtcaagtgggcacaccaaggctccctgggcaattcttgcagaaaacccccacacaatacttccccttgtttcatgtattgctgatgctgctgcctccttacaagataaagctatagaagttgtgtcaaggctctgttccgacctacatgatgttgtcggtggtctggtttctgaaactccaggttgcatgtcatccatcacacggcgcatcattggctccaacattcttaaagttaaagttggtggttgtgctcttctcgtctgtgctgcaaaagagtattgtcagaagcaaatagaggttctgaatgatgcaagtctgtatattcaactaattcattctttaattggtatgatccatatggcaaacacgcaagctgaaaatgtcagcagtgaaagcatatcagatattagaatttccagacactccaaagaaaacaacagtgatggtgaaactctgtgctgtactgctgtcatctcaggcaacatgattccactatggctacttgctatcttttctcgtcatgacagcaaaacaagagcagaactcctggaaatgggagcagttgaaatgctcatcgagaagatttcacaaaatgcattccaatatgtgaggtctttaataggtgataagatgatggtgtttgttgggttgggtcatggtttgatggtgaagaagataacacctcatgggtcagatgagccagcatacaggtactttgcggcacaagctttgtcaagtctggtctgcaatggtagcagaggaactcttctggctgttgcgaattctggggcagccattggacttatatctttgcttggatgtgctgatgttgatatagctgatcttttggaattatcagaggaattcatgttggtgcctaaccctgatcaaattgcattagagaggctattcagagttgatgatatcagggttggtgcaacttctagaaaatctattcctcttcttgttgatctacttaaacccattcctgaaagacctggtgctcctttcttggccttgggtcttctgacccagttagccgttgattgccccccaaacatgctgctaatggctgaagctggaatcctagaagcacttaccaaatacttatctcttagtccacaagatgcaacagaagaagctacaactgaattgctgggcattcttttcagtagtccagaaataaggcaccatgaatcagcacttggtgttgttaaccaacttgtggcagtccttcgtctaggaggaaggaattcacgttatagtgccgcgaaggcattagagagtttattttgtgctgaccatgtgaggaacagtgagtcaactaggcaggctatccaaccgcttgtggagattctgagtactggcatggagagggagcagcatgcagctatatcagcccttgttaggcttctttctgacaatccttcaagagcacttgcggttgcggatgttgagatgaatgctgtggatgttatgtgccggattctttcttctgattgttcagtggagttgaaaggaaatgctgcggaactatgctgtgttctatttaccaacacaaggatccgttccacaatggcagcagctcgttgtgtggaacccctggttggtttactggttagtgaagctaaccctgcccagctttctgtggttcgtgcattggataggcttctagatgatgagcaactagcagaattagtggcagcaaatggagctgtcattcctcttgtggggcttttgtatggcaaaaactacatgcttcatgaggcagttgctagagctttggtgaaacttggaaaggacagaccagcttgcaaattggaaatggtcaaggctggtgtaattgagagcattcttgatattctccatgacgctccagattttctttgcattgcattggcagaaatgcttcggattttgacaaacaatgctaccatagcaaaaggtccatcctcagccaaagtagtacaacctcttttctctttgctttccaaggcggacatgggtcctgaagggcagtatagcacattgcaggttcttgtgaatattttggagcatcctgaatgccgtgctgattataacttgacacctcgccaaactattgagccagtgataaccttactgaattcatctccaccagctgtacagcaattagctgcagaactcctatcacatcttcttctagaagaccacctccaaaaggacacagtaacagagcaggcgattactcctcttattcaagttctttcttcaggtttgccaaatttacagcagagagctataaaagctctagctaaccttgcaatagcttggccaaatacgattgccaaggagggtggtgtttttgagttgtctaaagtgttgttgcaatctgacccgcctttgccgcatgttgtgtgggaatctgcagcatctgtattgtctagcattctacagtacagtactgagtttttccttgaggtacctgttgcagtactagtgcaattgctcaggtcaggaactgaaagcactgttgtcggtgctttgaatgcccttcttgtattggagagtgatgactcaacaagtgcagaagcaatggctgaaagtggtgctgtggaagcattgcttgatctcctgaggagtcatcagtgtgaggaaactgctgccagactaattgaggcattgctgaacaatgtaagaataagggaggcaaaggctgctaaaaatgctattgcaccattgtccatgtaccttctggatccacagacacaatctcaacagggaagattgcttgctgctcttgctcttggtgatcttttccaaaacgaaggtcttgctcgttctactgatgctgttgcagcatgccgcgctctagtcaatcttcttgaagatcaaccaactgaagagatgaaagtggtagcaatatgtgccttgcagaatctagtcatgtacagccgagcaaataagagagcagttgcagaatccggtggtgtccaggtcctgctggatcttatcagttcaagcaatcctgacacttctgttcaggcagcaatgtttgtcaaacttctattcaataatcacactatccaggaatatgcgaccagtgaaacagtcagagttataactggtaaacaatatccctttcttgttctgtcatattcatttgcatagcaaattcatatttgtcaatgcctgtcatagttcttaaggcggtaaggcgaggcacggcgagtgacccctgcctggacgcctaggcggacacctagg

SEQ ID NO: 34945 - DNA, 2145 bp, Zea Mays
gttctgtcttttcttccgcttagtcatgccctcaaaatcgtagaggccgcatattcacgtacctccgccacgtctggcctacacgtacacatcgacccatcaaagtcgaggcccaaccaaccaaagagcactgacactcaccgccggcgacgcccaaccgctactgtggactcaccaacgaccaaaaccttcgccggctctccggtccctccacgacggttctacgccccctacctactgcatgtccatcaattttaccgccaactccccatcccgccgtttctcctatatatatgcgcacggacatgtccgttgagatctccaggaaggcaggaagaaccgccgccacgccacacaaaaagcagtgactcagtgagaaaggacagcaagccctccctccatctccgccccgtcgccatggtccttctcttcgtggagaagctcctggtcggcctcttggcgtccgtcatggtcgccatcgcggtgtccaagatccgtggccgcaagctccggctgcctcccggccccgtccccgtgcccgtcttcgggaactggctgcaggtcggcgacgacctcaaccaccgcaacctcgccgcgctgtcccgcaagttcggcgacgtcttcctcctccgcatggggcagcgcaacctggtggtggtctcgtcgccgccgctggcgcgggaggtgctgcacacgcagggcgtggagttcggctcccgcacccgcaacgtggtcttcgacatcttcacggacaaggggcaggacatggtgttcaccgtgtacggcgaccactggcgcaagatgcgccgcatcatgaccgtgcccttcttcaccaacaaggtcgtgcagcagtaccgccacggctgggaggccgaggccgccgccgtcgtcgacgacgtgcgcctcgaccccaaggcggccaccgacggaatcgtgctccgccgacgcctgcagctcatgatgtacaacaacatataccggatcatgttcgaccggcgcttcgagagcatggacgacccgctcttcctccgcctcagggcgctcaacggcgagcgcagccgcctcgcgcagagcttcgagtacaactacggcgacttcatccccatcctccgtccgttcctccgcggctacctcagggtctgcaaggaggtcaaggagacccgcctcaagctcttcaaggatttcttcctcgaggagaggaagaagctggcgagcaccaaggccacggacagcaacgggctcaagtgcgccattgatcacatactggaggcacagcaaaaagcgatcgagaccacgctgtggtcgatcgagtgggcggtcgccgagctggtgaaccacccggagatccagcagaagctgcggcaggagctggacacggtgctcgggccgggccaccagatcacggagccggacacgcacaacctcccctacctgcaggcggtgatcaaggagacgctgcggctgcggatggccatcccgctgctggtgccgcacatgaacctccacgacgccaagctcggcggctacgacatccccgccgagagcaagatcctcgtcaacgcctggtacctcgccaacaaccccgacagctggaggcggcccgaggagttccggcccgagcgattcctcgaggaggagaagcacgtcgaggccaacggcaacgacttcaggtacctgcccttcggcgtcggccgcaggagctgccccgggatcatcctcgccctgcccatcctcggcatcaccatcggccgcctcgtccagaacttcgagctgctcccaccgcccgggcaggacaaggtcgacaccaccgagaagggaggccagttcagtctccacatcttgaagcattccaccatcgtgtgcaagccaagaacgctctaagagcagcccacacgtcggttccatgcggagcagtcgaatgttctgctccatcaccatgttattcgggcttaattaagcagtatcattagtagacagtaggagtacaggaagaaaaaaaagctctgggtaatgttatttgcaacaaagggaagggaagggaagaatctgataactattcaatgaagcgttcggttcttgagagcctcacgaagtttgggcgtgtttggattcaccagattctaataataatgttcagcatatcag

SEQ ID NO: 34946 - DNA, 1080 bp, Zea Mays
cgttggcccaggtcccgaagcgggagggttggtgggggaggaggaactaacgatagccatcgccatggccaccgacgacgactgataggactgcctcttcttcatcgatgtggtaacgacagaaatcaagtaatggggacggggctctccaggccatgcgggtcaaacgactggaacacgtccccttagcctccgaacgggaaccccgggctggagctctacagcgagaagaccaagcttgctgaagggccgcaggcttggaacatctagattttgttttgctaaggggagcgctatgtgttgctcaggtcaagtgggttcacggctgcgagcttcatggagagactattgatagcagttgtgtcctgcatcattctttgatcaagattgatgagggaaagatcagtatgccgaggatgggaccgggttgtagcttgcgatgctagatctgctcatcatgaaacccatcatgactaatgcatttatctgccatttaagtgtacaccagattatttgtatgtttgctgcttactatgcaaaatggcagctaaaagaagccctaaagcatgcgagctgcacctctaccggtttagtggccaaactggctgttactacgtttcaggtgttttatctgtaacttttattttgttctttttcttgttactcacttatttctgaataattaagtatatatgtcacttaatttagtgctagaatgcagatctggcatgtttgggaactaacctgcactattggttgttttttgcttcttggtggaccattttatctatagggtttggaatgttttccagcatgcattaaattactgttaacatatgattttagaatacaagtttttagacatgtgttgtgtatttggctgtatgttaaattgtaaacaaaaaactcttagtcgttgtactctaaccttgaatttatttgatagatttttcatagtttgtttcattaatgcaataggggggggggggggggctatgtagcaaggatgtgatgtaattatgcgcagctattacaacaatttcttgttctcaatggctttgaattgcagagtgctagcca

SEQ ID NO: 34947 - DNA, 2245 bp, Zea Mays
atcaagccaaacaacccggatccccacgggccacgaccccaccaggccaccacgtatacttgcccacgttccccttcccctcgcatccgtttcgtccgtgcgccgccgccagcatcttctcagcccaggccccagacagagcaaaccccccctctaaaattcggttatatttgggctcccgcctccgccgtcgccctacagtcctacaccaggtgccgaggccttcgccggtcaagagcgcccagcagatccgccactgggtttttggatttggagacatggcggaagtggatgacaagctcaaggactacgagatcaggaaggagggagaggcagagatcctcttgcacaagaggaacgccgtcttttacaatcccgtgcaggttcacaacagagacatgtctattgctgttttaaggacctttattgccaagcgcaaggaagaacatgaagcgctggtggacaagaggaacacatcgcatggaaaagacaaactgagtgaaatatcctgtcaaaatggagaggatgcgtcaactggccagcaagatgaaatggaactaaataaagctgaagttcaaattgatgatctgtcaaaagaagcaacaaaacctccttggaaagtaaccagagaacttaagccaccacttgtcctcgaggctttggctgcaactgggttgcgatctctccggtatgcccgtgaagttgagggcttaggaaagatagttgctctggacaatgataaagcttccgtcgaagattgcaagcgaaacataaagtttaatggtgcttccactactagtaaggtggaaacttacttggttgatgctcgaattcacatgctgatgcatccaaaagaatttgatgtggttgatcttgacccttatggatcaccatctatatttctagactcagctgtacaggctgttgctgatggcggtttattgatgtgcactgccactgatatggcagttctttgtggtgccaatggagaagtttgttactctaagtatggttcattcccaaccaagggcaagtattgtcatgaaatggctttgagaattctcctagccagtattgagagccatgcaaatcggtacaagcgatatattgtgcctgttctctctgtgttcatggatttttatatccgtgtttttgttcgagtattcactgtgttggctgcgactcttttcatcttcaatgtcttgcgaggactgttccgaagaagaataatggtgtgaagcatgcacctgcttttggacctgttgttcctcaagagtgcagtgattgtggaaagaaatttaatgtaggtgggccaatatggtcagctcctattcatgatcaagactgggtagtttctactttgacaggtgttaagtcaatgaaggatagatatcctgcgtatgataaaattacttcagttctaactactgtgtcagaggagctagatgacattccactgtttttcagtctccataacatagcaggcactgtcaagtgcacgtctccgtctctggttatgttccggtccgcagttctaaatgcagggtatcggatctcaagcacccatgttaacccacttggggttaaatctgacgccccttgggatgttatttgggacatcatgcgctgctgggtgaagaaccatcctatcaaggaacaggcacgtgactcacctggcacggtgatcctttcaaaatcgccaaagctagaagcagacttttccagagcagttgctgccctcggcaaatctggggcaaagaagacgaaacgattccttccaaacccagagcggcactggggcccgaaggtcagagcaggccggaagatcacgagcaaacacgtctctctgttgggccctgatgccatcaacgctgccgtgaacggcggcggcggcggtgactgccacagagaagggagcggtgccgcgccagatagtagcaatacagccccagaacccgaggggctggaggacgaaccctcgaacaaacgccagaaagccagcggcgacggggaaccagaaggacagaaggccagcgacggggaaccggcaagcgaagcttgatctgtttggtagtcgttgttgtgcctgtcagcctgtgcttttgctcgttttgtggcccgatgggtgttacctgttttattttgatgcaacgaattttgcttggttttgacagcctgtgggttttagatataagaaaagcaggctccagacccaggcctcgtgcgtgtcgagcctggcaacgtt

SEQ ID NO: 34948 - DNA, 1288 bp, Zea Mays
ttttctctctgtcctccaccctcgtcctatcactgatgtaatttcaatatgtagtttgtctagtttgaatcttcttctaagccagtggctgtggctccatcgtccgattatctatccatggttactagcgacctcgagtttctgattgagttcggtaacagcctcccgcggcgccggcggacacgcaggcggcgcaattgatacagacgctgttcaagccctcggtcgtgtcggcgcccgcggcggcaggtcgattccgtgttggtcgcagacttgtaggcaccttcggctcccctcctgccggatgccaatggcctggtcaggcctgttaaagggcatgtgtggtaggtaatgagaaactatttatgattggtggacatgagggagactttatgactaaaccaggatcacctgtttttaaatgttggtggaactacagaaaagcatgccatcaccaagaagatgattcttgttggtgaagtcttccgttttgatttggaagcattgacctggtcagtcattgggcgcatgcctttccgaatcaagacatccttatctaggtactgactactgagaggggaggggggctctgttttacttctgggcagcgagatcatgggcctgacaatccagctccaaagaaagttgttgggagtctgggactatgtggagaacgaggctgcacttgtgatggcagaagttgtgacagtttgtttcccctgaaaattgtagatttgcatctgatttcctgtccaacagctaggtccctttcagagaagagagttgcttgttttgattcccacatccggaatccgaagttcagatatgtctccaaacaaccagaagatatggacataagcaactaccaaagatcattcttattggagatattcagcgcaaagcccacccaccaaataatcatgatgttcttctttccctagctgttgcagagaggtcggaactgtttgggctttcactagccaattaaaatattaagtagcaagctgagtaccatgtcagtattaaatctgtctctgtaattgcctccgaaattggtgtgcgtgtttctcatcttgttggtttcttagtatatgtaatctgcacttagaggtacaatataggtgcacaggggcaggacctgtacttaaatgttagaatacctgttcagggtttggagtttttcccgtgtaattactatttcacccctctgtaatgggcctggcccagtttactcgcatctattaatatatcacccaacccctgttagggttagggttttcaccggtca

SEQ ID NO: 34949 - DNA, 3010 bp, Zea Mays
aagcggaagcggcggatgggtaggcaaggaccaaggagagagggcttttaacgcggattagttgggcctcaagacataaaaagcccaaacacatctagttgagcaagcccgtcccatgagcccacgaagtggaggatcagcaagcacgagcgtctcgagctcgcgtcgcgtccgtttgctgcgccctccgccgccgccgcaatgatgcagccgcatctgccctccccggcgaggctggggctcacagcctcgtcgccgtcgctcccgcccaatccggtccccttgaatcccacatcctcgccttcacacggtagcctgccctcgagcgcagccgctggcaccagtgctgccccaaccctaaccacctcgccgtcgctgctaccgctcctgccgccgcttccgcgcgcgcaatcgctgctccagcttatatcgtcgctcgcttccaacctcttggaactctcggcgaaccgcgccgcgtggatctcagcgtaccgaggatcgcttcccaccttcctcccatcggcgtcctccgcgccgccgctcgcaaccccgatctcctccaccaaggacgcgctctctcttgtcaccaccctgcagacgcagctcttcgaggccgtcgccgagctgcaagagaccctcgatctgcaggatgcgcgcgcgcgccttgtccgtgaggcgcgtggcaaggatgctgcgctgctagcctttgcgaagaagctgcatgaggctcaccaagtacttgaccgcctcgtcgacgactacgctgactaccgtcgcgatcccaaacgcccgcgtggcgccgctgctgctgacgatcccgagccggcgtcagagggcgacttcggcacgtccctccactccagccttaagcttgatgacatcctgacctacgcgcaccgcataagttacacaacctttgctccgccggagcatggtgctgggttgcctctccgtgttagcctgccacctgtaccacaggagaatcagatgagagcgtcgcagctgtatctgtttgctgatttggatgtaggggtacccaagaagccattggatgcgaaggacgggatcgcggcagaagtggaggttgcgccgctgtatgaggcaccacaggaggggccgtcgaggctaccaaacaccttgccacccatgttcccgaaggagctaaagccgccgccgggatggaagcctggtgatccgatcacgctaccacttgatgagatactacctggtatcaagggtgaagagcgggaggcacaggcccctgtgccgcaggcacctgtttcagtgcgaccagtggcaccaatgggaccagagacaatacaggtcaagcctgtgcagcttgattttgggagcagtagtagtgacgagtacagtagtgacgttgggagctcagaagaagatgatgaggattagtgctcgagatttatttctctgcttaccagtttacaaggataacagaagatgagaagaacaatagcagcagcaaaacaatctaaatcagacatcacacttgtagctgaattccaacaggatacccgaacccactccaggaacccaaaggcaacaggaacaccacctcttgcacttgtacagaggctcaaatcactgtatgcagtgcattcagctgtcccaccacaccaccttctcagccgaccgaaaggcatcttacttatcccaatcagcctgccacagtggcgagaatggaaccgtacctccagtggttagggatacagctcatggagctcggcggtaccgcaatgtcgctgctgctgctgctcgtgctcgccgcgtcgccattgcagcaggccagggcggttggcggcggcaggccgcgggtgccggccatcctggtgttcggcgactccatcgtggacacgggcaacaacaacgccgtcctcacgctcaccaagtccaacttcaggccatacggcaaggacctcaacggcggcgtacccaccggacgcttctccaacggccggattccgacggacttcgtagcttcacggctcggcttgaaagatctggttccggcgtatctcggcaccgacctcagcgacgacgacctctgcacgggcgtcagcttcgcgtctgggggcaccggctacgacccgctcacctccactctcgtggcagttctgccgatgcaggaggagctcaacatgttcgcggagtacaaggagaggctcgcaggggtcgtcggagacgaggccgccgccgcaggaatcgtggccgaaagcctgttccttgtctgcgccgggtcggacgacatcgccaacaactactacctcgcccccgtcagacctctgcagtacgacatctcggcgtacgtggatttccttgtggagcaggcctgcgacttcattaggcaactgtaccagcaaggggccaggaggatcgcggtcctggggatgccgccggtcgggtgcgtgccctcgcagcggaccctcgccggcggcctagccagggactgcgaccccgctcgcaaccacgcggcgcagctgtacaactccaggctgaaggaggaggtagtgctgctccagaaggagctggcgtgccagagaatcggctacgtggatatctacgacgtcctgcaggacatgatcacgaacccctgcaaatacggcttcgaggtctccacgagaggatgctgcggcaccggggacttggaggtgtcgctcctgtgcaaccagctgacggcgccgacgtgccctgacgaccggaaatacgtcttctgggacagcttccatcccaccgagaaagcatacgagatcatcgtggactacctgttcccgagatacatagagaacctgctataattacttctgctttaccgtcgcttctttaattcgatcgtttctagttgttgtcaagtttagacatgccgtctttgtttcccaatttaagcttttgctttaaaactcaagacttttcaaggaaatgaaatgacacctgctagcttgttgcaagctgtaaagattgattggttttgtttacttgttccgtgtgaaac

SEQ ID NO: 34950 - DNA, 3048 bp, Zea Mays
gcgtagccgacgacgccgacgacgaggcagccatggccgcccccgccgcccggagaatagttggcgctgaggttcccatacccggctcggacaagctgcggtggatcgacctcaccatcccctcgtcctccgccgctgcgccggcgagcccctccgatcccttcgtctgcgtgcccccgcgtgctgcctcggggtgccacatcatcccttcgggcgattctcagtattacctctcgtggaggattcacgaggaacacccaaatgtgctggaggtcattgaacttagtccctccaaggagttccctagctttggactgcgtcttgccttccaggaggcgctatctccattcgcctttctatgtgaacgagagggtcgcaggcaaggggagcttgtatatatgctatatgtgcttaccgtttctggagttgctcttttgtgccacctacgcagcccattttcctacgtatctggttcagtgctgcatcaggatgatatagctgagtttaatctccaaactcaagctcagagcgcaaaggttacagcggtaacagcgaagccaggatgtattgtgattggtcggcaagatgggtccatctgttcttacagtcttggcaaattagccccaaactcaccaggtttctcgaatgaactacgagatgatgctgggattggacgtttatggactctcatgtcaagaacaaagactgtgggtcctgtgcaggacatagtagcaactgttgtaaatgaaagggacctgttatttgttcttcatttggatggacacttgcgcatatgggataatcacatgaaacttctcaactataatgtccactcaaatgacattgaaggccatccgtccaggctatgggttggtaaggctgatgatgatcaggagttgatatctttggcgattctgcatcaaaacactgtggttcaaggttgtgattatgttgctgtatatggcttcggtttttctgctgcggaaaggttcatgttctcttctgaaccttcaatttctactatacctttgctagaggggaagcttgcggacttgaaaatagccacatataagctttggatacttaaagaatttggctccatgctctatgaaatattacagtatgacattgacaccgaaactgcaaaatgttgtagtgagaaggtttgctgttatgtgctacaagaagatgctatcagtgaacagttgtttcaaagttctgacaatgcattggatgatttggtttggacagctgattcaatgttctcctccttgaaggaacaggcttttactttgatttcatccatgtttctgcggaggctacttcaaccaggagtaaaccactgttctgccctacgtgaaaccttactagagcataaaaggttcctatcagattctgagttccagtcacttacagcaaatgggctacgaaaagagatattatctattatagaacaagagttcacagacagcaagtgctacagcttatcactggaaacaattctctgcacggtacctccacaattggtgctggcacaataagccctatggattgtttcttgatactacaaatgaagtgtttggtttagtaagaaagggttcattttctctattccgttgtttggagggtctggagatgcttatttatggttatgaccatggggtgaacttactcgacgatgtgtctgattttgaactcctcaatgaggtcctcagatgcatgggcaatatacaccatttgctggggagatcttccacagcagcatattatgaatccttaattagttctattatatcatctgatgaaattgtttcacatatagtaaagattctagagactggttttagtcatcagtcatcctcatccctcagtacattactaggaatggatacttatgtagaaagaaggcaggcagctcacaaaagtcaaaggaagttttctgttgagatgttacgatcttttcatacgttgcaatcaagatcagcatcctggtcggcagtattcgatgtgattgagaagtttatgaagtgtttgaacacaaacatgaacgtacaatcgtatggatcaaagagagtttgtaatgtaaattctgtgttactagttcaagctacttcacaggttgccagaacaatgtttgagtgtgcatttgatctgtttctgttccttagctatctggttggtgttggtgggcaggtttctttgttgcaaaatgatgttgccagaataaaactgaagctgttcccaatgattcaagacatattgggacaatggattgttctccattttgtaggaacctcaccaacctcaccaccaaccattgacgattttagctatcaactttcttctcttcagcttggtaaatcagatgaactgtctttgcacagaaagcttggctgctctgattttacattggcttctttacttgattttccaaaatctcctgaaggggacgttatgtcaccttgttttctcggtccagcggaaataataaatctagtaaggaggtttagtagtttgattatgcatggaggaaattttgaatgtgtacacactttcttgggatgcacaattaatctatcagctgttctcatcagacatagtcagtatgaagctgctcagaatctgctgggaattctggaaacatacttgaacaatggaaaagtatcgcatactggtcaagatgcagacactgcatgttcagcatatcttcatctcaatggattttgccttctgatgattgcacatgatgaagcaaatattattttgagagaatccaaggttcatgatgctatccgatgctttttcagggctgcatccgggtatgaagctccaaaggctttggagaacttttcattggaaacagggtttcaagtttctggggaatctagatctatttctttgtggagacttaactactatgagtgggcaatgcaaatttttgagcaacactccatgagcgagggggcgtaccaatttgctcttgctgcactagaactagttcttctcgacgggatagataatggaattgaagctgagggtctccagaga

SEQ ID NO: 34951 - DNA, 1604 bp, Zea Mays
ccgattctcctttcttgcccgcctcacttctgagttccgactctggagcggagcggcagccaaatctcgaccacgtccggcaaccgcgccccctcggctttgcgcccacaccaagccaccctctgttctcctcttccgtggcggactagcggcgcactggtgtggtgctcctccaagctctggtctgctccgcgccccgcctccccgtcgaccggcgactttggccccggcccccgggctaggaagcgagttcaccggtggatccgcgcgtgtccctccctgttacctgcgggtcgccccagccggccacccgcgcccccgcaccctactgacttgggcttgctgtatagcacggaccagatcaagggtcgtcgtcgaccacgtttgaggcttggccatgcctttaaatatagatattgatctgttcaagctggatattgatgagctgatagctgattattccaaggagaactgtacatcactcttcgaattcaaacgagtatggatgggcaagaaattttcttatatctatgaaggcagacctaagacaaactcaggtcatttgacttctcaaagttcactgcaccaaagattggctgggctatactgcctttactgtctgtatgagtgccagccatacaagccgcagttcaagatttacttgtctcttgaggagtgcaggcaactgaaggatatcgttgttatggcgaagcaaaatggactgcagctcgtgcctgcacttgtcaaaaggatgctggataaagacatgtttttgtttggctacatgaatttgatcaacgacaacggggacaagcaggtcgaggaattgaccgcattgcagaacaagcaagtaaaatttgcatgtgacaagttatttgcaaatagccaagcagaaagatatatgcacatggacttgggtgctgagttcgagcttgataccatcaaaaaattgtcaaaggagtatgcagaagcaaaggaactggcccttgcagaggcaagccaaactgtcgaagttgaagatgctaagcacctccttcagagtgagaggctgttgggcgacaagatagatgaagtcgtcaaagaatgggatgtccagaaggaggggttctacgagagaactggattatcctcatcccctggtgaccagctcatggcggtcgacaacgatgaatcaggagctcaatgtcacaaggatggatcctgtggcgatcagctcatggcggtcgacaatgatgaatcgggagtacaggatcacgaggacctcgacgacgacgacgatggctttgccgagttagaactgctgctagagtgaagaacatatacaagtctgtaaactcttactaccgccgtataaccgtgtaatcagaacaccgagagatgtaatcctcgctcgtctttactaggctctcctttttagttgccagaccttctgttcatctacactggctgcagtaactgtacattgaaataatccagttcgccagcctatgcgggggagagaaaaaagaggtgaccttgagtaaaaatgtacatgaacagtgacgagaaaaaacgctggctgcagtaactgtacattgaaacggtagtgtgccagagtaaaaaaa

SEQ ID NO: 34952 - DNA, 3175 bp, Zea Mays
gccaagtcaattggtcaacacaccaccacacgcaacgcaacccaaacccaacagcccaacaataacgtagccagcagcccagcagcagcgcgtcacgcccaccacgtcccccccggtcaaatttccattccatctcatctccccccacctcacctcgtcacggcgatggcgccgcgtccgtgcccgctctccctcctcctgctcgccgtcgccgtcgccgtggccctctccccgctcgcggccgcgcagccgcagcgaaacatcctcacgacgttcccctccacccgcacgccggccttcgccaccccgccgccgccgaccgtatccccgccgccgtcccccgtcaccgtcccgccctcctcgccgccgccgccgccgtcgtccgtgaagcgcagcgacatcgcggtggcggtggtgagcacggcgctcagcagcttcgcggtctcgggcctcgccttctttctcttcctccgccacgggaggaggaaggagctgacggccggggacggcaatgggtatcctggccgtcctctggatggcgccttcgcggggaagcggtcggagagggagccgacgcggccgtctcggggcgggggcggcttcggcatggtggacgagaacggcctcgacgcgatatactggagggagttcgaaaaggacggcgaagccggcggcagaggccgagagaagaagccgcctacgacggggactgggagcaggcgcccgccgcagccgcctccgcttcggcagcagcagcagcgcgcggagatgtggccggagccccagccgtcgtcgtcgccgccgccgtccccgccgcgacggtccaggaggaacaggatagatcaggagccgctcatcccggcgggctccctcgactccgcgtccgctgtgttcgacgactcgctgcacccgcccagcgccggctccagctcgtccttctccgtgtccgcgcgtccgccgccgccgaccccggcagtcgctgtcagctccgtgccccgcccgactccgcggcctgcgcctgccgcctcgccgggtctgccgctgccgcctgggagagcaagcccgccacctgcgccacccatggttgctgcctctgtcgcgtcgcctccaccgccacctccaaaaccagccgccgcgtcgccgccgccgccgccaccactggccaagggcccacctccaccgccacctccgaagggcggcccacctccgccgccaccgcccagaggtggcccgcctccaccgccaccgcccaaaggcccgtcccctccgccgccgccaccaccaggaggaaagaaaggaggtccgcctccgcctcctccaaaaggtggggcatcgacgtcctcttctaggccgccgacagcgccgggcatgccatccggtgccggcgagcagcaggcgaagcttaagccgttgcattgggacaaggtcaatgtgcaggccaccgaccactccatggtgtgggacaagatcaccggcggttcattcaacttggacgaaggcatcatcgaggctctcttcggcactgcagcagcaaaccgcaagccgaaaccttcagacaaggaatcgggcgaatcgtcggccagcctcgggcgctcaaacacaccggagcaaatattcctgctcgagccgcgcaagtcacacaatatttccatcatcctcaagtccctcacggtggggcgggatgaaataatcgacgctctccgtgacgggcaaacagaactcggcactgacgtcctggagaagctttcgcggctccacatctccaaggaagaagagtccaccatcttgaggttctccggggaccccgacaggctcgcccccacggaggccttcctcctccgcctcctcctcgacgtgcccaatccgatcgcgcgcgtcaatgcgctgcttttcaaggtgaactatggtgcggaggtcgcgcagctcaagcactcgcttcggacgttggaattggcgagccaggagctgaggacaaagggcctgttctttaagctgcttgaggcagtgctcaaggcgggaaacaggatgaatgccggaacggcacgtggcaacgctcaggccttcaaccttacggcgctccgcaagctctctgacgtgaagagcactgatgggagcaccacgttgctgcacttcgtcgtcgaggaagtcgtccgctccgagggtaagcggctcgccatcaatcgcaactacagcatccgccgctcgggcagtctcgcgaggtctggccacgagggaggcagctcggcagcaggcttcgcaagccaggggccatcgcgggaggaaaggcagagcgaatacatgaacctggggctaccaattgttggaggtctcagcacagagttcgccaacgtgaagagggccgcactggtcgactacgacgcagttgtcagcgagtgcgccattctagacggccgactcaatgagatcaagagactcttggagacctgcagtgatgatggatttgcgcgggggctgcgaggatttgtcagggctgcagaacaggagctgaaggcgctaagaggggagcaggaaagagtacttgagctggtccagaagacaacagagtactaccatgccggtgccaccaaggaacggaacgcacatccccttcagctgttcatcgtagtgagggacttcctgggtatggttgatcaggcatgtgtggacatcaagaggaaagtgcagcagaagaaaccagcgccgtcgtcatcgcagccaaacacagctgctgcccccaccgtggcggctgtggcagcggctgcggccacaacagcagcgacagcgtcagcgaccgatggtcaaacagcaccagctcagaaaccacccgaagcagatagcaaaagaaagagggtcatgccaagatttccaaacctgccagcgcacttcatgaaggatagtgcagattctgattcaagtagtgacgaggaatagattgaacgggtggctgtagatgattgtttgcgttgttttgaattctttgttgtagaggtataggatagcttcagactgtacatagagcaatttttgcattggttcttttgtccatttcttcaatcaagatccatatcgaagcaccgaaataattctaaagaaatttgtaaaaatatgacgtgaagatctcaattgcttgaaaaatgatatctttgtttgaggggggaacccctactgtcagcag

SEQ ID NO: 34953 - DNA, 1103 bp, Zea Mays
ccaccctccaatccaaagggcaaggcaaaagctcgccccacccccaaggccccaacctgcctatacggccagacctgctcgcctgattcgctctcccgcgattccacccccacaaatcctccgacccaacccaatccagcgtctcaaaattcacgcaacttcgcgtcgcgtcggctccaaatttgcccccttcgatccataaatcccttcccccacccccgattttgcgccgaattcggttagcttattactctccgagcttatcgccaaccgtctgtcccgacctcgagatccggctcattttttcaccctcttacgtattcggatcgagcccgagctgccaattcgaggagctccgaacgcgggccgcataaagcgaatcgaatgaatcaagcttgcgcgacgggcagttgatgccacccggcgatggatcgccgcatcctcaggacctcgtcgtgcaacggcagcggtaagaacccgtccccttcctctcccgcggcggtctcacggcctgcgtcctccgggggcatcggctccaaggacgacgccgctgccggcgagcgcaaggcgctgctgccgcggcagcctcctggcggcatggcgcggaagggccgcaaggggtccaaccgccgcgtgcagtggaaagataagcatggcagcaagctcaccgatgtcagggagttccagcctagtgactcaagtgactcagatgatgaatatttggatacatgcatatgctcaatcatttcgttccaacagactccgaactggtgataatcagctggccttaactgggagttacatcaaagacctagaaaatgatcaccggattcagtaggtagacatgattaaagaagccgagaaagaatgcctttctttggtttaattttggataccaacagcatcctgagtttttggcagagtaatgattcatgtgataatgcaaatgctattagaatcgaacattactaattcctgtgcatgattcagatcgattttgtcaaataggatttgatgtattaacatggtatgtttcttttaaaaagaatccttgctaccatcatttgttacttacaggagctagtgcccagatttgtgctgaa

SEQ ID NO: 34954 - DNA, 1804 bp, Zea Mays
aaaagttagaaaattaattctgcgttagttactccaggcttaaggttaagcacctcccaaacacgcctatgagggccctcgtccggatccacctgcccacggccatctccaccggatccttcctccacacctcctcaaccgccgcctccaagaccctagtaccgaaccccaacctcgtcccgctccggctcgtccgccacttcccggccatggccgccaccgccgcagacgagttcgtgaagggccgcgtcttccccaacggcgtcgccgtcatcacgctcgaccgacccaaggccctcaacgccatgaacctcgaaatggatgttagatacaaggcacttcttgatgaatgggaaacaaatccaagtgtcaagtgtattcttgtggaaagcagctcttctcgtgccttctcagcagggatggatattaagggggttgccgtggaaatacaaaaagacaaaaaaacaccacttgtgcaaaaggtggggatgtgaagagacttgctaatgattgcaccatgccagaaataatagaggtattcacagtagagtactctttaatttgtaagatacatgagtatgcaaaaccttatatatgcttgatggatggagtgacaatgggatttggaattgggctatcagggcatggccgctaccgcattattacagagagaacactcctagccatgcctgaaaatggtattggcctgttcccagatgttggctttgcttacattggtgcaaaagcaccaggagggggtgcagttggagtttaccttgggattactggaaaaaggatatcatcacctgctgatgctatgttcataggccttgcaccaatgatcctcatagagacgttgagtcagttctgacaggatacaagaaagaaccagagtctgaaccacaactaaaaaagcttttgccatatatcatttcttctttcagtcctgataaatcagtggctgaatctgtggaagagctaaagaaatgtagccgaagtggtgatgctgcagtggcagaatgggccaatgaagctttagcaggaattgagaaaggcgctccattttctctttgtttaacacagaagcatttctctcaagttgcatcagcatatgggactagtgaacactatttatctaagctggctggtgttatgaaattggaatatcgcattgccttgaggtcgtcgattagaaacgattttgttgaaggtgtgcgtgctgttttagttgacaaggaccagaatccgaagtggaatccagccactctggaagaagtaaacatggccgaggtcgaatcagttttcgagccattaggggccgaggctgagttgagtgtgtgaaatatggcctgccacactcagttttcttatttgtgctgcaataataatgtatacaaaacagaaatgcgatgcccacagaaacaataaatgctgtgtcttcatgaactaactggagtggttccattttctcgaaaggggcgcgtgggaatctaaggtctgttgcttgctttcctgcctctgcctgcaatattccagccatggtaccaggtggatggccaaatactctagaagcgtttgccctgggcacttgcatgtagcttgatgtgagtagtgtaagaacaaccgggtacggaaaccgttgtctggccagcagatttcaaggcgtgtttagacaagtgtacaactgacgcgcacagatgtacggagtatatattatatgaaatatggcactaaaactcttttcccaggggctttgacgcaggcccggccgcggaaaaaagaaagaaaaaaatattacaactag

SEQ ID NO: 34955 - DNA, 488 bp, Zea Mays
ctacgggattagatctgcatcaactctccgtcaagtcggcaggtctccggcctagccgaactgtcctacgcgacagctatcatttttgtctactgaatcaagagatggggtatgtaatttctggattgaatctgtgatttagttttcaatctattgttagcggtgaaaaaaagcaccttcgccgctttagggagcgccgcctggagccgctgctcctacgtgtgttcgcgtcggggacctgcgctgtacaccgcgcgtactctgatcgggcaggtcctgcttgcaacggcggcgagcaggccaatgacgccggatgatgtcctcgcggatggattgattgttaggactcaatcgctcaagagcttgtgatccctctgtttcccactgcgtgcgtgtcgtatttccatgatccatacgtgcgcgtcagtgctggcccgaacagtcacgtcgaggcccagctgggaacctgcgccatccctgtgtcgcgc

SEQ ID NO: 34956 - DNA, 2618 bp, Zea Mays
  misc_feature (2617)..(2618): n is a, c, g, or t
caccaccacgctaatcagcagcagctggtagcaacgcgggggttgcgctgctctgcttcccaagcaacgcaccaaagccaacgcggcgcggtactattataccaccacaccacccaccgatcccacagctcataccagcgcaggagcagcgcagcgcagcgcagagcggcgccgcgcgcagcacctccacgcccccagctgcctgcacatgtgagcggccgcggagggcgagagctaggtacatttcgttgtgccgccgctgcggggtccgtgcgcgaccgagatccggtggggcggtggacagagatggaggcgagcgcggggctggtggccggctcgcacaaccggaacgagctggtggtgatccgccgcgagtcaggagcgggcggcggcggaggaggcggcgcggcgcggcgggcggaggcgccgtgccagatatgcggcgacgaggttggggtgggcttcgacggggagcccttcgtggcgtgcaacgagtgcgccttccccgtctgccgcgcctgctacgagtacgagcgccgcgagggctcgcaggcgtgcccgcagtgcaggacccgctacaagcgcctcaagggttgcccgcgggtggctggggacgaggaggaggacggcgtcgacgacctggagggcgagttcggcctgcaggacggcgccggccacgaggacgacccgcagtacgtcgccgagtccatgctgcgggcgcagatgagctacggccgcggcggcgacgcgcacccggacttcaaccccgtccccaacgtgccgctcctcaccaacggccagatggttgatgacatcccgccggagcagcacgcgctcgtgccgtcctacatgggcagcggcggcggcggcaagaggatccacccgctccccttcgcagattccaaccttccagtgcaaccgagatccatggacccgtccaaggatttggccgcctacggctacggcagcgtggcttggaaggaaaggatggagggctggaagcagaagcaggagcgcctgcagcatgtcaggagcgagggtggcggtgattgggatggcgacaatgcagatctgccactaatggatgaagctcggcagccattgtccagaaaagttccaatatcgtcaagccgaataaatccctacaggatgattatcgttatccgttcccaaagtggcttccaattgagagagagacttacctggaccgtttgtcgctaaggtttgacaaggaaggtcaaccctctcagcttgctccaattgacttctttgtcagtacggttgatcccacaaaggaacctcccttggtcacagcgaacactgtcctttccatcctttccgtggattatccggttgagaaggtctcctgctatgtttctgatgatggtgctgcaatgcttacgtttgaagcattgtctgaaacatctgaatttgcaaagaaatgggttcctttctccaaaaagtttaatattgagcctcgtgctcctgagtggtacttccaacagaagatagactacctgaaagacaaggttgccgcttcatttgttagggagaggagggcgatgaagagagaatatgaggaattcaaggtaaggatcaatgccttggttgcaaaagcccaaaaggtacccgaggaaggatggacaatgcaagatggaagcctctggcctggaaacaatgtacgcgatcatcctggaatgattcaggtattccttggccaaagtggtggtcgcgatgtggaaggaaatgagttgcctcgccttgtttatgtctcgagagaaaagaggccaggttataaccatcacaagaaggctggtgccatgaatgcactggtccgtgtctctgctgtcttatcaaatgctccatacctattgaacttggactgcgatcactacatcaacaatagcaaggccataaaagaggctatgtgtttcatgatggatcctttggtggggaagaaagtgtgctatgtacagttccctcagaggttcgatggtattgaccgtcatgatcgatatgctaacaggaacgtcgtcttttttgatatcaacatgaaaggtttggatggtattcaagggcccatctatgtgggtactggatgtgttttcagacggcaggcactatatggttatgatgctcctaaaacaaagaagccaccatcaagaacttgcaactgctggcccaagtggtgcctctcttgctgctgcagcaggaacaagaataaaaagaagactacgaaaccaaagacggagaagaagaaaagattatttttcaagaaagcagaaaacccatctcctgcatatgctttgggtgaaattgaggaaggcgctccagatattgagaaggctggaattgtaaatcaacagaaactagaaaagaaatttgggcagtcttctgtttttgttgcatcgacacttcttgagaatggtgggaccctgaagagtgcaagcccagcttctcttctaaaggaagctatacatgttatcagctgcggctatgaagacaagactgactggggaaaagaggtctatataccatatataacctgattcaaagacttttgactgttctatttaaataaagatataatgtgctaagtggatcgtggtttgttgcnn

SEQ ID NO: 34957 - DNA, 1649 bp, Zea Mays
acgggccggccgcggccgcctctcccacgctgcctataaaagccgccgcgaggctgagcagcattatcgcttcagctcggcgtcttcacaaacgccggcgcaaactctcgcccgagcccgacagatcttcaattccccattccgcccaccgatcgaccttcacgccagtctcggtctcttccgaaggcgtcgcgcgcggttgtttgagaggagaggaggaagatgagggagtgcatctccgtccacatcgggcaggccggcatccaagtcggcaacgcgtgctgggaactttactgcctcgagcacggcatccagcctgatggccaagtgcctggagataagaccgcgggacatcacgatgatgccttcagcaccttcttcagccagactggtgctgggaagcacgttccccgtgcaatcttcgttgatctagaacccactgtgatcgatgaggtgcgcactggcacgtaccgccagctcttccaccctgagcagctcatcagtggcaaggaggatgccgctaacaatttcgcccgtggccactacacaaggcttcctggtcttcaatgccgttggtggtggcactggctctggccttggttctctcctccttgagcgcctgtctgtggagtacggcaagaaatccaagctgggcttcactgtgtacccatctccccaggtgtcaacctctgttgtggagccttacaacagcgtgctctccactcactcactcctggagcacactgatgtctccatcctgctcgacaacgaggccatctatgacatctgcaggcgctccctcgacattgagaggcccaactactccaacttgaatcgccttgtgtctcaggtgatctcatcgctgactgcttctctgaggttcgatggtgccctcaatgtggatgtgaacgagttccagaccaacctggttccttacccgaggatccacttcatgctctcctcctacgcaccggtgatctcttctgcgaaggccttccacgagcagctgtctgtggcggagatcaccagcagcgcgttcgagccggcttccatgatggtcaagtgcgacccacggcacggcaagtacatggcttgctgcctgatgtaccgcggcgacgtggtgcccaaggacgtgaacgccgcggtggccaccatcaagacgaagcgcaccatccagttcgtggactggtgcccgacggggttcaagtgcggcatcaactaccaggcgccgacagtggtgccgggtgccgacctcgccaagcgcgcgttcgtgcactggtacgtcggcgagggcatggaggagggggagttctccgaggcacgcgaggacctggccgccctggagaaggactacgaggaggaggaatactgatctgcttgcatgaatctgtttggctgtcgagccaggttgtggtgttgaaaaacctttgtttgtgtcctggcccccctgggtaatgtttgggtgtttccttccatcatcacttgctgaactgctctagtatttgcatttgtaattgaagtctgtcgctttaagcactcttggttctaaagatctctgtgcttttggggggtgtttttgcattgccccagattccaataaactcaccaaattcgggtcgtgcgtagtaatttagttccccggaggcgac

SEQ ID NO: 34958 - DNA, 3803 bp, Zea Mays
tcccctcgcaggtcccggctggtcaggctcgcgcccgccagccccacccaaacctggggaactcttcgttcgtcctcttcttcccctgtcgcctttcccaaaaggccaaaaccctaaaccatacgcgcctaactccgcgtcctcccccccctccctcgaagcggccaaggcggcggcagcagtgccggcatgggcgcaatgtcggcttcgatttcgtcggtgaattggctagtcgaggatgacatccttctcaagaacgccgtcgagaattattgaacactgatggtagcagcagccagcgctctcatattaattatgttttgaagcaatgtcctgcactatgtagcagcgaatcagcagcctaatctaattgaaatggttgctttctctaattcacatactctaccatgttatcatcaaatatagattatttccgttgtccctatattttattctaagcatttttcctcaaaatatactatgaacaactcttgttatttaatctctaggtcagcatattgatctagcaatagttctaataagtgggtgttatggttggtattccatacaaacacagaagcaaaggagaagaggtccagcaggagataagtccagctataaaatagcttagttggttcaagtctgtttagatccggccagtttgttaggacctcccatttgttagggagtcggccaattagcaagaccttatcagattaggtcctagtcaggtccatttatatgaaacaatggatgaaataaagagattgatccctgcttccccgttttcccttaccttctccatcttcacgtctgcccctgtgttcctcgtcggccatcagcacggcacctcttcgtcgcccgtctctgaggccgcgaccggagatcttccacaagctggtgcttcgttagagtccttagccagaggagctgtatgtttttcccgtaaattcactcttcatgaaatacaggaccgctggaattcattgctatatgacccagatatctcaacacaagcagcttctcggatggctgagtatgagaatgaactttctacttccgatccagccaaggcacataaacttttcaactcaaaagcaaaggatttttcatttcagaaacggaaaatagacagtgtaaagaatctatattatgcgatgagaaaaagagtacgcaatgatccacgcaacagtggcgaccttggatttcttgtcccctgttcgtgtacggcaattggtagtgagtgtatctgtggaggcctacctaacaatattgaaccagagctgaattcagtaagccgctatgggcaagtaggttcaaggtacaccattggacattcatattctgaaatgaacgaacatgcttttcatacgaagcatactgaaagcatgacaagagatggggatggcaccagtaatgttgtgtatggctactcagatgtaggccaactatatgaacatcatgcgtacacagcgaataatcatgggaatagagaagggaacaatctttctctaaagagtatcacaaattttcaggattctatgcagtttcagcagttggacaacaatcaatgtggtaatggggtggtagactcaaaggctttggtgatccctaaccatttcagtggaagtgtgcaggaacctatgcctctccaaatgattggtcaacctgagggttctgaagcaccaggtggtgcaatcttgagtcttcagcgaagcgacaggctcgctcttgctgatgataaggatgtaaaatcagaagacagggaccctctcacatttgaagcgcatttagatggtgggatatctggtttagatcacgctactgagtttatggacttcccatatttcactaatagtgaagaccttgatatcctgaatagtgaaaatcttttgaattctccaagtgagggaatccaggaggatttagacgatactgcattagttgttcatggggttagatcaaccatgcaaaatctggttcatgctgatgaagccaatatgtcctgtgatcaaatagatcttggtgatgtgaaaaataatgtagatgcttctggtataatcttatttcctacttcattagtagtgccctgtcctggcctgtatgttgagtgcaaattgaacacagaagatactgaaattccttgcaacgacgatgtttctacaccaacagagtatcctcttgaatgctgtacttctacctttgggcagaaatctgagaatactatctattccgtctcccctgcaatcagccctccatcaattgctgaacagcccaacccatccacttcagaacaaaaagaagattcagtggctcatgacgaaggtggtgtcctaggagctaaaccatcagaaggtgctttaacagttggaggccttttgcctggtaacattgacacaaatgatgcaaacacatgcatgctagctttgccttcttttagcactgctggatttggtgaaggatcaccttgtagtttaggaccacacgagagctttgataactctcatggtttgactttgcaaaattcagttcaagctcctgatcagatgcaacacaactcacttgatggtaaaccagaattaggtgacaaggctgctctacagaactgtatgccatcaaatgcactgcccgatttggatattcagaacactattgcaaatgcgccaacaccagctcaagcagaagaatgccctgactatgaaaaagatgttccaaattactatgatctagaagctttgattcttgaccaggatcttatcccgtgggaccaagactccgattttatgcatcctgaagttaccggatttcctcacccggaaagcaggaaggcattgattagattggagcaaggtgctcggtcttgtatgaacagagctatcatgtcgcatggtgcctttgcagttatctatggattgcacttgagatgctacataaaggatcctgaggttactcttggaagagagacagaagacattaaagttgacattgatttaggaaaagaagggagggcaaataagatatctcgccgacaggcggttatcaagatggatgaatctgggtattttcatattaagaacactggaaaatgtccaatctttgttaatagcaaggaaataccaagctgcaaacgcatcaacctaagctcagactcattaatcgagataaaggacatgaggtttattttccatgtaaaccaagaggctgtgaggcagtacattgatcgtgacctgaagccagaacgctaatttcccctggctttccagtcagcagcagcctgtgagtgactgcctcattaacagcaatagaagtagcatagcagtaaatttgagtaagcattgctcgtttaggatgttccttcatatgatgttaacaagttaggttcacttggctccggtctgtaaatggttgtagtttgttgcgttttctgtctgtttggcgggcataaatcatgcatataaccagcgcatttgcttccagtttgtacctacactcccaggaatgatttcatttgtaatactggcaccctagattgtggtgactgccgccaagagcaagaggcaaccaatgcaataaagtgcggaaaagaatcaatagaagggtagattctagggtagaacaggaggagggtgcacttgtgcaagaaaccattcggttcttgcgacgctataagcataaactttattggtttttatttatataccctgatgatcttgaagcacgaactctgaatcagctctcggggcttgacggtggtggcctggtgggttttacacatttgcagatgttggaaaagcaatgcgctg

SEQ ID NO: 34959 - DNA, 1803 bp, Zea Mays
gtaagactctccggctttgaaggaggagacaaaggccgaaggtttcactcctctggctgctccttgtgtgtgtgtgtccactaatgcgttcagcattgcaactgctgctgccaaatgctgagcattcgttgccaacatagatggtcactctgataaaactgtcaccttcaatgggaggatgctcaggttttgagaccgaacctatatgtaccaccaaaacaatatcctaattgcaaggaaggtgaccttcctctcatcatcgcgattgactagcaaccaatggccctgataggtgttatgcaagtgtagggcgacatcactaatgctcggacaacggatgtggcatttcgatggatgcaaagcagacttggttgtttgcgatggaggcttcggatagtaagatatcatatgagtgcaagagaactactctcaccattaactataacaaattttgtcaccaaaatttggtggctggtggatctacttaagaatcaaaagtcagacaaggtggacatcaccatccaaccggaggagcaggaagccatgaatgatgttctagcagccagccatgaccgcgtccacgtcatcaactttgacatcaagcaggggctacagtggccgggcctcctccagaaaaagaggaattgaagcagtatctgactcgaacatttttgtagaaaacttggtagaaaaagaggaattcctgcatacattttcgaaggaatgtgaatatatcagaactgcagtgacaaatggtagtgccattaagcatgatggctcatatgaatcagatcctgcagttgagattgttcgagttgaactccaaggtgctgctgcatttcttttattctcgtctggttccacgcctatatatattggagaacatggatgggaaatgcttctggtagtaaaaaaggcaacacaagaggctggttcaaaatttgaactgctaggttttgcatctgtgcataacttctatcattatcctgagagtattcgcttacgaatcagccagatacttgtgttgccaccttatcagggtgaaggccatggtcttggtcttcttgaagcaatcaattatattgcacagtctgagaacatttacgatgttacaatagaaagcccttctgattacctgcagtatgtgagatcatccattgactgcctctgtttgctcatgtttgatccgatcaaacctgcacttggtgctattgtctcgtctctgaaggagaccaacctgtcaaaaagggcccaaagtttgagaatggttccaccggttgacctgatggagactcagccagaggatctcaggacgcaggagcaacagctcaatgagctcgtggacatccaaatcgaggagattgatggggtcgccaagaacgtcacttcacgtggcaaggataagatggcagagctggcggttcaatgaatctgggtgaggttcctacttcaaacgatgttaaaatgttgtcgtagcttatctggtgaggtctcttttacgagttggcttcttggtagaaagggaatgtcacggcataggcactgagtagattgtcacgacagattattatatacttcaattctggaatatttgatggaaatgctattttagattgcttggtaagtgggaaccgcctcaaatcacagaagtagaagcagcttccgattcagccggaaccatttcttcaaaaatgttctattatagaataaacaaggcttaggagatagaaaacattatttacaatataaatatgtaatattattataaatgtaccgactcaaataaaatgaactggtattgaa

SEQ ID NO: 34960 - DNA, 736 bp, Zea Mays
cagagccagtctctactcgcctctctctcgcgcaagccacagtagagcaaccaaccataccaccggcccgtgtcgatctctggcctctctcgtgcaaggaattaagcaggcaagaggccaaccttcttccagcatggccaaggcgagcagcaggctgctcttctcgctctcgctcgtcgtcctgctgctcctcgtggagctgttgtgtgcagaccactacttctccccatggacaggctgacgccatcgactgcggcgcgagctgctcgtaccggtgcagcaagtcgggacggcccaagatgtgcctgagggcgtgcggcacctgctgccagcgctgcggctgcgtcccgccgggcacctccggcaacgaggacgtctgcccctgctacgccaacatgaagacccacgacggccagcacaagtgcccgtgatccatccaccgtggttcccagcatcagcagctttgccaaaaagacatgatacctacatatatataagagtacctagctgctgctgctctactaccttgttggttcattatattgtgcgcgtgcatgcatgaataaataaatgaacatattagggcatgtacaacccagatacggctgcacggtactccaagtacaagatacaactaaaacacaacacaatacagtggtcatgtctaaaacatgtgtcttacgatattcattgtaccaatcagagtattcaataaattaaagtgaccaatcagata

SEQ ID NO: 34961 - DNA, 2153 bp, Zea Mays
caggcagcggccctgtgggggttaaagaagggtttttggcatctagccgtccctttctgctgcgaacttgcgttgcgaccgtgcattccgttcctctcctctctcggctctcggcgagcgagatgcagagcctaaccgtagcaagagcgcttcctcccgccgtggccacagctcggcggcggccgcgcgcgtcctcttctagcagggaagcggttttacaatgttggaagtacgaattaagtcaagaccaatatctgggaggatccctaaggataggttcgtctcaaggaagtttggacatacatcgctcaacaaatttgctcagaccagctgctgcatctgtttcagttgaacaagatgaagtcaatacttatcttccaaaaggtgatatgtggtctgtgcacaagtttggtggaacctgtatgggaacatcccaaagaatccagagtgttgcaaatatagttcttggtgattcttctgagaggaagctgatcattgtttctgcaatgtctaaagtaaccgacatgatgtacaaccttgtacagaaggctcagtcaagggatgattcatatacaatagcattggaagaagtttttgagaagcatatggttgctgcaaaggatcttattgatggagaagatcttgcaagattcttgtctcagttgcactcagacgtcagcaacttgcgagccatgctccgtgctatttatatagctgggcatgcgacagagtctttctctgactttgttgttggacatggagagttgtggtctgcgcaaatgctatcttatgcaataaagaagtcatactttggggcaaatgttttgcatccgcgcaccattatacctgtgatgaaagacaacattcccattgttattaggaacatgttcaatctctctgcctctggaacaatgatttgcaagcagccggccaatgaaaatggtgatttagatgcatgtgtcaaatcatttgctactatcgataatttagcacttgttaatgttgaaggaactggaatggctggcgttccaggtacagcaagtgctatatttagtactgttaaagatgttggagctaatgttatcatgatatctcaggctagcagtgaacattcagtatgctttgctgttccagaaaaggaagttgctgcagtttctgctaggttacatgataggtttcatgaggcattagcagcagggaggttgtctaaggttgaagttattaatggttgcagcattcttgctgctgttggtctgaggatggccagcactcctggagttagtgcaatactttttgatgcattagcaaaggcaaacattaatgttcgagcaatagctcaaggttgcagtgaatacaatatcactgttgtattgaagcaagaagattgtgtaagggctctgagagctgctcactcaaggttcttcctctccaaaacgacacttgcagttggcatcattggacctggtttaattggtagaacactccttaaccagctcaaggatcaggttgctgctctcaaggaaaatatgaacattgatctgcgtgtcattggaataactggctcaagtacaatgcttttgagcgacacgggaatagacttaacccagtggaaacaacttctaaaaaaggaagcagaaccagctgatattgatagttttgttcatcatttatccgataatcacgtatttccaaacaaagttttggtggactgcacagcagatacaagtgttgcatcccactattataattggttaaagaagggtattcatgtcatcacaccaaataagaaagcaaattctgggccacttgatcagtacctgaaattgcggactctgcaacgtgcctcgtacactcattacttttatgaagcaactgttggtgctggcctcccaatcattagtaccttgcgaggtcttctggagacgggtgacaagatactgcgtattgagggcattttcagtggaactttgagttatatatttaataatttcgaaggaacaagggcattcagtgatgtcgttgctgaagcaaaagaggcgggatacactgaacctgacccaagagatgatctatctggaactgatgttgcccgaaagcaagagtccttacagaacatataaaactaaaaggttgaggatatgaccagagataat

SEQ ID NO: 34962 - DNA, 3621 bp, Zea Mays
cacaacaggacactgtaaaacagtagaaggtttggtacaagtggagtggcccatatgttgtgcggaggagcactggtgaagcctaagaacccttatgtcgatgggcgtggtctcaagggaggtgttgtcagcatgcgagaggctctgcttcatttgcccgtcactgcggacgaggtcccgccatccggtcaagcgctacaagaaattgcttgcagaaatcttccctcggacacaggatgaagaaccaaatgatcgcaagatagggaaactgtgcgaatatatttcaaggaatcctatgcgtgttccaaagattacattttacttagagcaaaagtgctacaaggaattaagggctgagcgctatggttcagtgaaagttgttattgcaatctatcgaaaggtgatatgttcttgtcaggagcaattgccactttttgccaacagcttgctaacaattgtagagacattattggagcaaaatagacaggatgacttgcggaaattggcatgtcaaacactttttgactttataaataatcaggttgacagtacttacatgttcaatttagaaaaccagattcctaaactatgtcatctggcccaagagatgggtgaaaaggagaagatatgcattcttcatgcagctgggctacaagctctttcatctatgatttggtttatgggtgagcattcccatatgtctgcagagcttgataatgttgtttctgcagttctggaaaattatgagagcccatatgcaaatgctgataatgatgccgctattgaggatagacgaattcagtgggtggatgaagtgctcaaagctgaaggtcatgaacctcctgctgttaccattttgacaagggttccttcatggaaagttattagaactgttcacggtgaattaagtttgacaatagaagaatcaacaagtccaaatttttggtcagggatttgtctacataaccttgctagaatatccagggaagcaacaacagtgcgacgagttctggaagttatatttcgttattttgataataacaatctgtggtcaccttctaaaggatttgcactgtgtgtcctactggatatgcagattgtcatggagaaatctggacagaatgctcatatattgttgtctatgttagtcaagcatcttgaacacaagaatgtattgaaacaaccagatatgaatctagatatcattgaagttacttcacgccttgctgggcactccaaagctcagtcttctacagcactaatggcttcaataagtgatatggtcaggcatatgggtaaaagcatgcaatccttggccagcgatgcaggtcctggagacaacatggtcaaatggaatagcagatatgggaaagctgtagatgaatgtcttgttcaattgtctagaaaggtcggtgatgctggacctatccttgatacattagctgtagtgctggaaaacatttcaagttctatgattgttgcacggtctactatctttgcagcatatcgtactgctcaaatagttgcatcattgccaaacttgtcacatcagagcaaagcatttcctgaggcattgtttcaccaactgcttttagcaatggtctatccggactgtgggacacatttaggagcacatcggattttctctgttgttcttgttccctctgctgtcgctccgtgctcattttcagacacttcacggacaaggaagattgatctccgaaggacattatctagaacaacatcagtgttttcatcttctgctgctttgtttgggaaacttaaaagagacatgctttcatttcgtgaaagtccgctccatgataatacaaagctactacccatcagtgaggatgcagatgagatcagcgcaaatgatgcaaaactattcaagtcacagactattcaaaggatggctagtacaaaagatatttctcttccctcttccacagatgcaagtactttgagtgaacaaactccaaatcaggaaaaggatgctgtcacccttatgctcagtgttcgtcaggcaaatcttcttctttcctcgttatggactcaggcactgtcacctgaaaatgttccacggaattatgaagcaatttctcatacttacagcttgatgctattgttttctagagccaagggctcaggtgccgacgttttggttggtagctttcagcttgctttttcattaagaagtgtttcgttacaagcaggttttcttccaccttcacgcaggcgctctctttttactttggcaacttcaatgcttgtgtttttctcgaaagctttcaacgttccagcgctcattccagttgtgaagcatgtgttgacagaaagtacagttgatccatttctttgtttaatagaagactgtagattgcaggctcttgatagtgctgctcagtcttgcaaactctatggttcaaaagaagatgacgatcaagctctgaaatcactctcgaacattgacatgaatgaacatcagtcaaaagaaacatcagtgtctcttatacttgatagcttggaagatctgtcagagtcagaattgtctactattagaaaacagctgattgaggaattttcagcagatgacatttgtctgggatctcattttactgaaacaccttcgaaatctgcagcacaaaatggaaaactgcaccacaaatctatggaggttattccattcggatttgtttttgaagatgatactctcgttgaagcatctgacagcttagtagaacctcacttgcgacatctgccatgtaacagcgttcttgatgttgaccggcttcttaattcggttttggaaacatctcagcatgttggaaggatgtcagtttcaacagaccaggatttgcctttcaaggaggtagccaaccaatgtgaagcacttctgattgggaagcagcaaaagctatctatctgcatgagtgttcgtgaaaaaaaggatggtgaatcatccatcgagaagtcatctcagcaggatcctcaagcatatacgtttctctgcacagctgatgaacaatggcacctcaattcctgtaagctgccagtgctgtgtccctatgaccggttccttgcaacgtctgggtgctaagatgatctcttctggtacgcggacctttataactatgaatgtgttcagtggactcctaaaaattggcggttccagctcatgcatgccaaaataggtgccctacaaactgatgtccgtcgggccaacccagatgagcccatgtgtgcgtgccagatggcatcatttccatcatatgtaaattgttccctcgtttgtaaaggctagttgagagctaaaatatcagagggggttggaggagttaaaatccatttcttattcaaaattgaataaggagattttagcccctttaacccctccggttttgtggctctcaaactaaccttaaatggttcgtctaccatgggaaatacatggttgattctggcatttttgaggccggagcgaaagttactattgaagccccttctatatccatgagtgtgtatatatgtctatatgtataatatatatacttttatatggaaacttataaacacataattattgatctcaaatagtttttcagtaaatttagttttaaa

SEQ ID NO: 34963 - DNA, 4549 bp, Zea Mays
ttaaatttgagaattggtaccgttcggtttttaccggatttcggtgattggttttcggcgagaatctatgctaaaacgagattgaaaaccctgctatgctcccgagtcactcccgactcccaactcccgaccggctcgcgagctatctcggggacacaaccgactgcctcgcgcctcttcctcatccgtcgtcaccggttgcttcccaccgccgccttgcgcctccatgctctcagcaatgatgggaatagaaggcattgcagccacagtcaccgaggaccctgaaccctcaattcctccaggatttggaccttttgctgcctcggcatcatggggaatccaaaacgatgttaaacctgctgatgatcattctagttctgttttagcattacagagcatcgacgacgatgtggaaattttggaatatctatccagttcagtggatcaccagagtgacacaggttgctgtatttctgggagcaatacctgtaggaaatcactgcgtaatagacctccaatagattatagccgctttgatcagattgcagatgaagattctgatgctgaagtagcagacaagggtgtaaatgcagtgaaacacagacaacaattccctaaaggagtacttcgaggatgtccagaatgtgccaattgtcaaaaggttattgcaagatggaatccatctggtgcacgtaggcctgttcttgatgaggctcctgtttactatcctaccgaggaggaatttcaggacacattaaaatacattgagattatccgcccaacagcagaaccatatggaatatgccgtattgttccaccagcttcatggaagcctccatgccttcttaaagagaaaaacatttgggagtgctcaaaattttctactcgggtacagaaggttgacaagctccaaaatcgtaaatcgcccaagaagagcagaagaggtggaatgatgaagaagcgtagaaagatttcggagactgaagaaaacaatcaccatcaaattggaatgcagcaaaaccaagagagatttggatttgaaccaggaccagagttcacactacagatgtttcagaagtatgcagatgacttcagtgatcagtattttatgaaagataaatgcagagattcaccaccatcagtggaagatattgaaggcgagtattggcgcatagttgaaagaccgacagaggagatagaggtaatatatggtgccgatttggagactggaacttttggcagtgggtttccaaagttatgtcctgaaatgaaatctgatgtggaggataaatatgcacaatctgggtggaatctaaataacctgcctagactacaaggttcggttctttcttttgaaggcggtgacatttctggtgttttagtgccttggctttatgtcggcatgtgtttttcatctttctgctggcatgttgaagatcatcatttgtactcactgaactacatgcattggggtgctccaaagatgtggtatggagttccagggaaggatgctgtgaatttggaggctgcaatgaggaaacatcttcctgagttatttgaggagcaacctgatttgcttcacaacttagttactcagttctcaccatcattgcttaaatctgaaggagtaccagtctaccgatgtgttcagcatgagggagagtttgtcctgacgttcccacgggcataccatgctggttttaattgtggcttcaattgtgcagaagctgttaatgtggcacccattgattggttgccggttggacaaaatgctgttgatctttatcgtgaacaagctcggaaaataactatctcccatgataagctgttgcttggggctgcaagagaagcaataagagctcagtgggacatcctatttctcaagaggaattcttctgttaacttgaggtggaaaagcatatgtggacctgatagcacaatatgcaagtcactgaaggcacgaattgaaatggagttggtacaaagacaaaatatatcctctccatgtcaatctaggaaaatggatagtgagtttgattctactgatagggaatgtgcattgtgttactatgatctgcatctttcagcttcaggctgtccatgctccccagagaaatatgcttgcctggtacatgcaaagcagctttgttcatgcgattgggacaaaagggggaaagctaagtgccattcacagatggggtgtctctgatcttggattaagtttgagctcctgtgtcaaacgggaaaaggtccaagattccaagactgttcgcagattaactgatggcccaagacggtcctacatgtcacaggcatcaacagtatcattgattccttcttctgttagcactgaacagaaaaagaatgaagataagacactggatttaggttgcccaggtatgaatttaccaaaaataagtccggaggcaaataatctgcgtccttcgacagaacagataaaatcagaaaatctctcacagctaaaggaaccatgtgtgaagaatgaattatcttgtccgaccagcaatggtaccagccaagaacataaaggagggattggaggccacaaacttgcagcagcaagcatgatggttctttctggtcaatcatttcctgcaaatgctggtgaatcagtgagaaatgcgcatgtcttggcagtatttaaagagggtagagactgtacatcttcacttacacttagggagtatcataacaggccagtgtcaatgattgataatggagctaacatgaagctggatctggaaaacatagacaattctcatatgttgatgtcatcaccagacttcaatgcaactgtatgtcattcttacaaggatcaaacattcttaacactggaaactaatacctctgtgatgactgagaaagatagcagtcaggcccgtaatgcaagccagcagtttgtcagtactgctttaagaacacaaaatgtgtctcaggaaccattgtgtaccgcgattgctccaaagcaactcatagatcctcaagttcagaaaaaatcatatggtgtttttggttctggcagtgcccatcttgggcatctgactgttggtaatcagcaactaaatgagagatggcatcaaagacaatctgattctttatccagtgtggaagttagagctaggggtcattcagctatgatagtgcagcctgctctggaaaatcacagcagaaatggagttgcacagaagggtcctcgcatagctaatgttgtacatagattcaagtgctctgttgaacctatagaaattggtgctgtgttatctgggaagttgtggtcctcaagtcaagcaatcttcccaaaagggtttaagagcagagtaaaatacttcagtgttgtagatccagtacaaatgacatactacatatctgaaatattggacgctggacagcagggaccactttttatggtgactgtagaaaactgtcctggtgaaattttcataaacatctctcctaccaagtgctggaacatggttcgtgaaaggctcaatatggaaataaggaggcagctcaatatgggaagagctaaccttcctacactacagcctccaggatcagttgatggccatgaaatgtttgggttgttaacaccagcaatagttcaggcaattgaggcccgggacagagattatatctgtacagagtactggcgatcaaggccccatgcaacaattgagaatcgagacaatcagaatatgtcacctcaggatccaccccttgttgcactgagggggctcttccagcgggctaattgtgatgaactgcgagcactacgcagtttgctgatgagcaatagaattctgggcgacaattctaggcagcaggcttgccaaatccttgatgaggagattgcgaagcaatggcactgaccagcgtaaatacaggatgttgtactaaccaattgtttggcatgattttgttttgacgggataaatcagttttaaggcttgcttcttccgttgcccttgtgcccattcttttcattcttgtgaccatacccaattctttattgcaagtggtgtcaacaagcatgaggctacagctgcatcacctgcaaggaagtcaaaattgtggctgattgttatgttacccaatgacaagggtgagtaacttattataagatgtagctgggtcatcatattcctttgttcttgaaatctgttaaccatgcatgcttgtctgatgtaaaccacccttagattccgggtactcggtcattattgggattattctagtagttgtattctttgtggagcaaataacgatttatatgtattgtatgcatggtgtaactataactaactctttcatataaactgtatcagcattccatgcatgtgccaacttccttttaacaaacaatatacttaattctcctgaaggactgatatgtatcattatttgttctaccatgtgaggactagtcgatgatcagtgacaactttggctgcactgcagttttatgtaatttgcaaagttaaatggctatttttaactgcaattagtagaacaaatttccttgtagttt

SEQ ID NO: 34964 - DNA, 3067 bp, Zea Mays
ccttctctgtctcaccagtcaccagccgccgccgccgccgccgcctactaggcatcatcgccgtctacggcggctcagccgctgcttcttgggcatctcagtcaaggccgccctccggccgcccttcactccaggtcgggggccgcagcctggggggcgcgcgccctcgaccccatacgggcgccggaatctagtggatgcgtcgcagccgtcgccacagactccttctcgccgctgccgcgccatcattcatggcgaggcatcgccgggcggtaccagaatcataatccatgccattcaacatcccacactgcaaatcacaagctcctgtatcctacgccgtagcagctgtttccagcatccgcttctcctcttcctcctccctgccggcgctggttccgccgcctccgcgcctgcacgaggagaacccgttcgccgcgctcctcgcctcggaccccccaccgccggagcctctccgccaggtgctcgccacgggcgacgtccactccgcgctccgcggcctcccgggccttgcgcaccagctgttccggtgggcggagaccaccccgtgtggcttcccccgctccgcctccgcgttcgccgccgtcctcgtcccgctcgcccgagccaaccacatccgggtcgcctatccagtctccctccgcgccctgcacctcggcctcctcctccccctcgtgtccctcctgttatccggccccctcgctcccgcccctctgtcactattgaacctcctcttaagcttgtccaccaaatactccaaggaatgcaaagcccgtgacgccacgcccgacacatgttcgacgttgtgcctgtccgccttccgcgagatggcaagccacggggtggcccctgacgttaaagactgcaacaaggtgctccgtgtattgcgtgatgcggccaggtgggacgacatgtctgctgtgcatgcggagatgctccagctcgggattgagccaagtattgtcacatacaatactttgctggattctttctcgaaggagggaaggaaggacaagattgacatgctgctgaaggagatggaggcccgggggagcagttgcttgccgaacgatgttacttataatgtggtgattgctgggttggctaggaaaggttatctcgaggaggccgcggagctggttgaggaaatgcggctgtccaagaaggcttcgtccttcacttataacccacttatcactgggttgcttgcaaggggctttgtcaaaaaggttgatgatttgcagctggagatggagaatgagggcattatgcctacagtagtgacgtacaatgcaatgatccatggactgcttcaaagtgggcagatagaggctgcacaggcgaagtttgtggaaatgagggcgatgggcttgctaccagatgtgatcacctacaattctttgctaaatgggtattgtaaggcaggtaatcagaaagaggctcttttgttgtttggcgatttgaggcgtgcagggttagcaccaacagttttgacatataacattcttatagatggttattgtagattaggtgatttagaggaagccaggagattgaaagaggaaatggtagagcagggttgtttgcctgatgtttatacctatacaattctcatgaagggttcacataatgtgtgtagccttgctatgacaagagagttctttgatgagatgctgagcaaaggtttgcggccggattgctttgcctataatacaaggatttgtgcggagataaccctaggggatatttccaaatctttccagttgagagaggtaataatgttggaaggcatatcttccgatacagtgacatacaatatccttattgatggactgtgcaagactggtaacctgaaagatgccgaagagctgatgatgcagatgatcagtaatggtttacagcctgactgtatcacatacacctgcttgattcatgcacactgtgaaaggggattcctaagagaagcaagaaaattttttaatgacatgatctcagatggtttgccaccctcagctgtgacctacactgttattattcatgcatattgtagaagaggaaacctttattcagcatatggttggtttcgaaagatgctggaggaaggagttgaacctaatgaaataacatataatgtcctcatacatgcattatgcaggatgggcagaactcaactggcttatcgtcatttttatgagatgctagaaaggggattggtgccaaataaatacacatatactttgttgatagatgggaaactgtgaagagggcaactgggaagatgcgatgagattctattttgaaatgcatcagaacggtattcatccagattatgtaacacgccagagatgatagatggagttcatggaccattcgtttcaaaatggaaagaaaaagagagtttgaaacaatattctctgattaagccgctgggtggtttctaaacaaatagttgagcacaaacaggccttcctcttgctgctcagagatggtagaggaagtttgggccttgggggcaattccatccaaaaagaagaaaaaagaaaagcaagacctttttagaccatgttctcttagttaatcagcttggtgcttcccaaatgaatagttgatcacaatcaggtcttccccccttgctgcttaaaccttgccatgattcttttcttggcatcatagccatggatatatgtgtttagtgaaaactgggtggtaggcatctgctctgtttctagaaacctcacttgatacaattctgacccctttgttatttccttttgatgaggtatactggaaacctgttggccttcgattccttacccaactagctctgttagtaaaatggccataggccattgcgactgagctttcttcaattatttgtaggatttctcttggtaagaacataccaaggtttttttttgtaactaataattcttgtatcatcatcaattttgccataaacataagccatagtatattgacttgtcagaaatgtaactttattagtattgattgaatcatttagcgagaatattattcatttaaaaaa

SEQ ID NO: 34965 - DNA, 2784 bp, Zea Mays
atggcggcggcggcgtacttgggcggccgcggccagggagcagacggcgggtggttcgtgccaggcgccggcgacgggtgggcgcccccgtgggggaggcgcggtgggggaggagcggcggcggcggcagctgcagcagcaggcgagagggagacgctggcggtggtgatggcgaggagggcgcctccgccgtcggcgatccgccgggacgcggtgcgcgttgcggaggcggccgccggcgaggtgctgctgcgcgtccaccccaccagggaggcggagcgccgccgccaggacgtcatcgcctacctcacacgactcatcggatcctccctcggctgcgaggtctttgcgtttgggtcagtgccgctgaggacgtatctccccgacggcgacgttgatataactgtactggggaacacatggttaaacagtacactcattgacgatgttcgcagcatgctccagtcggaacaggaaaactgtgacgctgagttgaaactaacaggcctgcacttcatcgacgctgaggttaagctcataaaatgtgtgattgagaatattatcgtggatgtctctttcaaccagattggcggtgtgtccacgttctgcttccttgagctggttgaccgtcaggttgggaaaaaccatttgttcaaaaggagcattatgttaaccaaggcttggtgctaccacgaaagtcgcatattaggagcccatcatggactgatatctacttatgccttggaaacacttgttctttacatattcaatatgttccacaagtctctgcatggacctctggaggtcctttataagtttttggaatattttagcaagtttgactgggatcgatatggcattagcttaaatggtcctgttgatttgtcatcattgccgagcttaactgtggaacccacagaagtacaaggtgagttattgcttggcaaggacttccatcaaggctctctggatagactcgttgtaattccaaatgagtttgacggatgcgacacacaatttcgccagaagtttttaaatatagtcgatccactcaaggcgaataataatctcggcagaagtgtcagcaaagcaaacttttatcgtattcggagtgctttctcattcggagcacaaaagcttggtcaaattctcttgttaccatccgagtacatttgtgatgaaatttacggatttttctcaaatacactgaagagacacggaaagggtgaaagactagacattgacgctagtagtgcattccaacccttgcttggtcccgagagtacacttagtgaagatggatcgatgtttaaatcttcttgcataaatgagggtgaaaacggaagttcatgtcattcatcagaactgcctgacatgggctcgagtgtgacagatgtgcataagaattcaggtaagtatttgcctggtctttttcaggatcttccttggaataaaatctggttcatggaatatgcatctgatttgaaagaaaatccacaaacttcagcaagttcaaggagccactcatccttttctcaagataatggtaatggcaacagtaaagagtgcttcgagaattatgcagcagaggaaggtttacaccagatcagtagattaaatgtgccgcaacagatttatgcagggcatccatcgcatagattggctaactcgactagtgcaaatatcttggatttctccagttcttgttttgttgatgagtcagattggactgctccccttgcaggaaaaaagctactcccacccttgttgctgtcaaatatgctggatctctcaggtgatctggagttgtacttgggatgccttcgcaaagttcagtaccacctggagtcattgtttgatgaactcctacaggctgttgaagaagcatgttttgctgatgtgctagatgaggattccttcaatatgccagacatgatcttgaagttaaaaactagcactagatcctcaagcctgccattagattcatctactgatagcgagagaaggaaattatctcctgtgtattgttctcatagcataggagatgattcacaacaatcacatggcgaggcacaagtggatatgttttggcagcagaacgtgccattgtcccccaatggatcaacatttccttcatctccttcaaccaattcagataattatcctgtttcttggttttgtttctctcctaagacgcatggaaccggcacatacattcccaatgtgagttatcaaacatacagggagcgtatcatgcttgaaagagataccatacgagcaagaaaacaaagacagaggttacctggtcgccggtattactcagccgagcaaggattttccggttcacaaaccgaagaagacaccatagctcaaagtgcaacgaaccaatcgcccaagaagcaaaacagtgtgcagcagagtggctattcaggcaagagcacagttccggatgcagatttcgtttgtttcagggagcatgtggcaacagaaggtggaaccaaacagctggcagtaggaagagagacaatgcctccatcatcgtcatcagggatagcacttgctcaaaacggccaaggaaatcgtatctgcgagccttcctcacccgccacagcagatttgttacatgcggcagaaagtttggagtttggatccttggggcctttctcgttgggacttgtctcaacttcaacacagtttgaggaagcattcccagcgctccccactagaaagagagctgaaggagccgagaaccactaaggctgcagtttaggatcccggatatta

SEQ ID NO: 34966 - DNA, 2681 bp, Zea Mays
agtttatatgcttttaagcatataatttgaacagtacaagctcagccttataggaaggactctaataagtggggagcaccaatggatttctgatgacatccccttcagtttctctcagataagcgatgaagataacctaggtttatgtcagggttatacttggtggcaacatcagttcctaagtggaataaagactattgctgtagtacctatgccggcgtttggtgtggcacagttcggttccatgcaaaaggtttctgaaagcttgcagtttctggatcaagttaaaggtgcaacatttctgatggaaagtctttcatggtctccttcaacaaaagatgctcagaaagacgctttcatgtacaatccacaatttcaactcgattcttcaaccactagagagggtcttccacgcactaaggctgaaccagaaaactcaaggttggagaatgcaatatccatagattctctgaagaactttgcaattacttcaaatggtctgaatcctcacgtagtggccatgccagtgaactccaaatcgataagtactgttaaattaattcaaagtgacagcaatttgcggtacaataatatttcagagaatgctcaacaattcaaatccgccaaacaacctgattctagttgggcaagtgcagctacatgtttttcaaatttgaccaatcttcaaagaatagagcgcgggctgtcatgcacacctaacaaactacgacattgccttcaaagtgaaaaatcctcaggcttcctggattcgtactcatcaatagtttctacagatgctgagctgaaatgcactttgtttgacaatgccactccatttgttcagagtgatgtgatccaagaggttggtactagtggatctactcgtgcttgtgggctacatgaattgccaaatgaaatatgggcagaaattgcctcaggggaaatgaaaccagtcataaaagaagtcaacgaaaataatggctttctcgaaagcacagcatttgatccagtcatgaatgattggtggggtgacactgccctactagcaggaaacacttcacatctgagtgctactaccatgaactctgtttcaggacaggcaagtagtgaacaattatcaattgaagatagagggctgttttcggaatctgtctttgaggagctgcttggctttgatggtaatgtcggcccagttatggatagcaccgaaccattagctggttttgtctccggttgtcatttgccgaggtacaaccttcaaggttcactttcagtgtgcaaggcacaagtaccgccattgatactcccttccggtagctgtacatccgaaaatgttgtgatgggatcatcaaaagaagcccccgtgtcactgcagaatttatctatggatgattgtggcagtttgaacaccgcaagttccaagatcagccaggtaaagaagcctgaaggagagaaggttgttaagaaaagagctaggccaggtgaaagtacacggccaagaccaaaggaccggcagcagatacaagagcgtgtaaaggagttacgtgagatagttccaaatagtgcaaagtgtagcattgatgctttgttggatcgaacaatcaagcatatgctctttctacaaagtgtgacaaagtatgcagaaaagattaagcaagccgatgaacctaatatgataagcaaggacaatggttctgtattgaatgataactcacatggagttgtcttgaaagacaatccaagtggtggaagcaatggaggtgcgacatgggcctatgaggttgcagggcagactatggtttgtccaataattgttgaggatcttgcaccgcctggtcagatgcttgttgagatgctatgtgaggaacgcggattttttctagagatagctgacaccatacggggatttggacttacaatcttgaagggattgatggaacttcgtgatggaaaaataatggctcgatttcttgttgaggtaaagaaactcttgttttgggacgccttttcttttatggtgcgcttctcaaatgaaagtcgtgtgttgtgattttacaggcaaacaagaacgtgacgaggatggatatatttctatcacttgttcagttactgcagcagaacagccgcaatcgatcttcggatcagctagttaaggtcatgaacaatggcattccatcttttgtggatcaccaacaatctcctgcatcaattccggtttggccttgctgagagatagtaattgccacaaacaattcttgtaggccatatttttcaacgagcgttaatgggtacggtttggagttctgattagtacttggtggtgcccgccaactgttgatagaaacgacaggtgttaaggatgtagcaaacgcacattgcggtgtcccgtgtccgaagaaaattcagttagaagatgcacagattctcatgtaacaggtttaggaacattggtgttgtcgtttgtaatttggacactggtgtagtggtgtgaggtagcctatgttgttgtgaagttggtgtgcagtcagtagcaaaattgcctgtgttgctacggtaaataacatttgaaaattaagtgtctgtgttctctttttgatctgctctatctcccgctctccatgggtaaccctatagttggattgccggtctgccatctgtgctcagcacaaactgaatgtccc

SEQ ID NO: 34967 - DNA, 774 bp, Zea Mays
cccaaacgcaagttgcccaaggaccaaagcagctgcccaaggagaaagtcctggcgcaccgccgcgcggcctccgtactagtgagcgtccgcgtccatggccaaaggcaggttcaagcacaagcccacgggggagcgcagcttctccagccccgaggatatcgcggctggtacttcagcaggccgtccaaagaccttcgccaagcatgatgagaaggatgtctacagtagaaggggggaaccagaagaagaatcagaagattttatgaaaccaaaacacaagggtatagaaggtctgatcgagattgagaatccaaacctggtgaaaacaaagaatgtaaaggccaaggacattgatattgggaagccaactgatatgtccaggcgtgaaagagaggatcttgacaaacagaaatctcatgagcgccatatgaagcttcaagagcaaggaaaaacagaacaggctaggaaagatttagagcgtcttactataatccgtcaacaaagggcagaagctacaaagaagcgagaggaggaaaaggctgccaaagaagagaggaaggctaataaagctctcaagtgacctgcacacgatagcgttttgggagatgtgtagctagtagtggtggtgacgactcatcgatgagcgatggcaagttggcaactgtcagctttgtgcgcggtgtagtagccggagcagtagcaactttgttgaaaaatacattcatgctgtggcgtttttcttattcaatcgtaggtccttatactgctacag

SEQ ID NO: 34968 - DNA, 3788 bp, Zea Mays
atgttatccgttttctatcacattaccgtcgtaattatcatatccctctccccagttatccaagcattatgcagggacagaaactataaaacttctagcaatcttgttgacccaaacgatttgccttgtttcagttcttgatcttcttctttgccctcagctgaaaatgggagaagcaagggaaacattaggaaatcacaccaatcagcaaaacaattaaacccttgattgtgattttcagctgtgcaaatcttaattagatatctcagataatccatcaactagacaaacatacaaagtgaaccgaacaactctcaaacaatatgatatttcctaggcaactctcaaaggaaaaagtcacatagcaaatgacataatttagtacatgtaatgaattctgatgatgtatgccaagtttatcactagcgtacatgtctaaagctgactggcatccgcttgcttatacaaatccaaaatatgacattactacagtaaggcatcaccattcacaaacaagaaaatagtacctcgttgttgtggccacatttcttcttgcggcagttaacagccttggtgtgcaagcgagtatagcacctggatcagatatttgacatcaagcacttagactaccctaggttcatactgaatataagaatttccaatgcaaacacaatactatttacaaaactatctaggggggaaatcaaatggtcctttgtaataatgtttacgaacaaagcaaactaggtgcaagacagtaaacgtcaaaacacagacaaaacaagaaccagagaaacttgcagtgatcaaaagtctgaatgattggcaggccagacaaaatatatgcctcaaaagttaagctcgtaaggcgacttacacatctaattgattcatcattccagccaatcaactatgagcataggaaagcacaaatcccagaccaaactcaaaagatacttcaactgaacaaacaagttatactacctaattggttcatcacccctgccaatccactaaactgaatacaatgaaacaaagatagtggactgtcacaagtggttatatgttgcatattttaagacattcccggttgttgaaaatttaggagattagaccttcattagtatagatgcagatcattggtctcctcatacgagccaaattttcaagaaataccaacgaaggtgatggcacacaagttgatgcacacaatgataccacgcaagatgatgcacttgaaggcaaggaagatgattgtttgtgctactatgccgctccataattttattcgtgagcattctagtggtgatgtgggctttgcaaattgtggttgagatcctgattttgtgcctactatcccaatttcccaaatagatacaataaataactgaataatcagtgtcaccacatgcctcagatcaatccacttctaaatcaagttttactacaatggatgcatttcgtgatagtatagcaacgactctcacttgtgtggaattagcaccaaatatttatgcaatattttgcaacatctatttgtagtgacttgtgtgaagagtgaagacaatgattatgtaatatgttactagtttattattgctgcaaggttgaatatttgaatttatttgaaaaaatcatatagtgatttatctttgttgtattgttgaatagtcaagttcatagcaaaaatagttgcataaagatcattattctcaataaaacaattagctaaaacaaccaaatgataggaaggtcattgcagcctcaaacttcacttttctagagttggatgcacctttctggtcaaacacagtcaaaactccagaggagagcagctccagtctggagttatagagcaaagctactctgaagtggagtggagccatacaaacacaccttagttggcgtagatttttgtgaatccgcttttggctagcgataacgtcttctgggtttccaaaggcttctactcgactcctctaggccttttgggacgtgaccttcatcttgtgcgacttgccaaacgaatccgtcacaatactgccgaatgcaatggaagcttcctaccataacagtcgacccttttcacaccggtcaacgcagtaaccaaacattcggacgcgcataaaatcgccacgcacgcatcgctggttttgccgtcgcagagcagaaggcactccgggacggcagcgtgctctgcagacgctgaaggcaggatgtggctggaagaggtgaggcggagggagcgtggagagcttcgcgctcggcggtttgaggccgccgcccgagcgtgccgcacggcttcgctcgcgctctccaatcgcaaggagtttgtcaccccacatcacggcgccgtcaactcgctccagaggggaggtacctgctctccggggcatcggatgggtcggccgctgtgttcgatgtgtggaacgcgactgaatacgaaaccgggttcatagcaaagcacaggaacatactgcttgtggacaagcaacaccagaatggccacaagttcgccatctcggcggccgtttggtatcctgtggatacggggctgtttgtcacagcatcctttgaccagtttgtcaaagtttgggatacaaattcgactcaagtcgtcatggaatttaagatgcctggaaaagtgtacactgcagccatgtctccaatcgcaacaacgcacgtgctcattgctactgggagtgcagatgttcagatggtatcatgtctttggagtggtctgcctcaagtgagtggattttgatgagtggtggctgtgacggggcaatacgtttttgggacattagaagagctggatgctttcgggttctggaccaatcaaggtctcaacttggaaaaaggccccttgttaaaagtgctctatataaggatcacacagattccttaggaccttcaccttccgcaaggagaaggacaggcatttctaagaagagttcatcagctttgcgcaaaattcaaaacccgacacatggacacatgcaacagagattgcatcctggtttgtcatctagtcaaaaccgtgctactgctcattatggtgctgttactggtttacgaacaactgcagatgggatgtaccttcttagctcaggatctgattctcgcttaagactatgggacatcgattcaggctgcaatacgctggtcaattttgaagctatgcgattgcagacaggcaagccattacaattagctgtcactgaggatccttcacttgtatttgttccatgtatggcaagcatcaaggcatacaatttatggtctggtaaaacatttcaaacattccgggggcactatgaacttgtgagttgctgctactatagtgaacaggaccaagaactttatactggcagcaacgacaggcaaattcttgtgtggtctccatcaactccagcttttactaaaatggaagatgatgacaagatcctttctgcagctgatgaggataactggagcgactgagaaaccctggagccgggaggagtgtgtcttgtatctactgacatcgatgttactgatgttaacaaataacatgtcgaggttgttaggtcttgttagcagcccctaaatgatgatattgtcttggtgtattttcaaaaatatgtacattaccatgtgaaaatttgacagatcattgaataatttgtagatttatctcaggaggatagagggatgtttgacgttcgccaaaatgttgtttagccctggagccttgttttcttcactgtgtattaatgctttacccaaaaataagaatttttctgagc

SEQ ID NO: 34969 - DNA, 624 bp, Zea Mays
aggaccccggattcttctttccaccgctgttaagctggctcgttgccattctgccattgtcccgacctgctggctgctgccctctaattccttttactccccgccgagcgaaacaaacggccttcttggtcgcctcccccatttcgccgctgggcgctggctcaccccactggctttctcaagtttcaagcccctgctgcatcttggccagttgaagatgagcagggcatcaatcaaaatcatcccagagtgctacagactagtgatggatcttgattctaatttcttcaagaggaaggatgctaggggtagcatgttgcttgcttactccatgtcaacagcaagcagatcgaagttgttcctgtggatgctacaagcaacacttttggatgcatgctactttgctttgcattttgtagcagaggataaagttgcaagtgaactaggttcctgaacccaaaacatgtggttgcaacagtagacatttgatctatgagagctttgacaagccaaacttgttgttgcctacttattacgatttgaaaggtgacaagtagactcattattgtgaccgattattggcgctaatggaaatatgacctacgctttggctatttctgtgta

SEQ ID NO: 34970 - DNA, 256 bp, Zea Mays
tctctctctctctctctctcgctcgctcatttgggcgggcctagctcgttcatgttcgtgtttccataggcaggtgtcagggtcgacccccacgaggagacacgcgacttcagcagagcacagaccctgcgcaggagggcgccacagccagcacggccacacgtctggtctacatcttccaggccgcacggtcgaaccagtcgctgggaaccgagaattcgacaagaagaagaagaaaagacagagagaaaccgag

SEQ ID NO: 34971 - DNA, 1720 bp, Zea Mays
gatgaatccaggtcctgtcgtcctgacatggagttcgatagtacgtgttcttctcccgttagttgtcgctgctgcggtcccacataggattgctggtgagcaaaatgtacgacacggcaaagactattgtgcttaaccttgtatacctgttggaaaaatatggtttcgttccaaatggtgcaagatcctactacactaaccgaagccaaccaccacttttgagctccatggttttagaaatatacagggcaactggtgatgtggagtttgttaggacagtattccactctctgcttaaagagcatagcttctggatgtcagagattcataatgttgctatagcagacaatcatggtcgggtccataatttatctcggtatcaggccaggtggaacaaacctaggcctgaaagtgcgacaattgatgaggaactggcttcgaagttgaattctatggcagctaaggaaaaactgtactgcgaaattgcttcaacggcagaatcgggatgggatttcagctctcgatggatgaggtttggatgtttgttatccttaaaaaggaactgacgagctaacagttctgctgctttcgcactggttaaaacaagaattctactgacatgacaacattggcaaccacttacataatacctgtggacttgaacacatttctttttaagatggagctggatattggtgccttggctaaagtcgtaggagataatgcgacttcagaattttttttaaatgcttcgaaagcacgtcatattgcaattgactctattttgtggaactctgagatggaacagtggcttgactattggcttcctggtgatgcagactgtcaggaagtacacgaatggaagcctaactcacagaaccgcaacatatttgcttccaacttcgttccgctgtggctaaatgcataccattccgagtcatggcgagcctcaaggcatctggattacttcatgccgcagggatagcaacttccctgacaaacacgagccaacaatgggatttcccgaatggatgggccccactgcagcatcttatagctgaggggctgctgcattctggatcagaggccaaaaaactagctgaggacattgctacgaggtgggtgagaacgaactacgccgcttacaaagcaacgggtgcgatgcatgagaagtacgatgttgaggcttgtggagaatctggaggcggtggagaatacaagccccagactggttttggctggtccaatggcgtggtgttgtcattcttggaagaattcgggtggccagagggcaaggaaatagcttgttgagcggcgaagcgctcacgacagggtggatctggtcttgccggagagcaatctggttaggcatcgttcatgtcacacatgtctagctacgagagtggcgcattgccttctgcagttcgtcaagtgcgtttgtgtgttcttgtttgcttttagttgcgactaggctgtagatccttcttgtatcacaacaatatatgtactgctactgtaccggccccggcctcttgtttaatctgaaatgctcattgtatatcctcttacgaaacgcaaacacgtgctttggcacgttcgtcgtcgaaaagagaagagaatataccattttgctctcttgaatacaaaatcagtgcatcgttctagatctcgcccacagggcgtggactggcagactgttggccccttttctgttcaaata

SEQ ID NO: 34972 - DNA, 3461 bp, Zea Mays
attagaatacactcgttctccccaagaaggggatccactgccctagccttgtgcagcgcggcatggcatcatgcggcggcggtgtctgtctcaagagagatcgacgagaggaggaggagaacgacgacgacaagggcgagacgagcggccgcaacaagagaccaagctccggcgcttattacacgggcgcgggagtcgatgctcagagaacggatgacgacgacagcgccgccgccgattacatgtacgagtacgacgacggctacgaggaagaagaatccgctgctgagcaacccaagggcgacgacgcctcggcgcgcgacacggagcagaggtacgccgtgctgaccgaggacgacgtccgcgcgcggcaagaggcggacacggccagggtcgcggaggtgctgtcgatcccggcgggcttcgcgcgcgcgctgctgcgccacttcaagtggcgcgtcgggcgggcgcaggaggagtggttctcggacgcccagcaccagcagcgcgtccgcggcgccgtcggcctagtccccgcggcttgtccggacggcgacgccctggtccccgccgcgcgcagcccgcggccgcgggtgtgcggcatctgcttcgacgcgtttcccgcgggcgggacgcggtcggccgggtgcgccgcccactactactgcgacggctgctggtgcggctacgtcgcggcggcggtaggcgacggcgcgcgctgcctggcgctgcggtgccccgacccgtcgtgcgcggcggccgtcgtccgggagctggtcgacgaggtggcgcgcgacgacgaccgggcccggtacgcgcggttctggctccgctcctacgtggaggagagcgggggccggatcaggtggtgcggcggcgccggctgcacccggtccgtggagctcctcggcggctgcgacgcggaggccgtggcctccgcggtcgacgtcgtctgcgggtgcaggcacgccttctgctggcgctgcggcgaggaggcgcaccggcccgtgtcgtgcggcacggtgcgcgcgtggctggccaagaacgcgtccgactcggagacggccaactgggtggtggccaacaccaagcgctgccccatgtgccgccgccccatcgagaagaaccacggctgcaaccacatgacgtgcggcgcgccctgccaccaccagttctgctggctctgcctcgacccctgggaccaccacaggggctgcacgcgctacgactcccgccgccgccgccgccatgggccggtcgacgaggtggaggacgaggaggagcaggcgcagcggaccctggccaaggcgtcgctggacaggtacctgtaccactacgagcggtgggagggcaacggcaagtcgctgcgcaaggcgctcgcggacgcggacgagctggagcggtcggagctccagcggatggccaggctgctcgacctcccggcgatggacctcggcttcgtgaccgaggcctaccgccagatcgccgacggccgccgcgtgctgcggtgggcgcacgcctacgactacttcctgtccctggacccggagcgcgacgcggccaagcgcggcctgttcgacgacctgcagagccaggccaaccgctggctcgagtgcctgcacggctgcgccgagctggagaggaagcacctcttcggcgctgccgacgccgacgccgaggacgagcccaccgtcgccgccgccgcgttcatggcgtacaaggagaggctcgccaacctcaccggagtcacgcgcaggttcatcgggaacctcgtcagagcgttcaagaccaacctgccggaagtggtggtgacgctgacgccgccggcatccgacttgcaacacatagtgaagagtggaccaacgacggagagacaaacaacggttggcattggaggcatcctttctacagaagcaactgtgacactacctgtttccaacgtgtcttctttacaagggacatcagcactgcgaccttcatcgtcgtctctagtagtctcacaggaaacggacattgcaaatgatagcgtgcaagaacgacacagccctacaagaaaccttgcccaggcccagcatccagttcgtcctggcggtcatggcggcttcctcagcaatccatacccgagtttctttggagaggctacctcaaccgcgggaccattgcaactctacatgccaaacatggtggtgtcaggtggcacgacatcgacgccctctctcgccttctctctgtctgcgcttggacagcctattacgagcacagctcttggcggctcctttggctcaaacactcgcactgcatggggcaattcagatatggctgctgcgtcgtcctctcagcctgaccgcatgggcatggatcaacaagcaggaaccggttctgccatgaatctgacaattgggctgcatcccaatgcccagcagccaccaccaaaatatgtcaaaatctgggagggtgacttatacgggcaaaggcaagggcagcctgtgtttattagtaaactcgaaagttggggtggaacagtgtccagaaaagttgcagaggattggccagaaactatgcagattgttcgcctcatagcccaggagcatatgaacaagaaatattctgaaagtcaatacgttggaaacacagactttctaatatttcgggctttaaatcagcatgggtttcttggacaactacaagagaggaaactgtgtggtgtgatacagttaccgtcgcaaactctactactttcaatgtatgacaaaacaagccgtatggttggcatgctcttccctaagaacatgctgatgttcaggccagaggccttaactcagccatcaccagtgcagcaggaagaacttatacaccaccaacaacaacaactacagcagcaacagagaaacatacaacgacttcaataccaagagcagctacatttacagcaacagatgacgcaacaaatacaacagcaacaacaatctctataccagcaacatcaacaaatgcagcatcaacagcaactgtggcaacaaatacaacaacagaagcatcagttgcaacacatggatccccaacaacaacagctgttgtctcagatggtgggtacagaattaggcagtgatgatgacacaagggaagattgggtcacaggggctgggccgcatgcctagggaatcagggagggttaatgagggcttacactcactcacttgagggttaagatgtttcctagtgtttgtcgttaaatcattaactgataacttcaaaaaaataaaccagtcatttgtatagttatacggatggggtaagagtttaaataacaccgttatgttatcgaatagctagtatattgtattgagctgggagctagatttttgcaaactccccatgtttcttcaccaaaatctttaatcatcgatcaaagatcggtaatccagtgatgcactggctcaggacacgcttaacgcacacca

SEQ ID NO: 34973 - DNA, 4922 bp, Zea Mays
atgatccagtacttcaagattgctggctggtcggtggaagactcccaaattgagggtaaattccctagaaacagcaaccccaaggagattattgtaaaaattccaaacagcatgtttcttttctgcttgatcaacgattacaagatggctgttcaattctcaatggcttcgtcgcgaaaagtgaggaatgcaaataaacgctacaccaaaatcaacgaagattggcaggataaagatgagacaaatgtacataaaagtaaagtgcgaaagaaaaagttatctgacatgcttgggtctcaatggagcaaagatgagctcgagcgcttctatggagcctacagaaaatatggaaaagattggagaaagttttttttatgcccttctagacagaaccgagacataaaaatacatttagttgctggtgcaatacgtgataggacatctgaaatggtggaggctctttacaacattaataaggcatatttatctcttccagagggaacagctactgctgcggggttaatagcaatgatgaccgatcactacaatattctggatggaagtaacagtgatcatgaaagcaatgattcaccaaaagcttcaaggaagccacagaagcgtggtcgtgctaggtttcaatctgtttctaagacatctgatgcacgttatgctgatctagggcaatctcagccttcttcatcaagctatggctgcctttcgttgttgacgaaaaaatgtgctggagatctgcttgtagggaacaggcctcgtgctgttggaaaaaggactccaagagtacctggtgcaagtatatactatcgagatgacaggggtgtaacagataggcgtgcaaaaacagttgctaacaatggtgatgatgaaggagctcatgtagctgcgcttgctctggcagaggtatttcaaagaggaggctcacctcaggtttctgaaacatccaaatggtgatcacatgttcctgtctcctgttaaaagtagtgacagaaaaaatgctgattcagagatgggaagctcaaagttgcatgggtttcatttggatgctgattaccccgaaggtagcttaggaagcagggaggccgagactggtgaatattgcaaaggttcatcatttttgacgaaaaatgaaggttctggtaagcctctgaagaagggaaaaaagtctcagaagaggaggaaaaaagctgcacataaaacaggtgatcagttcgaggatgacagagaggcttgtagtggaactgatgaagggcataggtcgataaagattaaagaagactcagagctggagtcattgggatggccgtctagcacgtcaaataaaagaagtcgtcaattgttttttggtggattgctaacaaaagaacagtagcggaggcccttgagggtatggcgtggattagtgatatcagggggaccatctcttgggcagttattttcgatctcctgatcctgtgcgaagctgtcacagaagttcatctacaggctgggaccaccgacaagcacttttggagattttccacttctggccagtattctgcgaaggcagcttatgagctgttcttccttggctccactgccttcgggcctttgaaaggatttggaaaacttgggctcctgccaaatgcaagttctttttgtggttggtcatgcataacagatgctggacagcagatcgtttggcaaaaagggatctccctcaccctgcggtctgtcctctctgtgatcagcaagcggaaacaatccaacaccttctcatttcttgtgtttttgcaagacaattctggttcacgctgctgcaaaagatgggggctgccgaacctctccccagacttggatgccaccaatctggacagttggtggaatagtgctgctgagaagctgcctggagaccttcaagccggctttaattctatcgtgatccttggcgcttggagtatctggcgtccccgcaatgactgtgtcttcaatggcatgtcacctagtgtgaccacggctatcacccttgctagtgatgagctgaggatgtggagcctcgctggtgctaaaggtctcaacctgctgtcagccctggtttttgtgttcgatccagggtgggggttttttcttgagtttttgggtttttgggtttgtgtgtgagttgtgctgtgttttgtgggttgtgttctggtgaccttgtggtcgctgggctgtttgggtgtgtgtttgtgtgtgtgtgtcgtggtgttttgtactccctttttatctttaatggaaagatacgcagctctcctgcgtgttcgagaaaaaatatgtccttgttttgcatacattggctgatctatctgtgaatatcctaccaccttcatcagtaatggaatctgaatcttcagcccaaattaaggatgaaaacaaagatgttgattctgatgacaggcctggcatgcctgcggcagtatcagtgtatgagcagaaagttaactccaaaagcactgcaaggaaagttaaaaggcagcctgaaatttcaaattcagagatggtcactaggaaaaaagctaaagttactaaagatcctcatcacgatgggagcaccacttctgatgtaaagcagcaagcttgtacatgtggtgtcaaaacagagaaaaagaagaggaaatcatccacgacaaaggtttctgctgaagaagggaaggtgtcgtctaatatcgggacaaccacacaaggtgatacaacacaagctgacttatcatcaaagggtaaaagctgccgtaaaataggcattcagcaagcactaattgaagaatgcaaatcaaccaaggttgccaatgatactggaagtgataaattttctcactcagtgaataatgttattgatcttaaggacaaactctctcactgcttgtcctcacgtttgcttcggaggtggtgtatgtttgaatggttctatagtgcaattgattatccatggtttgcaaaaagtgaatttgtggagtacttgaatcatgtcaagctgggtcatgttccaaggctgactcgtgttgagtggggtgtcataaggagttctcttgggaagccccgccgattgtctaaacaatttttgcatgaggagagagagaagctttctcaatatcgcgattcagtcaggcaacactatgctgaacttcgatctggtgttagagaaggactacccacggatcttgcacgacctcttgcagttggacagcgtgttatagcctgtcatcctagaacaagggaacttcatgatgggaatattctgacagttgacaataatcgttgtcgggttcagtttgatcggcctgagctgggtgttgagtttgtgatggatattgattgtatgcccctccatcccatggaaaatgagtccctcaggcaaaaaaacatcgtgaataaatacttatccgaggtgaaacttgaggatcagatgaatgacttgggtagtgggggtgcagcaaggttcgcatcaaatgtgaatgtgaattgtggcgatgcagcgttccaaataccttctagccacccggtaaatagtttaacgaagcaagcaaaggttggcacagttgattcaattgtacaggccaaagctacagttaatgaggttgcaattgcagcacaacaagcaatgtacaatcagccatgcagtctctcacagatacaggaaagagaagctgatataagagctcttgctgaactatcacgtgcccttgataaaaaggaagctttattggtagagttgaggcacatgaatgaagaagtgtccagaaagcaaaaggatggtgagactgttagagttgaagcatttcaggacgcaatatgctatggtgcttgtgcagctaagagattctaatgatcaagtaacctgcctttgtcccaatatctcgttttaagttttcatatgcttaggtgaatgacacaaagtgctctcatgaacaggtagcctcagctttgctttctctgcggcaacgtaacacgtatcatggaaatcaattaccgtcatatcctatttccatggaaaatggtggaaccattactggagcaccagatccatataaccgttttggttatattaatccagaatccggttcccaagtaatggaagttattgagacttcaaggtgcaaagcaaaaatgatggttgatgttgctgttcaggcgatgtgcaaagtgagggaaggagagaacgcctttgctaaaatcggtgaagcactagatgatctcgatagtcgtggcacaggctctggttcaagcatactaggaataagacggatacctcccgattcagggaaggcaaatacatcctttcaagataacggaacgcctgcccctgcagcaatcaactcttcaggtccaagattgcccaacgggtatgattctgaagctcaggttcctactgatttgatttcgtcctgcgtagccacgatacttatgattcagaactgcacggaaaagcagtatcatcctgccgaagttgcacacatccttgattcggccctgtcacgcctacaaccgtgcagctcccagaacatcccgatcttcagggagattgagatgtgcatgggcattataaagaatcaaatgttggcgttgatacccacaccaagcggctagttccttgctttcctgtgagctggccggaagaggggtaaatttcggaaagaaaccggaatactgtatgtggcgtgtattgttttttttttcccattttttactgatttgttgtgttgtacaagctgtatgtttttttactgtcgtacaagctgtatgttattgctttatacatgtataatagtaatcatgaaagttcattgttctggcaagcgcatgtacattcagcttgaaatactgaaccctttttccaaacggaaattttttcctgttcctttacttttttgaaattcttgcgttccaaacggggc

SEQ ID NO: 34974 - DNA, 2747 bp, Zea Mays
gaaaaaaatcccgctttccaaacaggggctgccagaaagcttaccatcctgcttgcgtggggaaagatagcggcttcctcaattcagatgaagaattcatctgtgaatggcatacttgctttatttgtaaagggcgttcacgttattattgcttttgctgtccgtggcaagccttttgtcaaaattgcgtgaaacaagcagaattcgtcccagtcttgaggaagacaaagggattctgcaccaactgtttaaggatggcaatcatgattgagaagaatgttgatgttgactccgatggggagagggttgatttcaatgacagggcaacttatgaatttttattcaaggagtattgggaggagatagttaaaggcaaggagagcatgactctggataagcttgaaaaagcatatgcttttctgaaagaaaaactaaactgcaaacaagatctagatttagaaaaggttcatgatgaagaacacagttcagatgatgattttgtgggcaatagtgatgacgacgatgacaacaagccatcttccacaaccaaatttaatggaacatcgaatacaatgaaattcttcctgagggaagataggccaatgaagaatggctatgtgggctggggttcaaaagagctcatggagttcctttcctctataggcaaagatacattgaattccctagatcaacatggtgctactgaagttgtgaaggtgtacattcaacaaaaaggtctcttagcaagagataagaaaaaacttgtcatatgtgatgacaagctcaagattttgtttaggagatcaaaagtgaggtacaacaggatatatagcttgttaggtaagcatattgctgtgaatatgacatcagaggatgaaacttttgctaactctgatgataacaatgaaacatttgtgagaaagaaagctcgtattgggaactacagttccagtactccaaagtgtactccagaaataaacaagagatgttttgctgctcttgttcgccataacattgatttaatctacttgaagaaatctttggttgtggatctactaagggagccggatacatttggcagcaaagttattggctgttttgtgagaataaagattgatctcaacgattatagtttctacatgcataaaaaggtgcaccaacatagaaagttgtatcagcttggactagtaacaggcaccagtaaatcccctgaagaatacaagataaatgatgtatcaacagatattcttttatgtatttccagcatacctgacatcaaaatttcaagtttgtcagatgaagaatacgaagaggaagaatgtcaagaccttcggctgctggccaagaatgaatcctttaaaaggcctactgttggggatctagaggagaaagcaagaagtttacgtagggagatagtgaatcattggatcagtaaagaactccagaggctagaaagattaattgacagggcgagtgagaaagtttgaataccttgataagaaacaactcttgcgcaagccatctgaacaacaacgtttacttgaagaggtgcctcaagttattccagagacagaagataataaagatactgaatttcaagttacaggacaagacaaacctattcaaaagagtactgtcgctttacaaggtaccaatggagagagcattgtttctttgaaaaaaggctcagaagaaaaatgtacatatgtgacaagggcttcttttttgaagagccacacagggaaaaaatccaaaggtactgatggggagagagatctttccttggaaagtttatcggaagaaaaacctgaagttaataaggcccacaccgatggtggtacagctgtaatacacaatcaaaatcggagcactacagctgctattgctgcgctaccaaagtatttgcatcgccatgctgccactgaagccaataatgctggtgatatttcatctgttcaggagctggatggtgaaggtgttaaagctagcacggatgttgatacaactggaacagatgtccagcacgggagcattgaagctactaaagccaacgctgctggtgatgcacctggagcattttttcaaaagcagtgtgctaaagctgctgatgttattaccattgacgacgatgacgaggacaacagtcatcgttgttataaagaagaacaaacagcagtagttgatcttgaagctgattatgctggggataaccatcccgtgcagcttgaggcaaatagtcgaggccataaacacgtgaaggtgaaggagcgcatttggtattacattgatcctcagggtgatgagcaagggccatttacaatgcagcatctgagcatctggtggagcaatggcttcttccccggcgacttcagggtctggagaacaggccaaactagtaatgacgccatcttgctcgtggacgcactgcagatgactaggtaggctagttaggagcctcgtagaagactagatgtatttatgtatcgcggaaaaagcgggggggcttcgaggcagatatatgtgttctgctggggtgtacatccttctgtgttatatgatatgatgatgacatcctatccccaccatcacctcacccaccaatcaaaaacatcttgccaaacaaaacaatggttgtttgatggcaaagaggatttgttgggatgaaatatttgtggactattcagtatccctgtgctgtgacaatgctactgaaaatctggttctttggcatgttaggctgtttaacg

SEQ ID NO: 34975 - DNA, 1269 bp, Zea Mays
ccaaaggattacgaattccacaaacgccaacaggctctccttgcaagcctctctttttaagttacggggcacttgtcatgcacatgggcgaccgagctcttccatttatatctctaccactcctcatcggtgaccggacgaacgccgggagaaacaggccgatccgtagctgcctgcacacatcggtgatcgttcgatccatgtgcgattgattgatcagggaggagcgagtgatataatgccttgcttggcgcaagagttccacccgaagctgcccgcggcgaaccactactgcaagtccttgtcgtcgctcatccgggagacctacgcgcactgccatgtcccctgcgtcgggatcgccgggtggagctccggcggggacagcgacgacgacagcgtcctcgacgaagcgcgagataccaagcaggtgatcctcagcgagatgaggagccggcagatgaagaggcggtccaggtgcagcgtggactcgccgacgccgctgcccctgccgtcgtcgagctccgctttcgcctggtcgtactcgtacgctccgctcggtccgagaaccgttctcgacgagctgtcgagtcccaagacgtgcgtcgtggtggagggggcggccgtggccgacgacgacgatggggacgtctactgcgacgcggacgacgagagcgaggcgttcttctccgtgaagagctgcttcacgcgcagcacgagcccgagcccgagccgggcggcgaccgcggcgtcgtcgccgcgcatgatgacaggcccgtccccgccgatgctgcgccggtcgcccgaggcctgggagcgcttccgggactgcgacgggtggccgttcgggctgtgccgtcgcccagccgtcctcccgctgctgccgccgctgcccagcacgccagccgactcgtggaagtggcgcaagagcgtcagtacagtagcctcgccgcgcaggcgcagcccaaccccggcttacagacacaaagcagccactgctgctacgctagcagtaaatgaccgcgccgccgctagtggcctgcgtgcttgaatgcgagagttccatagggattctacatttctacaggacacgaaacagttcatttgctccgacaaaatggtgaagcttcccgcaggattcctacgcgaagatgtggcatgcatgcttgttcgaggccttgatcttttgcaaggatttttcaggtgcacgtgttctcaaaaataaactctggtttacttttcagttctttagatggtgtttctatctagtcc

SEQ ID NO: 34976 - DNA, 1498 bp, Zea Mays
cacaaaggctacatactcttcttgctccccgaactctgacgcccatccgatcccctgtcggttctatgcatttgagaaggcacaccggctggatcagaactccatcggccgtggcgttaggcagttcaagacagctctgctccaacgtcttgaaaaggataatagccctagtcttgctaagcgcgtgaagaaaagcgatgctcgcgaaatcgagagtttttaccaacagtactacgagaactatgttcgtgcacttgacaaaggggaacaagctgacagggctcaacttgggaaggcctaccagactgccggagtcctctttgaggtactctgcgccgtcaataaaaatgagaaagtcgaggagctcaatcctgagattattcgcttgcacaaggatgtgcaagagaagaaagacatctacacaccattcaatatcctgccccttgatgctgccagtgcatcccagtccatcatgcagctggaggagatcaaagcagcagttgcagccctccgaaacattcgaggcttgaattggccttcaacatttgagccgcagaggcagaagggtggtgaccttgatttgttggattggttgagagctatgtttggctttcagcgagatagtgtgcggaatcaaagagagcatttgattctcctccttgctaatgtccacataaggcttgagccaaagcccgatccactgagcaagcttgatgaccgagctgtcgatgtggtgatgactaagctattcagcaattacaggaagtggtgcaaatttttgtcacggaagcatagtttaagatttccacaaggcgcacaaccacaagaaattcagcaacggaagattctatacctaggtctttatcttcttatatggggtgaagcagcaaacatcagatttatgccggagtgtctttgctacatcttccataatatggcatatgagctgcatggtttgctagctggaaatgttagtattgtgactggggagaatatcaggccatcttatggtggggatgaggaggcattcttgaagaaagtggttacacctttctatagagtcatcagaaaggaggcaggcaaatcacaacatgggaagacaccacattctgcgtggtctaactatgatgacctaaatgagtacttctggacatctgattgtttctcgcttgggtggcctatgcgggatgatggtgactttttcaaatccgtgcatgattcaaggcctgtaacaacggctggaagctcaccacaaaaggattccacgaaaagtacagggaagacaaatttcgttgagactagaacattttggcacatcttccgaagttttgaccgaatgtggactttctatattttggctctacaggcaatgctgatttttgcttggaatgattattcagtgaccgaaatccttcggaaagaccttttgtattatctatctagtgtattcgtcactgcagcatttctacagttcctccaaaatgaacttctcagttaa

SEQ ID NO: 34977 - DNA, 655 bp, Zea Mays
gttagtataagatcaggtgggtgcggtaattctatcaactgtgcgtaggaaaaaaaaagcaaatgatattgctggacatggcacatggtagcatagctagaagaaatggtgcaacctcgcagtcatgttagtaagatcaatgcagtcaattatacagaaacacttgaagtcaggatatggacaggtaaacggtgcaacctttgcgcaagcacagtatacagcaacagtaaagtaacttagacacgatgagagtagagtactttactgctaaacccaggagattatgcatgaacaccaccagaacacaagagttgcgcatatatataaacaccaccacaacaggtaaatcgctgacatttgaaactgaacccaaccacaacactgcaagatacagttctgactcaagcatacgatccacgagcacaaccactggtaactgccatcccaaatctgcagtctttttacggaaccaaacaaacctctaacatgttacacaatccaaggaacaggaacagcccaccggatggcgtcggctccgatggacaaaggcgccgcctttaccaggcgggggataagaacagagcagtcggacgggtctggacaaaaaaaaacccgtctttctacggacaaaaaaaaaatccacggcagcaaaaac

SEQ ID NO: 34978 - DNA, 246 bp, Zea Mays
caaagacaaaggcttccactccgtaactcatacttcgccatcactccaagcaactctctattctttgggggagaaatgagcatcaaagaagaggactgcatccttgggggagagagtaaaagctcaaaagcaaaaggaccggacttcgcctttggtataatcttaactcatgtacttatgaccaaaggggaagaaattacttcacgggctctaatgattccgtttttggcgattcatgccaaaaag

SEQ ID NO: 34979 - DNA, 251 bp, Zea Mays
gcgtttgttgccgtgcccataaagaggcactgcacgctgctactgctagctatggctagtagtagctaggctcaccagaggcctctcctgtttcacctttatgcggtccacgtgaggaaggaattaagggctgtctacacccgagcgattcagcaactttaccttctgttccttcgcttgtagttgaatttatgtggtccatttctcccagtgtaatgcagttggctaagagcctaagatcttgccaaaac

SEQ ID NO: 34980 - DNA, 1261 bp, Zea Mays
agccaaatcattcacgtatccatcttcaagccagccgtctccttatccctacgacgccgctcacctgtgctcatcttccagccgccctctccgcccagcagcagagcacaccatcctctccactcggatccccaagccctcgcctccagctttgccacgacatccgtcccctgctcggacctccacccggccgcgtcctcgccggtggccagcgccgctgcatcgccattcctagcgtcggccttggcaccgcttccccgagcgccccagtcgagctcgcccatcctctgctctagccctttctccacgccgtagctgatctcgcccctctcctcagccatggacacgacgacctgcagcccttcttggtggccaagcccatcttcctgctcgcgccccctctttttccacctctgcgcgtatcagctcgtccaacccccatggtgtttcctccctctcggctcccttgctccctccccatggcgttccccctagatgctcgtgatctgttccccacggtgcaggcaaatgttctttccctccctgcagcagcaccttggtggttgtcgagcagcacgtcgcgcttgcgcagcctcggtcacgacgttgttcaccccgctaaccattggtgtcatacctcacgtgtcatgtgttcgccgaaatgcctaaacatgtagtctgtcgtcgttgtatccacagtcaattttagtcatggtacgctaatgatcgagatgcgaaggccagggtctaggttgaccccaagtggtgcaaaggatggcctacttcgagaggcgatgtcagcggaccaatctagaagattgatgatctctacataaaaacatgattacattgattcaactctgatctggttgtggaaactgagatcattgtaactcaaatgagagcttggcacttagcatatagatgccactagaaccaatctggaaatactgtgagaggccagcaagaatggagtcatggaacatcggcaggaggagtgcagcagcggcaaccgatgtatcccttgaacaatctggttttgacaagatgcaaatcaatctagtgtacattgtattccacacttgcaaagattgtttggctaattacaagattatttcagtgttttggtttggattaagagtacacttatgtatgaaatattgattggtactcatttatattatttttattatatcattattaaatatatatgtctgtgtatttctctttcaaattattataatgtggaatctcaaaaatg

SEQ ID NO: 34981 - DNA, 1869 bp, Zea Mays
ctcgccgttcggcttggcagtcgcagacggcagatcccaaaatcgaacaaccaccacctccccctccgccgaccggccggccggcttcgctcgccatggccgccaccgcttccttcctctcccacctcctcctcgcccccaagcgcagacccaaaactcagccaaacccctcgcatcttccctcccagcgcatcacggaccggcttccctgccgtgggcggcgctcctccgtcgcggtctccgccgcggcatccgacctcctctctcccgcgccctccctcaagtcccgcctcgccgccggagacaccctgtacggtctgttcctcctctccttctcccctaccctcgccgagctcgccgccctcgccggctacgactacgtcgtcgtcgacatggagcacgggccgggcgggatccccgaggcgctcgcctgccttcgcgcgctggacgccgcgcgcacccccgccgtgctccgcctcccggaggccagcgccgtctgggccaagaaggcgctggacctcggccccgcgggcctcatgctccccgccatcgagtcccccgaggccgccgcggaggcggtctcccactgccgctacccgccgcgcggggtccgcggcgccgcacaccccatcgtccgcgcctccgcctacggcttcgacgactcctacctctcccgctgcgaggacgataccctcgtcatctgccaggtcgagaccgccaccgcgatcgcggagatcgacgccatcgccgccgtcgacggcgtggacgtcgtgcagatgggcccgctcgacctgtcggctagcatgggatacctgtgggaccccgggaacaggaaggtccgggctacgctgagggaggccgagaggaaggtgctggaggccaagaagaagaagaaggcggcggcagcagcctcgggtggcaatgctgcttacctgggcgggtttgcaatgcagaatgacccgccggagcagctcaaattgaggggttaccatatggtagctggcgcagtagacattgctatgttccggaaggcggcattggatgatgtcaggcggttccgagaggcagtgatggagatcggcgaggaggatgatgaggatgaggttgagaaatgtgagaaggaaaatgacgggtactggagtgagtgagtgaacagtgtagaacagagctgagctgaagcatggagagaagtggctatgggttttgttctggtgatatgttttttgttctgaattcagaggatttattcgagatcttaaggagcccaagaatttctagctttagctgtactcttgtttaggtcatcatttgattttcaggtgaacaatccggttgggcatcttaaacatccctatttgtaggatgaaactcagaactggtggctaccaataaagtgctgttttttttcgcccccatttatttctaacatctggagaagtctggatcgttttggccaaacgtttgatagtatatcatgggatgggaaacacgtaggtccaggttgtttgtgtggttgggtcagggtaatctacacgcccagaatttcagcacttgcgcaacctcaagtcctccatcatgagtatattataatcccaaacaaacaggccctacttctctctacttctcttgattccataattttctgtagtgaacagcaatctcgcttgctcatcaaggatatcatagtgttcagacttgacatctggccattcctggcgtcccatagaagctttgacactccatcggatgcgtgctgtgagctcgatacatataagctgtgctgccattaaacctgcaaaaactcctgacgacatccttccgcgatgcaaaccaccaaacggcaacggaggatcagatacatgctcggac

SEQ ID NO: 34982 - DNA, 301 bp, Zea Mays
gaatagttcgatcgttgaataaattaatgtgctagtgcgatgctcattaggtgctcgataaattgcgtgagtcacgaaactctcgtcgacttcgcggttcttgcgattatcgagccagattcagctatggcgagttatttcgctatttcggtcaattcgctgaattagtgtaccgagcagaatattagtaggtctgtgtgttgatgaaatattttaatcacttataaagattgtagtacaatttataaggcaagggataagtttagaatttaattaattaattgataagttgtgattaggc

SEQ ID NO: 34983 - DNA, 227 bp, Zea Mays
aaagaaataactttgaactattataaattatttatagttttgaaatatattctagctcaagtgaccatcctcaataagaagtatagaagaggtgcttagacttataagaaggccgagcccaccggcacttagcaccatccacaacaacacacttctattttcagttcttcctcctgctggggaaccacctttgcacaaaagtagcaaagctccgtaggctcttcacc

SEQ ID NO: 34984 - DNA, 1994 bp, Zea Mays
cgagcacgcaaagccagcaactggaccgcgtcgggcatcggttcctgctctgtgctatactgctatcccctcccccaagccgccaccaccaccagcagcggaaccccccgccctcgttcctcccccgccggcgagagatcgacgagatggtgctgtcacacggcgtcggtggctccgatgagtccgtccactcgacgttcgcgtcccgctacgtccgcacctcccttcctaggtaccggatgccggagcagtcgatccccaaggaggcggcgtaccagatcatcaacgacgagctgatgctggacgggaacccgcggctgaacctggcgtccttcgtcaccacgtggatggagcccgagtgcgacaagctcatccaggcctccgtcaacaagaactacgtcgacatggacgagtaccccgtcaccaccgagctgcagaaccggtgcgtgaacatgatcgcgcatctcttcaatgctcctctcggggacgctgaaacggctgttggagtgggcaccgtcggctcgtccgaggccatcatgctggctgggctggcgttcaagaggcgttggcagaacaagatgaaggcggccggcaagccctgcgacaagccaaacattgtcaccggcgccaacgtccaagtttgctgggagaagttcgcgcgctacttcgaggtcgagctgaaggaagtgaagctgagcgacggctactacgtcatggacccgcagaaggcagtggacatggtggacgagaacaccatctgtgtcgcggccatcctcggttccacgctgaacggcgagttcgaggacgtgaagctgctcaacgacctgctcaccaagaagaacgcggagacaggctgggacacgccgatccacgtggacgcggcgagcggcgggttcatcgcgccgttcctgtacccggaactggagtgggacttccgactgccgctcgtgaagagcatcaacgtcagtggacacaagtatggtctggtctacgccggcatcgggtggtgcatctggaggaccaaggtggacctgccggaggagctcatcttccacatcaactacctcggcgccgaccagcccaccttcaccctcaacttctccaaaggttccagccaggttattgcacagtactaccagctgatccgccttggctttgaagttacaagaacatcatggagaactgccaggagaacgcgacggttctgaagcaaggtctggagaagacggggaagttcaacatcgtgtccaaggacaacggcgtgccgctggtggccttctccctcaaggacagcagccggcacagcgagttcgagatctccgacttcctgcgccgcttcgggtggatcgtgccggcctacacgatgccccccgacgcgcagcacgtgaccgtgctccgcgtggtcatccgcgaggacttcagccgcaccctcgcggagcgcctggtgctcgacatcgagaaggttctgcacgagctggacgcgctgcccgcccgtgtccccagcggcgacctagccgcgctcgccgcggccgagtccagcgagagggagatggagaagcagcgccaggtgatctcgctctggaagagggccgtcctcgccaagaagaagaccaacggcgtctgctaagcagccgagccgacgcatttctggccgtattggcatggggtgaaatttgtctgagtacgcgtttgcagtttttacccgggtgaagattgttatgtgtcgaggttgagttttagaggacggaattgctccggctcggtgtatgtagcgagtgttttacgtgctcaacaactctcagacttccctcccctcttgcatgtaagctgtaagtcgatgcaaataatgttgcgtgtcgagcgacgattagtaatagtacctgatggggtacttgtattagtattgatatttgaattacactatacattatgtgacatactattaatattgctcgacaaagtaatattatcggctcctgtttgattttctaact

SEQ ID NO: 34985 - DNA, 1533 bp, Zea Mays
attccaagcgtccaaaccccccatacaaccaactcgcaactcctcgcgcggttcctcgatcgaagtctccagacgcccagcgtcgatcgcgacgacgtacgccaagccgcagcaaagctccggcggtgtgcggtgagatggcggtggtgtcagcgctggccaagtacaagctcgtgttcctgggcaaccaggcggtgggcaagacggccatcatcacccgcttcatgtacgacaagttcgacgacacctaccaggcgacgatcgggatcgacttcctgtccaagacgatgtacctcgaggaccgcaccgttcgccttcagctctgggacacagctgggcaggagaggttccgcagcctgatcccgagctacatcagagactcctccgtagccgtcatcgtttacgatgtgaccgaaaattcagcatgttgaataatctccagacgaaaggtccatgcagcaaggcacgccgatgatttccagcttttctgttttagaatactaacaggcagtcattcttgaacacgtcaaagtggatcgaggaagtaaacacgcaaagaggtggagacgtgctcatcttcctcgttggaaataaaactgaccttgtcgacaagaggaaagtgtccaccgacgaaggagaagccaaagcacaggagcatggtgctatgttcatggagaccagtgcaaaagctgggttcaacgtcaagcccctgttccgcaagatcgctggatcccttccaggactggacgcactttcgtcaggaaagcaggaagacatggtcgacataaacctcagacctgccagcggttcgtcggcttcaggtgcagccgcgcagctggagcagaaatcaggcggttgctcctgttgagacttcgacagttttgtgttcagagaagctacagcagtactgcaacatcgagttaagtactttcagagagattatgacgaagagtgtgttttcgcccagacgtccagtagtgatatactgacatccatagcgagaagccaatttctgtgtacagatttgtttagcaagttatcatatactaggatataactttttgagacacaagggacaaaatctgtggaggtaagggcatctcacttttttttgatgaaacattagcaggagctctgccatatcatataagaagagcaagccagagtatcagtcttattacacatgaatgatcaaatacttagagtccatagggaaaaggtgaaaactgttgactatatggctaagagacaattatgatccatgaaaaatgctaatggactcatatacacagaggggctagcgtgcttgagagaataatattagccgccaccgcatctctctgtaggggtgtacgtgctcaagtcgccaccgttgtttctgtcgtggacatggaaattatatggcggattgctggacatgtactattggtttctctggtggacgatagactgtctagaccacatgaattaccaaatactttgagtctttgacatgcaaaaaagggtgaaaactccattagaaaacttcagaag

SEQ ID NO: 34986 - DNA, 915 bp, Zea Mays
atcaatccctcgcccacaaaggagagccagccaaaccttccacctcctccatttccagccccgtccccacaccagctcgcgtaacctcctccccatggctggaggcggcggcgcaggcgcgggctcgtcgtccggcggcggcggagggggcggcagggagggcgactgggactgcggcagctgcggcaaccgcaactacgccttccgctcgctttgcaaccgctgcaagcatccgcgcctcctcgtcgaccccaacaccccgcgcgactccaagtggctaccccgcgccggggactggatctgcaccggttgcagtaacaataattatgcatccagaaagaactgcaaaaagtgtggcttgcccaaggaggaagcagcaatgccagcattgcaaatggcagggatggctatgccagcttatgcaacttatattgcaagactacaaagccttgctgcttctgcttctgcctataacatgaactttgggatggctgccaattcacctttgcagcagcaactacttgcaaatgcaaactggccctatgggatggctggtagatatgggatgcaatcttctggttggccatttggcaacggcaacccaaatcagtttttaggtgttccaaaggattggcgtaatggagattggttctgcagctgtggatctcataactattcatctcgtactcagtgcaaagagtgtggtgcacctgtaccatcgagcattccctccacaacaatgaaagctacatctgatgcctcttccatcaattggcgcttaatcttaatattgtgctcggacggaacatggagaaccttttgacaaaatctctttgtgacagtaatcttcttatttatgcctgtcatccaaccatcaattcatgaagactaatgtcacgacttgctttctcaaca

SEQ ID NO: 34987 - DNA, 662 bp, Zea Mays
tctcgcctcactcctcctcccagaatctcaccttcccccgcgtgcaccgactgcttttctcccgcgtgcgctggctgcttttggccaccgatacgctgcgtcggcgctccaaagttccaggaaatcaaaatgccatagtttcacgggatagacggatcagcttggtctggggatgtcgtcagcgtggatggacggtcaatttcttcgtccgtcgcccaaccggcagcaacacatacgcgatgatttgattggttccttgtgtcctaaatgaaggcaggtcaggagaggctagagttccaaatcgtagttcgtgtgaaccagtgtgaaccagttgaatctcatcaatcttatcaagtcatctaataaaaaaaggttcgacgcgtcttagagttctacgatgcatccaagaattcagagaacgttgacaaatatatagatcagctgaccaacaatgaattgtcatcaccacccaaaaagatgaagcacacccaggttaacaaagccattccagattctacatgttccaagaatgacaacagttagaccatcctgaaatacatcaaggttgggcggcttccgaagtcattcagacctgcgtccgagcctacatcatcatttggtttgaatcgcggaacgatgtcgttcgtcactgcgttgttcta

SEQ ID NO: 34988 - DNA, 781 bp, Zea Mays
tccatcagactcaaagtttttagtttcatcatccactgatggctctgcaagaatatggaacattgatgaggggtctccactaaccaatttgacaagagcttcggtacagtatgatattttgttgtaattgcctgtcatgatagttgaaactgaattgtttcgtctgatcttctcgttccttctgtttatttacaggatgagaagattgagtattgccgcttttctagggatggagccaaacctttcctgttttgcacacttgtaaaagggttgtaatctccacctcacatcaatggggagcagagataacaaagctcgacgtccctcctgaatggaaaggtacgcgtctgtccgtgtggccgtgccgtgaccatgtctctctgtagtctgcaaactcaccaaaacgcggaccacctgtgctgtgctgcgcagtgtggcagatctggctggcgctgctgagcctcttcgtgtcgtcggccgtcctcttctacgccttcttcacgcacgcgaggctcaacctgaggccgtagaagaagacagccagtcacctctcaaaatctctgatggcgagtcctcaaggcatgagggctgttgccgactgcgaccacacctcgctgtttgctgcggcgtgctttgtacctgaacccgttcctggttttcacaccttgtgttacagatagacaacagatgagattgctcttgacctctctcaataataattgacggaagaagcacggtgcattctgccctgcttcgctgggcagcgtactattcaacccga

SEQ ID NO: 34989 - DNA, 320 bp, Zea Mays
aacacctctaccaaatcgcataggtaaacatataaccaattggattgcagcacaaatacaacaaaatgatcacgaaaatcaccttgggttcctcccttcctccttcttttcttccttcttcctccctccaaactcccatggaagactcgcacccacacgacggacaccaagcgggaaggctccaccttggagaggaagaggtggggggctagggttgaggggtggagctgcaatcacttggggaagaaggagaggaattggggcggctgcaagagtggaagagaggaagagagaggggggaggggcggccaaagggatgg

SEQ ID NO: 34990 - DNA, 673 bp, Zea Mays
tgcagagggtagtgaaactgctatatcagccgtgctcacggttaagagcagccttgggatcctctttgattagagatacaaatggttcgagttacaatggttctatttatgattttggttcgatgatgataatgatgttcctcgatgaggaaatggttcacgggtttgttattactaaaatttggcttccactgataataaaatacctgaccaagtaaaagcaactgcttgagcttaaccccacataaagctagtccacctcagccaaacgggacatttgctgagtatgttgatgtgtactcacccttgctttcacaaaacaccaggttacctttggtgcaatctatgcttaggtaaagaagaaggcgtcgaggcggatctccaggagttccggggcttcgatgagttcgaggattaggctagcgactacccccagtcagctgcctgtggtgggtttatttacgttggctacgtttctattctgggtactttgattatattatgtaaatgactctagtcttttatattattacttactctttattgtattcgaagcattgtgctatgatgagtcatttatgtaatcgctgtgtacgtgaatttctgatcctggcacgtacatggttcactgaatttgggggtataaaatttcttttctaatattcaccaaatt

SEQ ID NO: 34991 - DNA, 1540 bp, Zea Mays
gagcagtagtcgtctttctgatagattgtgattatcctgcaaaggcaaattatctttcttcggaggaatcagctactagtttacaatctgaaaacacggttcttgatttcttcatccccaatccgtccagttctctgacgattccttcgcctgcctgcctgcctgggcgctaatgtagtttagcgctttcccaaatttcttttgcattgctgccagcctgcatggtgtgtgagatatttaagattttttggatcataacagaagttttgctcaagtgcccttttccattgatcccaactaatgatacaaatctatttcctcaagttcttatcttctggatttaacagaaggtttgctcaagtgccctttaagatggcatcgtcagaaagaagaacacaagttcatggaatatagctgtgaaaatacactcagcagtttcactagatgcttagagacccaaatgagttcattaagtgacatggtaatatagaggacgcccgaagggcgccaaatgcactaagtaataataataataataataataataataataataaccacaagtccacaacaaacaaccacaaaatgtgcactctgaagactgggtccaccattcagcgactctgttgaccacagaattccctcccaatcggcggcgccacgatgcgcctccgcagccgggcaatctttcccctcgtccgcaccaccgccaccaccacgtcggccgcgtcttcgtctccggcggtgctgagcatcggccacgcgctgcgcgagcgccggctgttcacgggggacgacgtggcggcgtacgcggcgatcagcggtgaccgcaacccggtgcacctcgacgacgccgtcgcccgggagctgagcgggttccagcgaggccgcgtggtgcacggcatgctcgtggcgtccctcttcccttccatcatcgctggcagcttccctggcgctgtgtacgcgagccagacgctcaagtttgcggcgccggtgtacgtcggggatgaggtggttgctcgagtccaggcactcaacatcaggacgacggcggcggcgacgaacagctgcacggcaagacgatatgtcgtcaagttcgcaaccaaatgcttcatggacgaagaggagggctctgttgcgattgaaggcgaagcaatggctgtcctgcctacactggagctcagctctcagtcgactagaaactaggagtggcctcaaaccgggtcactagtcacaagttgctgttgcttaatcatacccgacctggtaatccctctcttctgcaacactgtgtagaatgcgtgtaaactgaacttagtgtagccttcacattgtaagcgaggagtgaaataaagctgttgtttatgcctatgaatctctttgattatgtgcagcgtacaatcactcatccatgaacagtctctagtctctgccggttaattctgtattttttttctcgaaaaagagaaaatcacgaggaagaccaagaccccaagtacagatcaaaacactaggaccagccagaaaaaaaaacaaaaaa

SEQ ID NO: 34992 - DNA, 3537 bp, Zea Mays
caggcgcctgcaaggaaaacacaagacactgacaagtgggcccattactaaccctattaggccagaccagagctgaagcagagcggagaggtctgctcgccggccatcgaatccaggctcctccaaggtgatctctctcgatcgcttccggcctcaccgtagcccgatccacgcaggctcggccacgacccgcggcctccgcacgacctggatctgacgcgcctccccctgcccccgccctccgcctcgtacttcctcgctgcggccgccgtgctcgcgctactcggcggactcctactctatatgcttccccggaagcggggggtcgacgccggcgaggaccaggacttgcacaacaaggcccttcgcgccgccgcagttgctcaggacaaggagaaggtggttgcggagatgggcggcagggcgccagagatcgatgaggacctccacagccgccagctcgccgtctacgggcgcgagaccatgaagcgcctcttcggctccaacgtcctcatctccggactgcagggactaggcgctgagatcggccgtggtttttactgatatgagcatagaaaaggcagttgagtttgatgattactgccatagtcaccagccgccaattgctttcattaagtcggaagtttgtggcctttttggcagtgttttctgtgattttggtcctgagtttactgttttggatgtcgatggtgaggagccacatacaggaattgtggcatcaatcagcaatgacaacccagcacttgtttcttgtgtggatgatgagcgtctggagttccaggatggtgatctagttgttttctctgaagtgcatggaatgaccgaactcaatgatggaaaaccaagaaagattaagaatgcaaggccttattcttttactctagaagaagacaccacctcatatggcacttacattagaggcggtattgtcacacaggtgaagccaccaaaggttcttaatttcaaaaccttgaaggaggcaatcaaggagccaggagaatttctcatgagtgatttctccaagttcgaccgcccacctcttgtgcatttggccttccaagctttggacaagtttaggactgagttgacacgattccctattgctgggtcagctgatgatgtacagaagctgatagaccttgctattagtattaatgaaactcttggtgatagtaagcttgaagaaattgacaagaaagtcttgcagcattttgcaagtggttcgagggctgttttgaatcctatggctgcaatgtttggtggtattgtaggtcaggaggttgttaaagcatgttcagggaaattccatccactgtaccagttcttctactttgattctgtcgaatctctgccagttgaaccgttggagcctagtgatttgaagccagagaacagtagatatgatgcgcaaattagtgtctttggggctaagcttcaaaagaaactggagcagtcaaaaatcttcatggttggttctggggctcttggatgtgaattcttgaagaaccttgcgttaatgggtatttcttgcagtcaaaatgggaagctgactgtgacagatgatgatgttatagagaaaagcaatctcagtcgccagtttctcttccgtgactggaacatcggacagcccaagtccacagttgctgcaaccgctgctatggcaattaatcctaagcttcatgtggaggcccttcagaatagagcaagtcctgagactgaaaatgtgtttaatgatgccttttgggagagtttggatgctgttgttaatgcattggacaatgtcactgcaagaatgtacattgattccagatgtgtatattttcagaaaccacttcttgaatcgggtactctgggtgccaagtgcaacacacagatggtcattcctcacctaacagaaaactatggggcatccagggatccaccagaaaagcaggcacctatgtgcactgtacattcatttcctcacaatattgatcactgccttacgtgggccaggtctgagtttgagggtctacttgagaagactcccactgaagtaaatgctttcctgtcgaaccctggtggatatgcaaccgcagcaagaactgctggtgatgcacaggctagggatcaacttgagcgagttattgaatgccttgagacagacaagtgtgagacattccaagattgtattacctgggcccggcttaagtttgaggattatttctccaaccgtgtaaagcagctgacattcactttccccgaagatgcaatgactagctcgggtgctcctttctggtctgctcctaagcggttcccgcgacctctggagttctcgtcttccgactcaagtcaccttaacttcttgttggctgcatctgtattaagggcagagacatttggaatacacatacctgattgggctaagaacccaaagaaactggctgaagctgtggacaaggtcattgttccggatttccaaccaaaacagggtgttaagatagagacagacgagaaggctactagcctatcctctgcgtctgttgatgatgctgctgtcattgaagagcttattgcaaagctggaagaaatttttaaaacattgccaccaagattccatatgaaccctatacagtttgagaaggatgatgataccaatttccatatggacttgatcgctggttttgccaacatgcgggctaggaactacagcatccctgaagttgacaagttgaaggcgaagttcatagcgggaagaatcatcccagccatcgccacctcaactgcaatggccactggccttgtctgcctggagctttacaaagtcctcgctggtgggcacaaggtcgaagactaccggaacacatttgcaaacctggcaatccccctcttctccatggcggaacctgtgccacccaagaccattaagcaccaagacatgtcgtggactgtctgggaccgctggaccataaccggcaacatcacgctgagggggctcctggggtggctcaaggagaagggcttgaacgcctacagcatatcctgtgggacctcgctgctgtacaactccatgttccccaggcacaaggaccggctggacaagaaggtggtggatgtggccagggaggtggccaaggtggaggtgccatcataccgccgccatctggacgttgtggtggcctgtgaggatgacgacgacaatgatgtcgacgtcccacttgtgtccatttactttcggtaaagaggggctcaccgcccgtttacatgttgatcctgtgcgatatttgtcaatgtttgtctcagaaggatcaagtgtataatttgcgatagcaaccgtgaactagattgtgtttaagcacatactgatgatttcctgtgctgccatctggttagacttggctgggaattgtcgctgagatttggaccactgttatggaattcttaagcataacattatgatagctgttgcatgatactgtcgtcgctaaatgttgttatcttggtatttcaatgcatgtactgctgtgactcgtattc

SEQ ID NO: 34993 - DNA, 420 bp, Zea Mays
ctcaaaagtgtcattgccacacccggttttgaaggtaaaccgaatgcaaaccatgtacgtgccaggatcagtaattcacgtacacagcgattacataaatgactcatcatagcataatgcttcgaattacaataaagagtaagtaataatattacagactagagtcatttacataatataaatcaaagtacacagaatcaaaacgtagccaacgtaaataaacccaccacaggcagctgactgggggaggtcgctagcctaatcctcgaactcatcgaagtcctggaactcccggagattcgcctcgacaccattctccttcttctttacctgagcatagattgcaccaaagacaacctggtgatttgtgaaagcaagggtgagtacacatcaacgtactcaactaatgtcctgtttggc

SEQ ID NO: 34994 - DNA, 5074 bp, Zea Mays
gccggctcccaaaaccctagcgcccacgccgcctcgatgtcgcctccgccggcggtggcgacgggcggttccggagaacccacggtgccggcgtggctccgcggcctcccgcgcgccccggagtaccgccccacggagtcggagttcgccgaccccatcgccttcctctcccgcgtggagcgcgaggccgccgcctacggcatctgcaaggtcatcccgccctacccgcgcccctcccgccgcttcgtcttcgcgcacctcaatcgctccctcgtctcctcctctgaagccgccaaccccaccactgcctccggctcctccgccactgccccctcgctgccggaatccgccgctgtgttcacgacccgtcaccaggagcttggcacgccgcggcgtgggcgaccgcctccgcaggtgctcaagcaggtgtggcagagcggcgagcggtacacgctcgaccagtttgaggccaagtcccgcgccttctccaagatccacctcgctgggcttcgcgagcctactccactagaggtggaatcccttttctggaaggcgtccgctgacaggcctatctatatcgagtatgcgaatgacgttccggggtctggctttgccgccccaaaacagtcccagcggcacaagaaacggagacgagagagcgatcaggtggaagagggggagaaaggctctgggtggcggctctcaggaagcccatggaacctccaggcgattgcgcgggctcctggttcgcttacgcgattcatgccagatgatgtgcctggggttacctcgccaatggtgtacatcgggatgctctttagttggtttgcatggcatgtagaagatcatgaattgcacagtctcaacttccttcacaccggtgcacccaagacatggtatgcagtccctggggaccgagcctcagagctcgaggaagttattcgtgtacatggatatggaggaaaccctgaccgccttggtatttgtcctttctcatgctcgccgtctgaatgtttcggttgtggtctagcaggtacaagctctgaaatggccagcgtttccattgggtcaaatgttcatgatattattcagacatcagattcttatgaattctttgctgatatgtactgtttcagctttattgaattgattgtgatgtgctatttgttaactatgtttattccagctttgctagattttcaccttcatggatttaattgtggtgaagctgccaactttgcaactccacaatggttaaaatttgctaaagaggctgccgtacgaagggctgtgatgaattatcttccgatgctctctcatcagcagcttctgtacttgctagcagtttcttttataaccagaaccccaaatgtattgtctggaattcgttctcgcttgagagatcggaaaaaagaagaaagagaactgctggtgaagcaggaattcttgcaggacatgattagtgaaaacaagcttttgtgttctttcctggaaaagaaatcaattcgtcatgttgtgctctgggagcctgacttgttaccatcttcgactgctctacattcctgttcttctggctcaaaagctcctgagaagaagtctgaggatggttgcagaattgaatctagtgaacgtggcaccaaagataacagctctgatggcagtgcacatatgattggcgcacaaactaaatttatgtccgggaatagcaaatcatctggaactgcatctgcttccatggatgaggtcaatgctgatactgatgatgaggatgacctaccttttgatttgagcattgattctgggtcattgacctgtgttgcttgtggaattcttggttatccattcatggcaattctgcaaccttcaagagaagtattggaagggatttcccttgctcacacgagtagatacaagatgagttctgaaaaagataattgttcaaacacaattccatgctgtcccactgacagatgttcatttgttcccagtagaccttcttggcctgcggaacagcaatgtctggctactcctttggggcaagctaacatcagtcatcagaatgtaaattcacataaagatgtttgtttaagggagaatgaacctaatgggcctgtgccacaatgtaacaatatttcacattcttgcagaagtgaaaatactcttcattcatgtagtgacaggggaaaatccgagaataagatttctgaggacagtcttggcccagaagtaggtgaacaaacaggcaaatatgtcatcaatgcgcaagctgcagaaagttctgatggtactattaactggaatacttattgtacatttgcacggccccggatcttttgcctgcagcatgcccttgagattgaaaagttgcttgagggcaaaggcggtgtccatggtctcattatttgccactcagacatttcacttgcaaaagcatcaaagtctgatttacatctgatcaatatttcaattgacgacgagggacatgaggaagatggaagagactggacgtcacagatgggtctaaacctgaaatattctgccaaactcaggaaagagaaatcagaaaatcaagaacagtctcctttgccatttgggggactgctttcctgcccttcgcctgtttcggttgttcctaatcttaagtggctttgcaaaagagcgcggacaccatacacagttattggtactatgaggggttctagtgcaacagcaactgctgcggaacttaagcctggagtgaaaacagaaatattcactaatggaaatgtttgcgaggatgacaatagacatcattcttttcgacaaactggcctcgagcaaccaggtggactgcaagattgtgataagccttcatgttccgaggagaatggccatggaagacattgtcttgttaacattcctatcgctgttgctgaatatcctatgatgcatcaagtccgtgagggtccagtgagtgttagcacgtgcaatgactccatttgtttgtcaggttccctggatttacctccacacgcctctccagttgaagtaactagatacctaggatgtatacagtcaactgagctgagcagtttaccagccttttctgttcaacatttctttaatgatgaaagtacctctgtggaaggaagcatagactgtgtaagcaatggctgcttagaatctcaggatgatattttagggagcagagatgaacgtttgcaagttcaacaatatcaagagaagatggggcttcgcaataaccccaatatgaagtcagttgattcacacctgatagaaggtttggctgtatcagaaggaaagcatggggaaactgtggcagcattccttgaaaacaaggagcgttgtgctaagacatcctactgttctaatactgaaacaaaaactactaaatctgcaatagacaatcgattggagactcatcatctgggtactggtccagtgaaactaaattcaagctttaatgagatgcacagtgctgatagacaatgcagtttagtctttggctgccttgactcagctgatgttcctgcttcaactcaggctctgtcagtttcacctgttttgatgagtgacgagcagcaggtcgatgacgcccattctgctgtcaaggccattgagcacctgggcaataatctggctaacataaagcacaaatccctgcatatggatgtcctcatgttagaggacgcccaagttgcttccatggctgcagtccctgggcatgagggagaatctgtcgaggctggatcaaattcttttgatattttacttggagctctggctgaagagtccaaggcagcagatgctcctgggaaagatgaagttggcaaagcttccttgacattaataacactggctagcaacgagccctctgttacagaaggcagagttgtagacgtggtggaaacagacacaattttgggagcaggaaaagatgataaacaacttgaccagccacatggcttccatttgtcagatctggtgtctagatgcatcgggagctcaaatagatccgatatcatatgctatgtcagacgcaaacacaaaaggaagagggattactcgtgtttcgtccgctctccctgtgagagcttgaggccaaggtccaagcctgcagtagtcgaggagtcggaatggagcagaacagccgaggcttcttttgctaaaaggggtaagaggacacaagcagtgggatcatttcagtgtgatattgatctgtgtgacatggcatttgagactagggccgaactcaatgcccacaagcgcaatatttgcactgacgagtcatgtggcaagcgtttcagctcacacaaatacttgaagcgacatcagtgtgtccacagcgagatgaggccatttaaatgcccctgggaaggttgtaaaatgaccttcaagtggttgtgggctcagactgagcatgtcagagtgcacactggagagcggccatacaagtgctcggctcctgactgcgggcagacattcagatacgtatcggattacagccggcacagaaagaaatttaaccattactgacagcttctagttttccgagttattggccgcagctcggggcaaatctccagctgcttgtgtcggtgggccttgtttgttgtagtagctcagctcacgtatttattaacaacctgacagctgataggcctagtgaatgttccccgttaacaatgggctagtaatttagtcggtgtaggagttagaaattgttggggggtgaagtgcaacccccttctgttggtgtaggtttgcataagctgatcaccccccactgacacgtggccattcattatttgtttctcagatcagtgatgatgtatttaatccctgatgacaaacttcatgaacactgaaaccatatgatgtcggatgtcaaaatgatcaggggttgccaccgtcctcatgtaattcctgtcttcgacacattgtccaggtcctcattattctgtcatactgtttcagcagattacttgtatgcctttgtctacgcgaaatctaatcatttttaaattcagcgagatgctgccatctatatgccactgtttcgcttagatttaac

SEQ ID NO: 34995 - DNA, 520 bp, Zea Mays
tttggtcaggtctcagtcatacagattgcatcagataagatagctagccttcatttaaaaaaaactgtatgaagatgacccaaaagcattggatagctgcttgaggcatattatgtgtccatctaagatactaaagctgggctatgatattcaatgtgatctcatcaacaaagcaatcgtatggagaattggaatgttttcagtcctattaaatgccacttgatttgcagaagctgttcaaaggggttactggtggcctctctggattgtcaaaggtatataaatatacaatcgtcataaaatataaactggttgcagttaactgttgtccatctacttttgacattttcttgttatgtagaatgtcacgtgccatgaaacactgccaagaaatattaggagctggtttgaaaaaggcccaacgtaatagcaactgggagcaacagccactaacccaaaatcagtgtcgccttccatcaatcgtggcatcaccgaagccagaaatatagaagacgcggaa

SEQ ID NO: 34996 - DNA, 1818 bp, Zea Mays
gccagcagacccctgtacgacgcccgaagtggccgattccctgagatcccaagcacccgcccggcctcgtccctgatctccccggggcgcgcgcgggcgacacgccacgcggccggcgagacggaggagatggctgccgccgactcggccacggcctcttcctcctcccccccggagtgtcccgctgccccttccattccgacggaccctgacttcctcagctgcgtcctgcagccaccgacctcctcctcgtcccgcctccttctccgccgcaagcccccctccgcccttcagcaccgaatggagtggcggtgcaatgacaacggctatgtcgcctaccgcaactttctcctccggcgcatcgacggcggcagcgcccagagcacgcccagcaacagtggaaggtgggctccctctccggtacatgctatactctccgaggcagacagctggaattatatgcgggacttgagaagtaacagcggagtgttaaaccaggccataagtattggctcaaagcagagcgatactgagcggcatgtcagatttgccgagcctgcatactcatttgttggagtgcactgcatctttgacaactgcaaagcctcagttactatactgaaatttggccgtgcaaattctgatctgcttgcatatggtgcggcagatggcagcttgatggtctgccaggtttctgagccaccatctgttcttcaaaaaatgatagggcattctaaaaatatcacagtacatagcttcatgctctctggataaaactgtgcgagtatgggaaatctctaaaggcacatgcatcagggtcgtgtatggagtttcttcccagctatgtatctgttttcatcctgtgaacaataatttgcttttagttggtaatgcaaacaaggaaatcaatgcaataaattttagcactgggagagtaatcagcaaacttaactttgatgacgcggttacagctttggatattgatcacaccgggcagtttattttcgctggtgatgcacagggttacatatatactgttagtgtgaactcacatacagggtcattatctagaactcacaagaacaaaagtagtaagagcaaatctcctattacaaccatccagtatcggaccttctctctgatggcacgctgtccagtacttctttcttgtgctcaagatggaaacctttcttttttcagcatcacgacagatgctaagggatacttgactcttatatgctccctaaaattggcctcacgggtgcagactatccgtgcttcgttctgtccacttctttcccttgagaaaggagagttcatagtaactggaagcgaggacgcaaatgtttacttctatgatttggcacgcccaaagaattcgtgtgtgaacaaactacagggacatggttctccagtaatcggagttgcctggaatcacggggagaattttctggcctcatctgattcagatggcacagttatcgtatggaagcgatcgaaaacgagttagagcgattccatgccatgaaggatgtttttatagagcaaaaggtagatgttgtttgatgattccaacaaaggctttttttttgttgtacattggacctccatgggcattgtttgtaacataactacacaaggcatgggcaaagatcaaccggccttgattgtatttacggtagtataggtctccgtgtatgtagagtgtaaagcatttgtggcgatatatcctgtgtcattcgttttaggattgtatctttgtttcattcatgatttttgccctccaaatatgctgaacttggacatgattaacaggaa

SEQ ID NO: 34997 - DNA, 1568 bp, Zea Mays
aaaaaaattcggtagttccgacacttccgggtccaatccgagagtcggcagacgtggggacctgccattggatggcgctggatgcccttcactcccgtcccagattcatcgtcctgcagctcctcttccatctccgatctgctgccataccactaccacaccatggatagccaaactccactgcataacccgctgcgaagaaaccttctaaagtgactaagtgatcgatctccttgtcctgaaaggctgaaacctaaggcgagagaggccacgggagagcgccatggttctcctgctcctgggctgctctcctgcatcgtcgcgcccagactgctctccagcttccaggagaagatgcagcaccgccggacagaaaatggtcaggtgctctctgaatgaagaaacgcagctgaacaaacatggactagtatccaagcagttaatttcatgccttgctgcttcgcttgtgttcgtctctccacctagtcagaaacctttgcccgtccaggcttgtgccagattgcaacagtggcagccattgacagtgcttcagttcctctgaagtttgacaacccttcagatgatgtcagcacagggatgatgatgaggggtatgaccgccaaaaacttcgatccagttcgctactctggtagatggtttgaggtagcctcgttgaaacgtggatttgctggtcagggacaagaagactgtcactgtactcagggagtgtattcttttgatgagaaggcacgctcaatccaggtggatacattctgtgtccacggtggacctgatggatacatcaccggcattcggggcagggtgcaatgcctatctgaagaggacattgcaagtgctgagacagatcttgagaggcaggagatggtccgtgggaaatgctttctccggttccccacactgccattcatacccaaggaaccctatgatgtccttgcaacagactatgacaattatgcaattgtgtctggagctaaggatacaagctttattcagatatactcaagaacacccaaccccgggccagaattcattgacaagtacaagtcttatgttgccaacttcggctatgacccaagcaagatcaaggacactcctcaagactgcgagtacatgtcctcagaccagattgcgctgatgatgtcgatgcccgggatgaatgaggccttgacgaatcagttcccagacctcaagctaaaggcaccggtcgcacttaacccattcacaagcgtgtttgataccctgaagaagttgcttgaactgtacttcaagtaaaaaacagtgtagcattgtccagtagccaatagccaattgcccaacttctcgacttggatcttcaatggaatgaagttcagtttattctgacgtttgctagtcagttagttctttttaagtacattgtttttttgtctattatataagagtgggatatgtaagattaagatctgttcagctgttctcggttactgtttgtacaattgttctttttcctgatgtttttatacaccattgcgattgtctgtccctggtatgccatcgcaaaatcactt

SEQ ID NO: 34998 - DNA, 953 bp, Zea Mays
catttatcacatttgcacttgaaggaatgtttctggtgtattccttgctgagagattaaatacgttcctggcgcaaaactggaagagcttctctacccaaaactattttgatccccagggccttttcatttcggtcatctggtctggccctctcctcctgataacgatccttattctggtgaacactctcgtgacgctctgcacgctaatggtaaggtggaaaagggcagagctcaggcatcgcgctcggcaagctcgtgacaagcaggactgatctgaaacctgcgtctatgtatcattcggtggcaagtagaaagtcgtgttcttgctacggttggtctaaccaagaatcacatccctggaaacggtgcccatttcattaggtagcagaatataacgttaagatggtcagattttgctcttgtggacccttttggtgcccggatagccatttactacgctgcaatattatcacgtcacgcgatttctttgggcgaggacactaggcctgtgataatgatgtgtccatttgttcgatgctgaacctctgaacctcggaaccggttgatagttgttgttttcctagctgtgtcgggtcgggtgcagcatgctctgattgttgattacctcaagaataattcgttggactgctgaattttagccatctttacagatgttccgatctgaaactgtcgctcgaatttcactgcatctggtgtcggtgtgcaagctattcctgatgtttgtgggcacttgaaaatgttctctggttgtactatggactgaatgatgcatggcatccgttgtcagcttcgtgtgtgaaagggggatgctttcttgttttgccagagttgcaagagaggtacacattcgcaatccgtgtgtttggttgcccgtgtcgcctggtgcatggcccatgggatgcagaaataaaacaaactcattgtttggtt

SEQ ID NO: 34999 - DNA, 6276 bp, Zea Mays
caggagtgctggaagcatttcaccctgcctccgcgaatcaacaccccaccggccaccctctcgactcgcttcaggggccaagccagtgtcgcttttgaatccgcctccgttcggttttccccaaaacgccttccttccactactgcttggcatccttggattcgtaggcagtcagatcacgcggcgcgcctcccctggtgactgacctagggctcgccgcgagcgcgcggcgatggcgtcgtccacgtccaggcgccggaggggtgggggcctcgagcgggtggcggacaactgggagcgcctcgtgcgggccgcgctcaagcgggaccgggaccacctccgcgtggggggagccccggctgccgtgggagggcagaggcttgccgacgccgtgccggcctcgctgggtcggaccaccaacatagagcagatcctgcaggccgccgacgacatcgaggtcgaggaccccaacgtcgcgcggatcctttgtgaacaagcgtacacgatggcccagaatctggatcccagcagtgaaggtagaggggttcttcagttcaagacaggtttggcatctgtaattaagcaaaaacttgctaagaaggatggggctccgatagaccgacagaatgacgttcaagtcctgtggaacttttatcttgaatacaagagtcgttgtcgggttgatgatatgcaacgtgagcaggagagactgagagagtcaggaacctttagtacagagatgggaaatagggcaatgaaaatgaagaaagtttttgctacattgagggctttgcttgatgttctggaaaatcttgttggtcagtcaccaactgatagacttcatagacaaattctggaggagataaagagaataaaaagatctgatgcagccttgagaggtgaacttatgccatacaacattgtaccccttgatacatcatcgtcagtggcaaatatttttgggtttttccctgaggtcattgctgcaacagcagcaattcagaactgtgaggacctgccacgattcccttttgatacaccccagctaagacaaaaagacattttcgaccttttgcaatatgtttttggcttccaggaagataatattcggaaccagcgtgaaaatgttgtacttatgttagccaatgctcagtcccggttaagcctgcaaattgggtcagaacccaaaattgatgagatggctgttactgatgttttttgcaaagtcctggacaactacataaaatggtgtaggtacttgggcaggcgtgttgcatggaccagccttgaagcagtaaataagaaccggaaaatcatattggttgccctctactttctgatttggggtgaagcagcgaatattcgttttctcccagaatgcatatgctatattttccacaatatggcaaaggaactcgatgggattcttgattcatctgttgctgagactgcaaagagttgcactactgagggttccacttcatttcttgagaaaataattacaccaatttatgataccatggcagcggaggctgaaaataataaagatggaaaagctgcacattctgcttggaggaattatgatgacttcaatgaatatttctggtcacgctcatgctttgagcttggttggccacctgcagagggttccaaatttttgcgcaagcctgctaagaggaaacgtacaggaaagaccaattttgttgaacatcgcacttttctgcatttgtaccgcagtttccaccgcttgtggatttttctgctattaatgttccagctcttagctattattgcctttcaccatgggaagatggacattgacaccattagaatactacttagcgctgggccagccttttttgtactaaacttcattgaatgctgcttggatgtcatactcatgtttggtgcatataagacggcaagaggttttgctatctcaagattagttattcgatttctttggttaactgcagtttcaacatttgtaacctatctctatgtgaaagtcctggaagagagagacacaaggaattcagattcgacttatttccgaatttatggtcttgttcttggtggttatgctgctgttcgaatcatgtttgcactgatggctaagatcccagcttgtcataggctctcaagtttttctgatcggtctcagtttttccaatttttcaagtggatataccaggagcgatattatgttgggcggggactttatgagagtattagtgattatgccagatacgtgatattttgggtcgtcatactggcatgcaaatttacttttgcatattttctccagattaggcctttagttgaaccaaccaatattattgtgcaactccatgatttgaagtattcctggcatgatcttgtatcaagggggaataaaaatgctttgaccattctgagcctatgggcaccagtcttagctatatacctgatggacatccacatttggtacactcttttatcagcacttgttggtggcgttatgggtgccagagatcgccttggagagattcggtcaattgaaatgcttcataaacgttttgagagctttccagaagcgtttgctaaaaacctttccgcttcaaggttcttaaccctattctcaatatttgaatcagaaattacaactaagacgtatgcctcaatattttccccattttggaatgaaattatcaagagcttgcgtgaagaggactatatcagcaacagggaaatggatctgcttatgatgccaagtaactgtggaaatttaatgcttgtacagtggccactgtttctattgactagcaagatcatgttggcaaatgactatgcttctgactgtaaagactcgcagtatgagctatgggatagaatatcaaaagatgaatacatggcttatgccgtcaaagaatgttactacagcactgaaaaaattcttcactctttagttgatgctgaagggcagcactgggttgtaaggcttttccgagatcttaatgacagtatagcacagggttcacttttagtgactataaatctgaagaagttgcagttagtccagtctagattgacgggcttgaccggtcttctgatacgcgatgagactgctggccgtgcagctggtgttactaaagctcttcttgagctttatgaggttgttacccatgaatttctttcacagaatctgagtttgacacgtggcaactgttgttaagagccagaaatgatggacgcctattctctaagattttgtggccaaaggatccagaaatgaaagagcaacttaagcgattacacttacttcttactgtcaaggacagtgccaccaacataccaaaaaatcttgaagctcggagaagattacaatttttcactaattctctattcatggacattccacaagcaaagcctgtatctgagatgatcccttttagtgtctttaccccatactacagtgaaacagttctttatagcatgtctgagctttgtgttgagaatgaagatggcatttctatacttttctaccttcagaaaatataccctgatgagtgggctaacttcttagaacgaattggctgtggtgaatcatcagaagatgattttaaagaaagtccaagtgacaccatggaactccggttttgggtatcttatcgtggccaaactttggccaggacagtgcgtggaatgatgtactatagaagagctttgatgttacaaagttacctggagaggagatgccttgggggtattgaagatggaaattctgcagcagaatatattgacactcaaggctatgagttatctcctgatgcacgggcccaagcagatataaaatttacttatgttgtttcttgccaaatatatggactacagaagcaaacaaaaaaacaagaggctgcagatattgctctcctactgcaaagaaatgaggctcttcgggttgctttcatacacgaagaggaaatcatatcaagggatggtaaggctacaacaagagagtattattccaagcttgtgaaggctgatgttcatggcaaagaccaagaaatatactgcattaaattgcctgggaaccccaagcttggtgaaggcaaacctgagaaccaaaaccatgccataatcttcactcgaggagatgcagttcagacgatcgatatgaatcaggataactacttggaggaagcaatgaaaatgagaaatttacttgaagaatttcataatgctcatggaaaacatggcatacggaagcccacaatcctaggtgtgagggagcatgtattcacggggagtgtctcttcgctggcgtcatttatgtcgaaacaggagactagttttgttactttggggcaacgtgttcttgcttacctcaaagttcgaatgcactatggacatcctgatgtttttgatcggatatttcacataacccgaggtggcattagcaaggcgtctcgagtgattaatataagcgaagatatatatgccgggttcaattcgactttgcgccaagggaacatcacacaccatgaatatatccaggtggggaaagggcgtgatgttggcttgaaccaaattgcactatttgaggggaaagttgctggaggcaatggtgagcaagttctcagccgagatgtgtaccgtctgggccagttatttgatttcttcaggatgctaaccttctttttcaccactgttggttattatgtctgcacgatgatgactgttctaactgtgtatatcttcttgtatggaagggtttatctggcactctctggccttgactactcaatatctcgccaagctaggtttttggggaacactgcactagatgcagctttgaatgctcaatttttggtccagattggtatttttacagcagtgccgatgataatgggtttcattctggagctggggctgatgaaggctgtttttagttttattacaatgcagctccagttctgttcggtgtttttcaccttttcgcttggaacaaggacacattactttggtagaacaatccttcatggcggtgcaaagtatcgtgctactggaagaggttttgttgttcggcacataaagtttgctgaaaattataggctctattctcgaagtcactttgtcaaagcgcttgaggttgctctcctcctgatcgtttacattgcatatggatacacaaaaggcggttcatcttcatttattctgattactatcagtagttggttcctcgttatgtcctggcttttcgcgccttacattttcaacccttctggtttcgagtggcaaaagactgttgaggactttgatgactggacaaactggttactttataaaggtggagttggtgtaaagggcgacaacagttgggaatcttggtgggatgaggagcaggcgcatatccagacattcagaggacgtattcttgagacaatcctcagccttagatttctcatgtttcagtatggcattgtgtacaagcttaaaattacagatcataatacttctcttgcagtttacggcttctcatggattgtactctttgttatggttcttcttttcaagctttttactgcaactcctaggaagtcgacagccttgccgacttttgttaggtttctgcagggcgtccttgctattgggataattgcaggaattgcccttcttatcgtgctcacatcattcactgttgctgatttatttgcaagtgcacttgcttttatagcaaccggctggtgtgtcttgtgtctggccgtaacatggaagagggtagtgaaagtccttgggctatgggattcagtccgtgagattgcaaggatgtacgatgcaggaatgggagccatcatctttgtgcccatcgtcgtcttctcatggttccccttcgtgtcaacattccagtcacgtttcctcttcaatcaagcgtttagtcgaggtctggagatctccctcatccttgcagggaacaaggcgaatcagcagatttgaaaggccctgccgcatccatcgtatttttctgttgtatattctgggaattactgagagctgcttagttagtttgaacaatttaatgagctcgatttgaatgacaaccttctacataattgcccctgtaatttgtacactaattatgcggagaggcagctacggcagtagagatgagctgatgtatgtcgatttgatcttaaccaaacctctctttaaggctacgacggttcagtaggcctgcactagtatgttgcacccatccacagatataaaaagaaaaatattcttaatataaaataa

SEQ ID NO: 35000 - DNA, 1417 bp, Zea Mays
acaaagggattaggcgcactccacccatcatctagctgtcttgagagagctgagccaggagcggagggaagaataccacgcgctgggtccgaaccggagctggactggattcttcaaggcttccattccattccatgggggttcggttttctggagtaggaaagggaggtagaggtggacgccagggttcagcgataccacctcaagaaagcaggcctattggaatagcggaaatgaacagcagcggggagtacgatgctgcgttcgcagccacaattgcagcagcagcatttgcaatcgctgcccgtgaggataagctcgcggctcaaaagaactccgtccccatcgaggaggtgaccccttccctatcgccagtcaatagagctgaaggcaccaaaaagcctgcaggaggcaacaaaatcgcgagatggtttagcggcaaggagcctatagaacacgacgacgacgacgaggggccagttaatgtatcggtaaggaggccactgaaaccagcacctggaaagcctgaggacgtgcctgcagatcatcacaaggtggcacccaggatgcttgagacttctctgggtgtgaggaagggttcgggatcttccagcaggtcggcagagaggaaatggagcaaggagtttgagcaagaacaggctgttcagaaagcgccctcggccgtgaggccagccacgtcataccgctctggacggaatggagaaggcgcggcaggagtagctgctactggcggcacgggatctaaggctgatgaatgggagaaggcaaagcttggaagagttagagaggagtatgagaagatgatggagaccatagccgaatgggaaactgagaagaaggtgaaggcgagacgccaaaaagagcagaaagagaccgagctggacagaaagagagaaaaggcactagaagaatacaacctggagatgacaaggatcagcaaaatctctggaggagcaagggcgatggcggaggagcgaaaatacaacgataggaaaaagatcagagagaaggcgcgcaagatgcgatccacaggaaagcctccccgcacgtgtgcttgcttttgagaacagctgcatacgctgaaatttggaaccaaaaccaaatgaaggacgtcattttggacggttgtaaaaggcacgcaatagtgacgttctgtattgtaatatgtatttggctttgacaagttatgagtgcacattccactgaaggcaacatcaacatatttttgaagggtgtggagttaaggaataaaaaaaaagatccaccatgcatcaacattcaagatgaagcatggagtaggaactgccccaagaacaacgagaacgaaaacatatattcatcataaaggtcaagatttaggattcccattcaagtccaccctgttctgaagtatttt

SEQ ID NO: 35001 - DNA, 1283 bp, Zea Mays
tctggagtgactaaacgcaagggcagtggcatcatcaagtaagaggaccacaatcagttttcaagaattaaaccaaaagaaataccgcacgccactacttctagggattggcctacttgtactgcaaaatcttagtggaatcaacggtgtactgttttatgcaagtagcatcttcaaagctgcaggggttacaaacagcgacttggccacctgttcacttggtgctattcaggtccttgctactggagttacaacatggctgttagaccgagctggacgacgcatccttctcattatttctacctctggcatgactctatgccttcttgccgtttctgttgtattttttctcaaggataacatttcacaggattctaactcatactacatcttaacaatgatctcccttgttggtattgtgtcttttgtcattaccttctcgtttggtatgggtgccattccatggctcatgatgtctgagatcctcccggttagcatcaagagccttggcggaagcatcgcaacactggccaactggctgacatccttcgccataacaatgacgacgaacttgatgctcacgtggagtgttggaggcacttttctctcgtacatggttgtgagcgccttcaccatcgtttttgttgtcctttgggtgccggagacgaaggggagaactctagaggagatacaattttcgtttcgctgagcattcagcgtcagctgcaatggttgcccgagtgtttatcttagggcctgtttcgatcccatgagctaaagcaaaaagaagctaaaatttagtcactttataaactaaagttccaatcaggaggagctaaaagtgaataaaatagcaaaagaatatcttttagtcacttttagcttctaaagaggagctagaatttagtcccttgttttagcttatactccttccatcctaaaaaaatataggtctttctaacttttcttttttctgttcatattcattcgaataatgataaatatagacatacgtataaactattcattaataaatgtatcaaataaattataggcctgtttggtttgctgtctaatttatcatattttaccacacttttgtgactaatattatggcccgtttggcacagctccagctcctgattctaagcgaggatctggaggagccgtgccaaacggatattttttaaactgattctcgtgtggagccgaaagatcgggagtcgtttttgtgaagaaaggtgggatctaaaaaaacctgctccaccctccattaaaacagc

SEQ ID NO: 35002 - DNA, 2584 bp, Zea Mays
atcccgggcaaccaaaggagccctcaaggtggagcgatgacggaagtggaggcgccgctcatcaccgaggtggagggggtggagggccgtggcttctgcggttccgcgtccaccggagggggcagctctggtctcggcagcggcgtgcggggcacgaggcagtaccaccgccgctcggacgcgctcgcctacggcgaccgctaccagaaggcggcagcactcgtcgacctcgcagaagatggtgtcggtatacccgaggatgtcttgaatgacacaaggtttgagagggccatgcgattttatttcgtgtatctccgattggattggctctggtcacttaacctatttgctttgattctattgaatttcctagagaagcctctctggtgtcaaaagtacgccccacatacttgtgatcaaagggatctttactttcttgggcagttgccatacttaagcaaaacagaatcactcatatatgaggcgctaacccttgtcattcttgtcttggatatcttctacccactttcctacgaaggtttaaatctattctggaagaactccatgaataaattgaaggttcttcttctcttcatcttagcatgcgacatacttgtgtttatgcttagttctggacctttcagagtagctccgtacattcgtgttgtgtttctaattatgacaatcagctggctagcctatgtaacatttgaggacacaccacaaggaaagaccattttcacatcatacggtacaacattatatcagatgtttgtcctgttcaccacatccaataatcctgacgtatgggtccctgcttacaagagctctcgttggaacgccctgtttattgttatttatgtgctgttaggagtttatttcctaacaaatttaattcttgctgtcatttatgatagctttaaagagcagcttgcaaaacaacttgctcaaatggactctataaggaaaagtattctacagaaggcatttgatctcatcgatactaacggtcagggttaccttaacaaagaacagtgcatatcgttactggatgagctaaacaagtacaggtcgttgcccaaaacctggagggaagattttgaactaatcttttccgagcttgatcggagtggtgatttcaaggttacctccgaggaatttgctgacctatgcaatactattgcaataaaattccagaaagaaccaccaccttcatatctggagaagtacccatctttctaccattcaccacagtgtgaaaggttgaagtcctttgtacggagtcgcctgtttgagtatattgttgtctttgttcttctggtgaacctaattgctgtcgttattgaaacaacgctagatatagagaacagctcttcacagaaagtgtggcaagaagtggaatttgtctttggatggatctatgttgtggagatggcacttaaaatattttcattaggatttggcgcctattggatggagggtcagaataaatttgattttgtgattacttggactatttttattggagagactctgacatttgccttcccatcaacgcttccttttctttctaatggagagtggattcgatatcttctccttggaaggatgttgcgtttaacaagaattttgttgcaaattcggcgtttcagagcatttgttgcaacattctttaccctcatgtctagcttgttgccatacttggggactgtgttttgcatactttgtgtatattgctccataggtttacagttttttggtggcatcgtgtatgcaggaaacttgaagttggaagaaacagatctctttgggaacgattatcttcttttcaacttcaatgactacccaagtggtatggttactctgttcaatttgttagtcatgggcaattggcaagtctggatggagagctatgcacacctgactggaagttcttggagcctggtttattttatcagtttttaccttatttcagtattactgctgcttaatctgattgtggcatttgtgttggaggcgttttttgctgagatggaactggagaaagctggagaagctgatacgcaggattctaccccacaaggaagaaacaagcggcgatccatgcgtgtgaggacgaagggtactatggttgacattcttctgcaccatatgttgagcaatgaacttgatggatctcaaaactcggattgattactcatcttaatggtaccagatcactagtactaccctgctgttcttttaactttgaccacggcttccgttatgaacacctgtctcatctatactctacagcatccgagacttcgattggtaatttatataccatacgtatagcttaaagtgacacaacggatactgacagatgcttatttatctgcaatttcagtcaatatatatacccctacattttttttttgtttttatatgtatcttctacagccttctgatttctgacagtgtggaatatgccgtattgagtagacagtattggttgtattaagcaactcgtatgaagcgaaataacagttcaaagggagttgtatatttctccaacaaaaaggacctacttcgttaggggagg

SEQ ID NO: 35003 - DNA, 629 bp, Zea Mays
agtgggcacacgaaaaatatggcgtgcgaaacactggtggacacactccaggtttgagcataaaaacattagttttgagcgtaaatagtgaccgatacaacgtaaatcctcgctggatcgcccgctacctcctcgtcaaggcaccgagggatccgtacgccacgggacgcctcccttgttggatcaggccaccatctcttcgtggaaccgccacacatgtagcccgcagccgccgcccattgccgctcgcgccttgtgtagccatcgcctagtcgttcgagcctcgtgcaactgccaccaccgcttgtgcctcccgcgactgctgccacagttggggcatcgcgcggctgtagccactgcttgggcgtcatatggctgtagctgccgcttgagcctcacatggacgccgacgtcgctcctctcacgatgccactgtagctcctcttgcggcgccgttgtcgctcctctggcgacaccagcatcgcacggcctcgcgcaaccgcctttgtcgccgctggtgaaaccctaatcgtggttatttgggggaggttttataaatggcccaaggcctggtctggttgaagtggtgcggttaaaccagatgcaccattaggccaaggctttctcta

SEQ ID NO: 35004 - DNA, 1992 bp, Zea Mays
cctccggccaccctcggccccacgcctccatggtcaccgccacgacaaccccgccgcaatgctggcgagggctccccgccttggcccgggcacctccacccctctcctctcctcttcggccgcgtgccgtagcggctgcggctcccatctatcctctcaggcgccgcatcgctattactacaaccagaggaaggcgaggcacactggactgttcccccaggtgtacgctggaaaccgccggccctggcttctaccctctggggctctacgaggaggggtctaattctctgtcgcggtctcccctgtctaccttctttggtatcatggcgccggtatttgggagctccagcggcggtggtgcaagtagggagaaggcgtccgggcgaggagcagcagctgcaattgaggatagctccattgacattggtgacttcttcaagggccctctacctgggaagttcctgaagctccttggttttttggccttgtctcggcttggtgtgtatatacctttgggtggggtcaaccgagaagcttttgctgggaaccttgaccagaacagcctgctgggcactttagattctttctctggtggaggcattggccggcttggaatttgctcccttggcattgtaccatttatcaatgcacagattgtgtttcaactccttgcgcaactctacccaaaattgcaagaccttcagcggaaagaaggggaagcaggaagaaagaaggttcttcagtatacaagatatgcttctgttggatttgcaattgttcaggccattggacaagttctttatctccgtccctatgtgaatgatttcagcacagaatgggttctaacatctgtgacattattgacacttggatcggtctttactactttcattggtgaaagaatatctgatctgaaacttggaaatggaacatcacttcttatatttacaagtataatatcatatttgcctgcatcatttgggaggacagttgcgcaggcatttcaagatgggaattatgttggacttctcacaatcatattgtcattcttactattagtccttgggattgtctatgttcaagaagctgagcgcaaaatacccctcaattatgcttctcgttacagcagtcgaactggggaacttcagcgatctgcatatttaccatttaaggtcaacagttctggagtcatgcctatcatattttctacatcttcactggctttgcctggtactttggcacggttttctggcttagactttcttaagaaggctgccatagcccttaatccaggagttagatcctgatgatcttagtgaacaattgaagcggcaaggtgcttcgataccacttgttagaccaggaaaaagtacagctgcttatattaaaacagttcttagtcgcatatctgtcttgggatctgcatttctggctgtgctagctgctggaccatctttagttgaacagacaagtcacttgacagcattccgtggatttgctgggacttcagtgcttatccttgttggatgtgcaacagacacagctcgaaaagttcaagcagaaataatttcccagaaatataagaatattgagttctatgatgtcaaccgttttggccaatagttgatctcactggtcattcttttcaacctgtacttagatttttatttgtgtaattgaatatcggatccgtaaggccgtaactaagtatttccttgttgttcacttggatcttaatttttttctactgtgtatagtactgaaatctgtactcaaggtacacaaatcattcatctgtacgctaacatgtcagagcactcaaatcttaaacctatgaatgcttattgttattcacagttcttgttgctgatgatgtaacatgtattgttacattatgattcccttccatatttattgtgttcaactttattagatcaactgaagaattggcttagtcgtcatgatttctattagacaaggtgagatgtactg

SEQ ID NO: 35005 - DNA, 1597 bp, Zea Mays
actcttctctcgcaagcaacgagtgctctcactctgctaccagcagcagcggcagcagcacacaggccacagcggccgcgctgctgtgctggtgtggtgccttgtctcttctctcgtggtgcggaaagcaggtagagaaggagaagcggggggagagagagcgtcaggcaggcaataaatggcagtttaggtgcgcgcaggccgatggcggcgtggcaggtcctctctgtcgcctccaccgtcttagtataactccgtccgcgcatcagtcgcagagcgcatgagctagcacagactaccagcagccgtctgtactctgtagtaaggggagggaagcggggaggagagatcggggcggcgggcgcgctgctctctctgaccttcaccttccctgccacggcgcacggcacggaggcctatggatttgggcgcatggcggggttccctctaggcggaggaagccacacccagagccgcgacgcgcccgcctcgtccgtcccgccggtgcatccctccgacgccgcgtccttcctctacgcggcgcgcgcgggagcgggcctgcagctatggcagcagcagcagcaacacccgttctacaactccaacatcatccgcttctccgatgatccacccggcgccgcgccctcgctcacgggcgccgcgtcgccgtcgtcgccgtcgcgcggcccgagggccggcgggggaagcggcggcggcggcggggtcagctgccaggactgtggcaaccaggccaagaaggactgcgtgcaccagcgctgccgcacctgctgcaaaagccgcggcttcgcctgcagcacccacgtcaagtccacctgggtctctgctgccaagagacgcgagcgccagcagcagctcgccgcgctcgcggcctccgccggcgacacagccgcggccgccggcccgtcccgcgacccgaccaagcgcccgcgcgcacgcctctccgtcgccaccccgacgaccacgtcctcggatggtcacggtcgccgagaggttcccgagggaggtgagctcggaggcgctgttccggtgcgtgcgcctggggccggtcgaccgggccgaggcggaggtcgcgtaccagaccaccgtcagcatcggcggccacgtgttcaagggcatcctccacgacgtcggccctcgtagcttgcctgccgctggaggcggcgccgccgccgccgccatcgagtactacttccgccacgccgcggacggatcgccgccgagcaccacaggcgccgctggcgaagcgtgcggcgccggtggtgtgggcaatgtcgtcgtgtcatcggctgtggtgatggacccgtacccgacgcccggaccctacaccgccttcctgcctggcgcgccgttcttcccaggccacccgagacagtgaccggcggctcgctcgatcgccagccgtctcgctgtgtaacgacatcacgactccatctccagctcgctagatctgtcaatttcgttgggtttcaattgcatgcatgtgaaaggaaatagtgacaagatgatgcttcagtaatgttgctgtccgacctcatgtacagaagaggatatatgtatatacacactgacacacaag

SEQ ID NO: 35006 - DNA, 429 bp, Zea Mays
catatcggaggtgcatacatattgtcgtggtttcggaaacgagggacaataagatttgtgttcggtggaggatgctagcgtggacttactccgaatggtgaatcgctgttattcaacgagagatctgagacacgggggttatactggttcggtttcgcaccctactccagtgtagtgttgatcgtagtattgctttgagcatgtcacaacaagtgtgcttgtgtgcctagaggaaagagggcctacccttttatacctcaagggttggaccttataagggagatctgtttttttacatgttggcttataactgggtatgttagtatctctttagttgctttttggagtgttggcataaatcatcaaaaaagagagattggaagggaaatgtgcccttggaccatttctatttagttttagcgattaaat

SEQ ID NO: 35007 - DNA, 3062 bp, Zea Mays
cacaaattgactgtaacctgtttgaccggtagagcatactacccaacagccgccacaacgctcctcctacgtttctttcttcctccacacgcctgcttgttcacctccatggctgatggctccatctcctcctgtccctaaccccctccggccctcccctcctccaaagccctaaaccccacgtagctcggtgtgtcagtccactcgcccgcccggtcggcgccgcacccatctttcggattctaccctaaaggcatgaccttggtcttccaatctggaaattgagtagcaatcaagtatggctgcaagagcaatcacgaggagaaggaagtatcttttcgaccatgttaaaacacctaacctctcatcttcatcctctactttccaacatggaagaattggttctgaagatgagccaaaaataacactactgtttctggagcaaagctctagggattcaagatctgagaaggagcaatactgtgtgaatttgactaataggaatttggcaggtattgctaatagatttctgcgacgtccagctcatgggatatctctttcatattatggaattggaaagaatgactttgggttgccactgggagctagatctatgctgcagtcagttcgtgcatcatcaactgcaaccgcagggcaacctaagttggatattgatgacgaacagagtggggatcagaagcaaaatagaaagaaaaaagagacatccccagaggaatgtgatcaggctgtggaaggcctaagcactgcaaaagctaaagccaaagctaaacaggtccaagaatctctcaaggctagccaatcggccatgcagaaattctgggcaaggcttttgggtattggtcctgctctgcgagctgtggcttcaatgagcagggctgattgggctgcaaagcttaagcattggaaggctgaatttgttactacactgcagcattactggttagggacaaagctactatgggcagatgttagaatctcatcaagattactggtgaaacttgctggtggaaaaagcctttctagaagagagaggcaacagctgacacgcacaacagctgatatcttcaggctggtaccatttgctgtgttcatcgttgttcctttcatggagttcttactgccagtgttcctgaagttatttccaaacatgcttccatcaactttccaagacaaaatgaaagaagaggaagcattgaagaggaaactaaaagcaaggatggaatatgcaaagtttttgcaagatacagcaaaagaaatggcaaaggaagtccaaacatcacgtagtggggatataaaacaaactgctgaagatctggacgagtttttgaacaaggttaggagaggtgaacgggtctccaatgacgaaatcttgagctttgcgaagcttttcaatgatgaacttactttggataacatgagcatatcacgcttggtaaatatgtgcaaatatatgggtatccggccttttggtacagatcactacttgaggttcatgcttcgcaaaaaactgcaagacattaagaatgatgataagatgattcaagctgagggtgttgaatctctttctgaagaggagcttcggcaagcctgtcgggaacgtggtcacctaggtctactgtcaactgaagagatgagacagcagctccgagactggttggatctctcattaaatcatgcagtgccatcttcacttctcatactttcaagagcttttactgtatctgggaaagtgaaacctgaggaagctgttgtagcaacactatcttcactaccggatgaagttgtggatacagttggaacagtactgccatctgaagattcagtttctgagaggaggagaaaacttgaatttcttgagatgcaagaagaacttatcaaggaggaagagaaaaggaaggagaaagaagaaaaagcaaaacaagaggaagaggaaaaggcaaagctcaaagaaacgaagggttctgctgaagatttagctttgaaagaaatgattgaggctactgctagggaagaggaactgcgaaaggcaaaacaacacgacagggaaaaactctgtaatatcggccgagcattggcagtgctcgcatctgcatcatctgtaagcaaggagcgtcaggagttcttgggacttgtcaacaaggagatagaactatacaactcaatgcttgaaaaggagggtgcagaagaagctaagagagcatacatagctgctagagaggaatcagaccatcatgctgaggctgctgcagaagaaaaaatttcatcagcacttattgagaaggttgatgctatgctccaagaattagaaaaggagattgatgatgtggatgcacaaattggaaatcgttggcaactgcttgataaggaccatgatggcaaagtgacccctgaagaggtggcggcggcggcagcttatctcaaggacaccatagggaaagaaggcgtgcaagagctcatcagcaacctttctaaagacacagaaggaaaaatccttgttgaagatattgtgaagctagcatcccaaacagaaaacaatgaagaggaagaggaagcacggtagatgggagagtatatggaaacatcacactcgttcagcagtcaaaactcatgtattgaaaggcaatacgtccatttcttgtgtctcttgactgactttgatagtgacttccaattagcaaggtagattttctgtagaaaggctcatgctgacatgcatttagttagccgccgtgttgtgatttggcaggtaaaattgcaaccaaaatttagaccggttgcatggacgtggataatacagatcaattgtatttgttactactatgcaatcccgaaatattggatctgtttcaaattctcaagtaatcattgatggatgctatttattgaccataaagcttacggaatcattattgttttagctgattttatcgtgaccagttctgatcaatctacgtgcctgcgtggttgctgcattattctgcttggagtcaattttcattagttaaaattaaaggctgcgattttgcaccgaaatgtttctg

SEQ ID NO: 35008 - DNA, 244 bp, Zea Mays
catcgatgttggcggagggtggatgggttgtcgtcgcgccgccgtcggctaattggagacataccattgctgggggctcgattggtgcacggtggggttcggagatatgcagggaagcttatgggggcgtcaggggagagcgaaggaccctgtagccgccggaattgctctctgatgcctctgctccgccgtgggccgtgctgcaccgtggccggtgccctccacgtcgcgataaccggtgaga

SEQ ID NO: 35009 - DNA, 833 bp, Zea Mays
gagcgcgtccacccccttcctcctccgatcgagccagggccaggcaacctggtgctccgcccctcgccgttaccgcgacgcttcggcctctggctccaccgcctgcctccctggctctgtgaccgtgacgagacacgtcgccgagaggccaccccgcttgggattgtgaggtaaagcgtgatggcagcgccaccggcgagggcccgagccgactacgactacctcatcaaactgctcctcatcggtgacagcgcattgacttcaagataaggactgtcgagttggatggcaaacggattaagttgcagatctgggacactgcaggccaagaacgtttccgcacgattactactgcttactacaggggagcaatgggcatcttgcttgtgtacgatgtcacagacgagtcatctttcaataacataagaaattggatcagaaacattgagcaacatgcttcggataacgtgaacaaaattctggtggggaataaagctgatatggatgaaagcaaacgggctgtgcccacttcgaaggggcaagctctcgctgacgaatacgggataaagttttttgaaacgagtgcaaagacaaacctgaatgtcgagcaggttttcttttccatagcaagggacatcaaacagagactttcggagaccgattccaagcctgaggatcgaactatcaagatcaaggctgaaggggaagctgaggcagcggcggcggcgcagaattcagcttgctgtggctcctgagcacttgtcaccgcaagatagtggcgttctcgcgcatgtgttctatggttttgtataaaaagaaccccgcaattattg

SEQ ID NO: 35010 - DNA, 998 bp, Zea Mays
atctctacgccttgtgctgaacccagaggcagcgagagcgagtgcgagacaccggatcccgtccgcccccggaccaagaatcccaacctcacagcgatggcagcatcccgcagcgaggaacgtgatcagaatcagccagtggtgcttgtgacggggtgctcggagggcggcatcggccacgcgatggcacgcgccttcgctgcggccgggtgcgccgtcgtggccacggcgcggtcacgcggttccatgcgcggtctcgacggcgacccgcggttcctgctgctggagctcgacgtgcgctccgacgagagcgcgcgcgccgccgtggcggatgcgctgcgggagcacggccgcatcgacgtgctcgtcaacaacgctggggttcacctcgtcgcaccactcgccgaggtgcccatggagtccttccaccaggttttcgacaccaatgtctatgggttgaactaagaagcttcggcataaacgtgatgaccgtcgccccaggagggacgaggtcgaatcttgggaattcttctgcagccaagtatgatcagatgcacgagtggaagtactacaagaaatacgaggaagggctccgagccaggactggcatttcccagggccccaggtccactccagcagaagagcttgcaaaggcggtggttgcatcggttctaaagaagaaccctccagcttggttcgcttacggccagtactctgctattctgtcgattttgtattatgcaccgctatggttcagagattgcctctataagtttgtcatgaaatgttagtccctggaagaataatggctgtatggaccaaagagagagctggacaggcccagttcaattcatttcattgtactgacagcctgttacgtcgtactcctatattgtatatatagaactatgctctgtacctgttggcaacttggcatactacagcttctttcagggggcagattcaggttcaaaaagcttgatttcctcttcactaaa

SEQ ID NO: 35011 - DNA, 1761 bp, Zea Mays
tggttcgctactatttttgacctacacatgtataatttttcctcagatcgaaatatataaacattattaccatgggagaagagaagcaacgtcgggatggccatggcggaaagaacaagtacgccgtggcgtgctccattattggctccatcatctccattctcatgggctatgacacgggcgtcatgagcggcgcgatgctgttcatcaaggaggacctcaagaccaacgacacgcaggtccaggtcctcgccggcatcctcaacgtctgcgcccttgtcggctccctcacggccggccgcgtctccgactgggtcggccgccgccgcaccatctccctcgcggcctgcatcttcctcgcggggtcagtcctcatgggcctctcgcccaacttcggtacgctcctggcaggacgctgcgtggccggcgtcggcgtcggatacgcgctcatgatcgcgcccgtctacgcggccgagatttcgtccgcccacatccgcggctccgtcacctcgctgcccgagatctgcatcagcttcggcatcctgattgggtacgtggccaactacctgctagctaagctcccgctggtctacggctggcgcgccatgctggggctcggcgcgctgccgagcgccgtgctcgcagtcgccgtgctcgcgatgccggagtcgccccggtggctcgtcatgcagggccgcgtcgagcaggcccacgccgtgctcaggcgcgtgtccgacactgcaggcgaggccgatgtgcgcctcgcggaaatcaagaccgcggcggggctggcagacgacgatgacggctcaccgagaggtgtcggcaagggcgtgtggaaggagatgttcctgcacccgacgccccccgtccggcgtatcctcgtcgctgccttcggagtccacttcttccagcatctcacgggaatcgaagccgtggtcctctacagcccacgcatctttaaggcagccggcatcgccacccgcagcgagatccttgcagcgaccatcggcgtgggcgtcaccaagacggtgttcatcatgacagccatcctgctggtggaccgcatcggccggaggccgctctacctctcgagcctggcgggcatcatcgcctcgcttgcctgcctcggtcttggcctcaccgtcgtggagcgctcggtgccgcgccactcgccgacgtgggctatggcattgtccatcgcaacggtcttcaccttcatagcgtccttctccatcggtgtggggcccatcacgtgggcgtacagcaccgaggtgtacccgctccggctgcgcgcgcagggcgccagcgtcggcgtggccatcaaccgtgtcatgaacgccggggtctctatgacgttcgtgtcgctgtacaatgcggtgaccatcggcggtgcctttttcctgttcgcagggctggccgtgttggcggccatgttcttctacttcctctgcccggagacgcaaggacggccactggaggagatcgaagaggtgttcggccgtgggtggcgcgcgcgcctcctgtcatgggacgaagctgttgtggagcttccaatgtccaacaccaccgacggcaacaccaaggcgcgcccgtgatgcaaatgcgattgcaaaaattatggatagacattcatatatggtcacgtaaaacactagtttactttatattgtagaatatagttttttttaagtcaagagtcaagtttaaaatagaggataacataagtaatagaataaaaaactgctatagacagtttag

SEQ ID NO: 35012 - DNA, 3901 bp, Zea Mays
ctggtcgacgaagcgctgaaggtgttcggtcaaatgacggtaaggagcgtcatcacctggaaggctggaagaggaaggaagtttcacctttatcctttagctccaaccccaagcaaagcaaagaaccatcagcctttactttagtgaaagcactgaaagcagaatctaaaggcaaagctacataagaaatggcatcagaagctcgttgcacatttgcatcaagctacaacattgacagttagcaagctccttgtgttacagaactatagcttccttttgtcaaatattatgcggtgtggcactggcactggatagtggatacatagctgctctcaagataagggacatcaggcagaacggatgggttcggggtcttcaaagtcagagtttgaggactttcatgccaatgcggttgaagaggctgtgaaaaacctagctccttatttggaggacacaagggtgcgaaaccaggccatttactttgatggatgggatggacttggtgcatctgctgtccttaactcgatcgctgaacgccctccgccatctctgaggaacaaatttgatgatattattctacacattgactgttcaaggtggaaaagccggagagcactgcagaggacaattgcacagaaactagggcttcctcaacatgtcatggctgtttttgatagacaagacgaagaggacgatctagttggagtacatgaaggctcaagaactgagataagagacatcgggagagagatatatcgagtcctacaaagacagagcttcttagtggtcttccataacgggagtgataccatggttgacttcaatgactttggcatccctcgagctgctgcagatccttggtcaaacattatccggaaggtattgtggaccttccgtggaaggcttcatgccatcaaagaaacggaggaagtttcaggtcatctcaaacctgataaacgacaaccaaagggaactgagaccgtggacacttcatatctttgctttcgttcgttattttctggaggcccatcagatgtatcttcgtacaggcttcaaatactgtgtgaggaagctgcagcaatagctcaatacacgaataatcctatagtcactcaggaaatagctgaaatatgctgcaggtatttgttatcattgaattccaaggggaatggcaagctagatttcaactggagtgctcatgcctccaactattgggtttgtgatgggattctaaacgaatgccaaccagagcaagcatgggagattgccgcttctctgcacaaagagttacgactggagggctactcatctgctcgtaagttctgtcatcctggtgctgacacaacatcctgggttgtaaccatcaaatctagtgaagatattgtaccaactgtgaagccagagacaacgtctttctttttggcagtcaaaagaaaacatggccattcggttttgccattacccatgaaaatgttccaaagatccgagcaacttcatgttttgaagctctaccactgcagcttcagctttgcttcacctccattcctttgttgcctaaacctaagatttcttggacttgatagctgcacggatcatcaatcaatgaaaccgaaagaaaacaaagaagaggagtcggaggaggcaggggcagagggggaggaggagaatacagcaacaatcgaattctttcaaagcctatgggtgcttgacatatgttgcactgattgggaattgactttatccccaaatacaatagtgaaaatggcaacaaacattagggagataaacataaagaggggaagaatctggcacagcagtatttcatggagatttcttggtaacattcacaagcttcgagtgattgagcctacaagtccttgggagacaagtaataaggatgaatttatggacatggtgaagctggagcttcttgacctgtcagggaataccacaatacaatttttgccaagcttgtcaggtgcaatcagcctcagaacccttattctagatggttgtattgaattgcaacatgttgtgcctgaaacactccctccatggcttgaaacatttagctttgatggaggatataaacaagctaaaatctcatgtatctccttggctggttgtgcaagactggtcaacttcagattgtgtgggtcagtacagaaccttgaggagctggacctctcaaacacatcaatcaaaacacttgacctcagtgataaagtggtgcaggtcccatgcctagagcgcatcatcttgctgggatgtgagcggcttcgtgctgtcctgtggccaaaggatggaatgcccaatctaatggtgctaggcattgacactcggggaggcgcagaagcagctagtgcaaaaacagtacatgataactttgccatcagtaaagaacgagaagaaggttgtcgtgcatttgttgctgttatggaaatgaggttccttcagtcgttggtgctagcaagttccaataaactttgctgggacactgaccgtaagtatgatcttaacatctgcttgtcttcctctaggagtagcagcaaaggtgttggacaacacagctacaaggaggagacgatgggccctctgcagaagtcgatgatcacctccaagacttacctgacctacagcgatgtgaatattgacaaggcaggtagtgtgaggcagtttcagccactgcaccgtcatgtagagattggtgagggaataagcaactctagcatggtaaccgttcgtgaaatcagcgctgcgatccttttgataaatagggtctactcattgctcgtgcatgacaattcatccatcaggactgttatccctgaaaacataatgtctatagacacgaagaaggtctattggtcttgtctcaggtggtgctgtgtcgagagatgccccagtttggacagtgtcttcgccactaactacgatgccgtctgctttaatgctctagagaccttctgggcagctgatctcttggtggcccgatgtatctggagtaaaggaagaacaactaatgtgaaggacaccgaatccttcgctaaactgcaggctatacatctccactcctgtcctaggctggcatttgtcctcccactatcgtggttctacaccctgtccagccttgagacccttcacatcgtctattgtgataaccttggtcaggttttccccgtagaggcagagttcttaaacgaaatatctactggccatccaggaggtttgttggaattcccaaagctgaagcacatctggctacaggagctacccaagctgcagcagatatgtgaagccaagatgtttgctccggagctcaggaccatcaccttaagaggatgctggagccttaagcgcctccccgctaccgccgaccgcccaggtgatcgccctgtcgtggactgcgagaagaatttgtgggcgaagctggagtgggacgggaaggaggctggccaccacccttgtctcttcgagccacgccactccaagtaccacaagaagagagttcttagaaccacgcttctccgatgagccaaactgaccctggtaggtaagaataaatatatagcttcctgttgttttttccgtttcacgttggattgtgtatcatatgcaataccataatccataatctactgtactgccgccatggaacatcttttagctatcctgcatgctgttagagatggaactaagaacaaatacttatacacacattgttagatgtgttgtgatcggcttatggtcttcctgagctgcacaagtttgtattttccttttgtttatctcgttagttaatcatttacattatcaattatgtaagtttaatttggtgctgtgctggattgaaggcgacatatctcccagctgcttcctacggtacagtgccgactgcccg

SEQ ID NO: 35013 - DNA, 944 bp, Zea Mays
aaaagttaggcaaagtgtgccaagtgaggctgcaatccaaacatgcccacgtcttcgaagaaagcgacgggtgccggatccagacttcattccccaaaaccaaaataatcgccaccgctctccgcaccgaaccgaagcagcggcgatgtcggcggagaagccggctcccgtgcgcgtgctctactgcggcgtctgcggcctcccggccgagtactgcgagttcggccccgacttcgagcgctgcaagccctggctgcgcgcgcacgcgcccggcgtctaccccgacgaccttgtcgccgcctcctcctcacccggcggcggcgacaaggacgtcgacaaggtcggggatcgcctccagggcgtcgggatctccgacggctccaccagcgccgcaggggatgcttccgcgtctaagccccaagaggcgaaacgcctgcctggtggtaagctcaagaaaaaggagaagcaagaagtggtcattgagaagattgtccgtaacaagcgcaaatgtgttactgtggtgaaagggcttgaattgtttggtgtaaagcttagtgatgcttcgaagaagcttgggaagaagtttgcaaccggagcttctgttgttaagggccctacggagaaggagcaaatcgacgtacaaggggacatctcatatgatattgtggagttcattacagatacatggcctgatgtacctgagtcggccattttcttcattgaagatggaaggaaggttcctgctgcttgatgccatatggtttataaggcacgagaccaatggatttacaaatataatacagaggtaagtcccaggaatggtatcagccatcaaagagatgttcatgaagacaaccaaccaccagcatatgctcaactaccacttgcttcacttcacctccatgttttcacgttggccaatactgaggttgagcaatagatga

SEQ ID NO: 35014 - DNA, 2978 bp, Zea Mays
  misc_feature (1)..(2): n is a, c, g, or t
nngaattccaagagttggtggaccaagaaggtgccatttttgaaaagtgtgtgaccgctggtggcactactgttgaagatcaagacaaggaaatggagcaatctgcaggtgacgaatcaagagaaaccgaggctgagaatgctgtggaatataacaagaaggtggatcaagaagataccattaacagacaaggtacagctaaggaagacagtggtgtggagccacaagaggagaacgttgtggatccagatcaaggtgtggatgacttttctgtactagatgagggtaatgtggtggcacagtgcaccagtgatcaattgagaacaaccatggaagataatgctgcagagatgcaagaggtggtggagcaagaaggtgccatttttgaaaagggtgtgacctcagatggcattactgttgaagatcaagacaaggaaatggaacaatctgcaggcgatgaatcaagagtgaccaagggtgagaatgctgtgaaagataaaaaggtgtatcaagaagatgccattgacaaacaaggtgcagctgaggatggcagcggtgtgaagtcacaagaggacaacatggtggttccaggtcaatgtacagatggccttcctgtactagatgagggtaatgtggtgccacagtacacaagtgatcaactgagaacaaccacagataacaatgctgcagttgatccagagttggtggagcaagaaggtgttgatagcatagtgggtgcagccaaggttggtattgctgtggaagaatcgcgagaggacatcatggtggaaaagcaagttgaaggtgttcttttacaagatcaagatgaggcagtggagcaatgcaccagtgatcaactgaggacaatcacagatggtaatgatgtggaagatcaagaggtgcacagagagaaggttggtctctctgaagggtacccacagaagcctggtaaactgaactgtcgtttttacatgtcaacagggaggtgctcatatgggtcatcgtgccacttcaatcatccacggctcaaagcaaaactagaagtttcaagtttcccttccgaacaaagaaatcatgaagctgaatttctggaactgaaccgtgttggcctccccattagagaaggagcaaggaagtgtatctattacatgcgtaatggtacatgcagatatggaaagaaatgttgttttaaccatccagagcaagttcttgatgttcaacgccacactgcaacaggatgggatgatactaacttgcaatcttcaccacactcaaagaagtcacctgaacataaaactatggatgacatatcgtctggatctgaggttcttcctccaaacatacttcggatgcttttacctccccagaatgtgccccctagtacaaaagaaaaggaaatcaggataaaaaaggatcctgattgggcttcagcttcagatgattctgatggctgctgctcggccgatagttcagatgggcctttgtgcaagcaggaacatgaggactatcctgagaggcctgaatgccctttccttcttagatttggtaattgtaagtttgcatcatcatgccaatattaccacccaaaagacaaatttccaagtacctaccatccagaagacaaattccaaagtcgataccatcaaaaagaaaaatcaagtcgacaccatccaaaaaaagagccagcactatcaggagaactgatggtttatcctgacagacctagtgaacctgactgccccttctatgtgaaaactgggtcctgtaaatttggggcaaactgtaagtttcatcacccgaaggatataactccaaacatgcagggtccagcaagtccaaaaaggtcggtcgctgcaaaagagcaccacgcagcagctagagcgacattacaagaccagatgtaccagcaacaaaaattccctgagcggcctggccaaccagattgccggtactacatgcaatttgggaaatgtaaatttcaatcagcttgtatattcaatcattcaaaagacatactttcaagtgggtggcatccagcagaatgcccattctacatgaaaactaggacatgccaatttggatcagcttgtgagttttatcacccaaaagatcggtgctcaggcagagggggagtgattgatggtactgactatggacatgattttgccacgaagtcacggaatgttctgcaggaactggcaatatatcctgaaaggcctgatgaacttgagtgttctcactacatgaagcatggctactgtaaatataagatgaactgcaaatttcatcatccaagagatcgtcttccaaagaaatagtctacagtgcaaaacaatattttaggtggccatatgagtgaacggttggacacaatcttaaggaaaaagaagaaaaaggcatctagcactcagtttattactctcttagtgtccttttcttggtataggtactgcatttcctgtttaccaggtacacgagaatcacactaggagatacctttttgcaattgctggaccatttgctacaaccactgttgtaactggctgtcgttgatgagtggagcaagtactgatgatgggacagaaatgcaggaaggaagccatagtcttccttttttgaagagctcgattctactcatgtctatgtcgaatttctgccctagtgtcgttagagttctcgtaccagatgcgaactgcctggtggcttcccaactcccgttcattcatatactaccaaacattgctgtgatctagatctagcccgatgcggtgctaacctgagattgtgggttactgtagctcagtatgcagctcaggtacctgcacttgctcaagattgcgataatgatcagattaaaatagcaggccacgcatattctgcaacttgcgacttttacatcgttgttgagtctcctgggttcagcctctttattgtttttgtttgtgtgcgtgaccatgtgtgtcggactgtcggttgtc

SEQ ID NO: 35015 - DNA, 2389 bp, Zea Mays
aaaccacagcactggatagaacacgccaaaagcaagagatatttcagtttcgctcttgtctcagctcagctcagctcctgccagtcgcaactcgcgtcctctccaaaaaaacagcccacagttgaagcgaaaacacgaaagctcagtgatatttctctccaggtctgcacactcgtctcctatcgagactgtcggcggccatcgtcgcccacgctgtgctcatgctaagtgtcgaggctcacacgtactactactacccgaccgcgaggccgagacggaagctatgcgcctgcagaaacgtcttgcaagaaaccgccccgcgtgacgcggaggcagatccctgccgccacggcgagaggaagagcaggagaaggggcgacggtgcttattacatcgacaaggacggcggcggcgtagccaggaccttcgaccggaagaaaatatccagaaagagggttcaaggacaacatggcgtaggtaggttctagctctgaatggcatggcatggcttgggcttgggcgtgcagggggtgctatcaaagggcgtggatggaagtacggctccgggttcgtcgacggagtgttcccagtgctgagtccgatggcgcaggatgtgctagaactcgtgcagacgagggggaccgacgccgccagcgtctgggagtcactggacaagatccctcaagcacacgatctttgggacgacatcgtcaacgtcgccgtccagctccgcctgaaccggcaatgggagccgatcatcacagtctgcgagtgggtcctgcgccggagctcgttccgccccgacatcatctgctacaacctgctcatcgacgcgtacggccagaagcgtcagctgagcgaggcggaggcggcctacatggcgcttctggaggctcgctgcgtgcctacggaggacacctacgctctgctgctgcgcgcgtactgcggctccgggcagctgcaccgagccgagggcgtgatttcggagatgcagaggaacgggatccctcccactgcgactgtgtacaacgcgtacctggacggtctgctgaaagcgaggtgttcggagaaggcggttgaagtgtaccagaggatgaagaaggagcgctgcagaactaacaccgagacctacaccctgatgatcaacgtgtatgggaaagcaaatcagccgatgtcgtcgttgagagtgttcagggagatgaaatcggtcgggtgcaagcccaacatctgcacctacacggcgctggtgaacgcgttcgcgcgggaaggcctgtgcgagaaggcagaggaggtgttcgaggagatgcagcaggctgggcacgaacctgacgtgtacgcctacaatgctctgatggaagcttacagccgcgcagggctgccgcaaggggcgtcggagatcttctctttgatggaacacatggggtgcgagcctgatagagcctcttacaacatactggtggatgctttcggacgagctggtcttcaccaagaggcggaagcagcgttccaagagctgaagcagcagggcatgcggccgacgatgaagtcgcacatgctgctcctgtcggcgcacgccaggtccggcaacgtggcgaggtgcgaggaggtgatggcgcagctgcacaagtccgggctgcgcccggacaccttcgcgctcaacgccatgctcaacgcgtacggccgggccgggcggctggacgacatggagcggctcttcgcggccatggagcgcggcgacggcgcgatcgccggcgccccggacaccagcacgtacaacgtgatggtgaacgcgtacgggcgcgcggggtacctggaccggatggaggcggcgttccgctccctggcggcgcggggcctcgccgccgacgtggtgacgtggacgtcccgcatcggcgcgtacgccaggaagaaggagtacgggcagtgcctgcgggtcttcgaggagatggtggacgccgggtgctacccggacgccggcaccgccaaggtgctgctcgccgcgtgctccgacgagcgccaggtggagcaggtcaaggccattgtcaggtccatgcacaaggacgccaagacgctcttcgcattgtgaaatccgcgcaggctaaattccgatcctgctgcgtgatcacatacgaaccttgacgagagtcacctagcttgcatactggttaacaagtcacaaggccccgtttggttacatatagaataatctactttttagtcccgtttagtacttaattgtatttagtctctagcccttcactgtaagggcctcacatcacatgggtgctaaaggggacgaaaggacatcatttactctaattaccattgcatagagaatatgcaccgtatacatgcaataaaaagagaggcatttcagtctgtgtacttc

SEQ ID NO: 35016 - DNA, 756 bp, Zea Mays
tccagtcccaggtttagacaggccaggaggtgcgccgccgccgcggcgattggtggtcaggaggagatgccaggaagagaataagcagcagcaagaggccgaggagggaagcggcgctgacgagcaggagcagcagaagagaacgttcctgagcctggaggaggccgggctggtggagatgtccggactcagcacgcacgagcgcttcctctgccgcctcaccatatcgtctctgaacctcctgagagtgatctcggagcaggagggcgtcccgatagaggagctcaacgccgggcgcgtctgcgactggttcctcaaggacaagctcaagagagagcagaacgtcggcaccgccgtcttgcagtgggacgaccctggcttctagctagttccagcttcgttctgagccaatgatcatgctattctacactgcagcgcacgcaggggctatatatttcagggcttcaggcccttcacgggatgagcaaccaatgccacatgttcagtaatctcagaatttcagtttcaagaatgggcgcatcaatcctggccattccatttatatatctttcggtttggtttcatctttacaaattttctgtagcgacgaacatttttcctgtgcggaaaatgggaaaggaatttacgggtaaactgattttgggagatagatcgagtttcttgcaaataaattctgtcagctccaatttatctcctctgatcgttaatccggttattcaatcgaaaccaaagccg

SEQ ID NO: 35017 - DNA, 2126 bp, Zea Mays
atccattaacgttggagacttggagtgaagctgtccattttcgaccaaccctactcgtctcgtaccgtccaagacggggcaaagaatgcccggggaagccggcgagctggagcctggcggcagcttggcaccgatcgtcctccattcccgtcgctcccgacctcctcctaatttatcccacccggcctccccggttcgccccgaccacatcccccccttaacctcccctcctcctcctcctgcggtcccaactcccatccttcggttcaggagggaggcaggcaggcaggaaggcaggttcgaggagggattggctccgctcctgctccattgcgcgtgatccggctcgttcttttgattgatctaggcgtttcttggattagtcctggaaggtcaaacggttgttggaagcctcgctgggtgcttcaacgaacgcgaaggtgttgctgtcatttagagcgtcttgattggatttgacctgttggcctggtggcgtgccgtcgttgattgagctcgaggatgatcaagtgggggctcagcagcggcacgcccgcggattcctactacgaggtccggtcagattgcacggacggtgtgcccaagagcaagttcaagattaaggctggcaaaacattaagtgctcggaaatggcaggctgcatttagtcctgatggctgtcttgatattgcctcagtcctaagcaggatacagagaggaggtgtccatccaacagtcagaggagaggtttgggaattcttacttggctgttttgatcccagaagtacctttgatgaaagggaagagatcaggcaaatacggaggatacagtatgccagatggaaggaagattgtcgacagatggattctcatgttggtagtggtaaagttatcacagcaccacttatcactgaggatggcagacctattaaggatcctctggttttacttgaggctacttctgacacgaacacttcaggagatgctccaactaccagcataaatggaaatgaagttgatgaatctgcagaacgcattaccgataagcaaattatcgagtggaagctgacattacatcaaattgggcttgacgtcctacggactgatcgcaccatggtattctatgagaacaaagaaaacctttccaaattatgggatattctagccgtgtatgcatggattgacaaagatgttggttactgccaaggaatgagtgatttgtgctcaccaatgatagttctactaaacgatgaagcagatgcattttggtgctttgagaaattgatgcgtagattgcgaggaaatttcagatgcacagatcaatctgtgggagttgccaaccaacttcaacaccttgcgtctattattcaggttcttgaccccaagctacatgaccacctagatgatgtgggctctggaatacgaccctgacattttcttcgcagcgtgtgaagaacaaggtgcagtaaataaaaacaaagtttctaaatccaaactgaaaggactgcgccattttggcaagtgggataataaggataaggacaaggataaggaagatgctaaaaatggggctgaggatggtgaagacggtcctgttccaatttcagttttcatggttgcaagtgtccttaaggaaaagagagaaaagctgttacaagaagctagaggactggacgatcttatcaggatattgaacgatgtaaatgggaacttagatgccaagaaagcttgtgctggagcattgaaacttcacaagaaatacctgaaaaaggtacaagaaaagaaaccttaaacgtgccatggaacacacctacccaatgggttattcttaccatttgaacatacacgaccattttctacacaccacttttgagtgaagatttacaggacaaaggtggtagacgactgacatgttctcagatatggtaccaggctagtgggttgagtacaggatgagtgcaaccggtagtttgtattgtattgtatctcacgttctttgtactcaagaattttgttggctgtacaggcagaaggcggtgcgggtagcatgccttgcgtacataattatttgaatacaagttgaattgaacaccatcttacgactaggagtgttaatgactttaaatttt
